United States Patent Application Publication US 2023/0212319 A1 - sequence listing, part 5

SEQ ID NO: 6042 - DNA, 3438 bp, Artificial Sequence
  Synthetic Polynucloetide
atggccttaccagtgaccgccttgctcctgccgctggccttgctgctccacgccgccaggccggaagtgcaactggtggaatctggaggctctctggtgcagccagggggaagcctgagactgtcttgtgccgcttccggcttcaccttcgacgactacgccatgagctgggtgcgccaggtgccaggcaaaggcctggaatgggtgtccagcatcaactggagcggcacccacaccgattacgccgactccgtgaaaggcagattcacaatcagcagaaacaacgccaacaataccctgtacctgcagatgaactccctgaagtctgaggatacagcagtgtattattgcgccaagaactggcgggacgccggcaccacttggtttgagaaaagcggctctgccggacagggaacccaagtgacagtgtcctccggtaccggcggaggcggatctggcggcggaggtagcggtggcggaggatctgaattcgacatccagatgacacagagccctagcagcctgtctgccagcgtgggagacagagtgaccatcacatgcaaggccagcgaccacatcaacaactggctggcctggtatcagcagaagcctggacaggcccctaagctgctgatctacggcgctaccacactggaaacaggcgtgcccagcagattttctggcagcggctctggcaccgactacaccctgacaatatccagcctccagcctgaggacttcgccacctactactgtcagcagagctggaacaccccttggacattcggccagggcaccaagctggaaatcaagagactcgaggacctgaagaacgtgttcccacctgaggtggccgtgttcgagcctagcgaggccgagatcagccacacccagaaagccaccctcgtgtgcctggctaccggcttctaccccgaccatgtggaactgtcttggtgggtcaacggcaaagaggtgcacagcggcgtgtgtaccgacccccagccactgaaagaacagcccgccctgaacgacagccggtactgcctgagcagcagactgagagtgtccgccaccttctggcagaacccccggaaccacttcagatgccaggtgcagttctacggcctgagcgagaacgacgagtggacccaggacagagccaagcccgtgacccagatcgtgtctgccgaagcctggggcagagccgattgcggctttaccagcgagagctaccagcagggcgtgctgagcgccaccatcctgtacgagatcctgctgggcaaggccaccctgtacgccgtgctggtgtctgccctggtgctgatggctatggtcaagcggaaggacagccggggaagggccaagcgatctggatctggagcaacaaacttctcactactcaaacaagcaggtgacgtggaggagaatcccgggcctactagtatggactggatttggcgcatccttttccttgtcggcgctgctaccggcgcccattccgggcccgaagtgcagctggttgaatctggcggaggactggttcagcctggcggatctctgagactgtcttgtgccgcctctggcttcgccagcgactactatatcatcggctggttcagacaggcccctggcaaagagagagagggcgtcagctgtatcagcagcagatacgccaacaccaactacgccgacagcgtgaagggcagattcaccatcagccgggacaacgccaagaacaccgtgtacctccagatgaacagcctgaagcctgaggacaccgccgtgtactactgtgccgccgacaccagaagatacacctgtcctgacattgccaccatgcaccggaacttcgattcttggggccagggcacactggtcaccgtttcttctggatccggcggcggaggatctggcggaggcggatctgggggcggaggctctttcgaacaagttcagcttcaacagcctggcgctgagctggtcaaacctggcgcttctgtgaagatgagctgcaaagccagcggctacgccttcagcagctactggatcaactggatgaagcagaaacccggccagggactcgaatggatcggccaaatctatcccggcgacggcgacaccaactacaacggcaagttcaagggcagagccacactgaccgccgatacctctagcagcacagcctacatgcagctgagcagcctgaccagcgaagatagcgccgtgtacttctgtgcccggtccatcacaacagtcgtgggctgcgctatggactattggggccagggaacaagcgtgaccgtgtctagtacgcgtatccagaaccctgatcctgccgtgtaccagctgcgggatagcaagagcagcgacaagagcgtgtgtctgttcaccgacttcgacagccagaccaacgtgtcccagagcaaggactccgacgtgtacatcaccgataagtgcgtgctggacatgcggagcatggacttcaagagcaactccgccgtggcctggtccaacaagtccgatttcgcctgcgccaacgccttcaacaacagcattatccccgaggacacattcttcccaagccccgagagcagctgcgacgtgaagctggtggaaaagagcttcgagacagacaccaacctgaacttccagaacctgagcgtgatcggcttcagaatcctgctgctgaaagtggccggctttaacctgctgatgaccctgcggctgtggtccagccgcgccaagagaagcggatctggcgtgaagcagaccctgaatttcgacctgctgaagctggctggcgacgtggaatccaacccaggcccttctagaggccatatgaccgagtacaagcccacggtgcgcctcgccacccgcgacgacgtccccagggccgtacgcaccctcgccgccgcgttcgccgactaccccgccacgcgccacaccgtcgatccggaccgccacatcgagcgggtcaccgagctgcaagaactcttcctcacgcgcgtcgggctcgacatcggcaaggtgtgggtcgcggacgacggcgccgcggtggcggtctggaccacgccggagagcgtcgaagcgggggcggtgttcgccgagatcggcccgcgcatggccgagttgagcggttcccggctggccgcgcagcaacagatggaaggcctcctggcgccgcaccggcccaaggagcccgcgtggttcctggccaccgtcggcgtctcgcccgaccaccagggcaagggtctgggcagcgccgtcgtgctccccggagtggaggcggccgagcgcgccggggtgcccgccttcctggagacctccgcgccccgcaacctccccttctacgagcggctcggcttcaccgtcaccgccgacgtcgaggtgcccgaaggaccgcgcacctggtgcatgacccgcaagcccggtgcctga

SEQ ID NO: 6043 - DNA, 2736 bp, Artificial Sequence
  Synthetic Polynucloetide
atggccttaccagtgaccgccttgctcctgccgctggccttgctgctccacgccgccaggccggaagtgcaactggtggaatctggaggctctctggtgcagccagggggaagcctgagactgtcttgtgccgcttccggcttcaccttcgacgactacgccatgagctgggtgcgccaggtgccaggcaaaggcctggaatgggtgtccagcatcaactggagcggcacccacaccgattacgccgactccgtgaaaggcagattcacaatcagcagaaacaacgccaacaataccctgtacctgcagatgaactccctgaagtctgaggatacagcagtgtattattgcgccaagaactggcgggacgccggcaccacttggtttgagaaaagcggctctgccggacagggaacccaagtgacagtgtcctccggtaccggcggaggcggatctggcggcggaggtagcggtggcggaggatctgaattcgacatccagatgacacagagccctagcagcctgtctgccagcgtgggagacagagtgaccatcacatgcaaggccagcgaccacatcaacaactggctggcctggtatcagcagaagcctggacaggcccctaagctgctgatctacggcgctaccacactggaaacaggcgtgcccagcagattttctggcagcggctctggcaccgactacaccctgacaatatccagcctccagcctgaggacttcgccacctactactgtcagcagagctggaacaccccttggacattcggccagggcaccaagctggaaatcaagagactcgaggacctgaagaacgtgttcccacctgaggtggccgtgttcgagcctagcgaggccgagatcagccacacccagaaagccaccctcgtgtgcctggctaccggcttctaccccgaccatgtggaactgtcttggtgggtcaacggcaaagaggtgcacagcggcgtgtgtaccgacccccagccactgaaagaacagcccgccctgaacgacagccggtactgcctgagcagcagactgagagtgtccgccaccttctggcagaacccccggaaccacttcagatgccaggtgcagttctacggcctgagcgagaacgacgagtggacccaggacagagccaagcccgtgacccagatcgtgtctgccgaagcctggggcagagccgattgcggctttaccagcgagagctaccagcagggcgtgctgagcgccaccatcctgtacgagatcctgctgggcaaggccaccctgtacgccgtgctggtgtctgccctggtgctgatggctatggtcaagcggaaggacagccggggaagggccaagcgatctggatctggagcaacaaacttctcactactcaaacaagcaggtgacgtggaggagaatcccgggcctactagtatggactggatttggcgcatccttttccttgtcggcgctgctaccggcgcccattccgggcccgaagtgcagctggttgaatctggcggaggactggttcagcctggcggatctctgagactgtcttgtgccgcctctggcttcgccagcgactactatatcatcggctggttcagacaggcccctggcaaagagagagagggcgtcagctgtatcagcagcagatacgccaacaccaactacgccgacagcgtgaagggcagattcaccatcagccgggacaacgccaagaacaccgtgtacctccagatgaacagcctgaagcctgaggacaccgccgtgtactactgtgccgccgacaccagaagatacacctgtcctgacattgccaccatgcaccggaacttcgattcttggggccagggcacactggtcaccgtttcttctggatccggcggcggaggatctggcggaggcggatctgggggcggaggctctttcgaacaagttcagcttcaacagcctggcgctgagctggtcaaacctggcgcttctgtgaagatgagctgcaaagccagcggctacgccttcagcagctactggatcaactggatgaagcagaaacccggccagggactcgaatggatcggccaaatctatcccggcgacggcgacaccaactacaacggcaagttcaagggcagagccacactgaccgccgatacctctagcagcacagcctacatgcagctgagcagcctgaccagcgaagatagcgccgtgtacttctgtgcccggtccatcacaacagtcgtgggctgcgctatggactattggggccagggaacaagcgtgaccgtgtctagtacgcgtatccagaaccctgatcctgccgtgtaccagctgcgggatagcaagagcagcgacaagagcgtgtgtctgttcaccgacttcgacagccagaccaacgtgtcccagagcaaggactccgacgtgtacatcaccgataagtgcgtgctggacatgcggagcatggacttcaagagcaactccgccgtggcctggtccaacaagtccgatttcgcctgcgccaacgccttcaacaacagcattatccccgaggacacattcttcccaagccccgagagcagctgcgacgtgaagctggtggaaaagagcttcgagacagacaccaacctgaacttccagaacctgagcgtgatcggcttcagaatcctgctgctgaaagtggccggctttaacctgctgatgaccctgcggctgtggtccagc

SEQ ID NO: 6044 - DNA, 3411 bp, Artificial Sequence
  Synthetic Polynucloetide
atggccttaccagtgaccgccttgctcctgccgctggccttgctgctccacgccgccaggccggaagtgcaactggtggaatctggaggctctctggtgcagccagggggaagcctgagactgtcttgtgccgcttccggcttcaccttcgacgactacgccatgagctgggtgcgccaggtgccaggcaaaggcctggaatgggtgtccagcatcaactggagcggcacccacaccgattacgccgactccgtgaaaggcagattcacaatcagcagaaacaacgccaacaataccctgtacctgcagatgaactccctgaagtctgaggatacagcagtgtattattgcgccaagaactggcgggacgccggcaccacttggtttgagaaaagcggctctgccggacagggaacccaagtgacagtgtcctccggtaccggcggaggcggatctggcggcggaggtagcggtggcggaggatctgaattcgacatccagatgacacagagccctagcagcctgtctgccagcgtgggagacagagtgaccatcacatgcaaggccagcgaccacatcaacaactggctggcctggtatcagcagaagcctggacaggcccctaagctgctgatctacggcgctaccacactggaaacaggcgtgcccagcagattttctggcagcggctctggcaccgactacaccctgacaatatccagcctccagcctgaggacttcgccacctactactgtcagcagagctggaacaccccttggacattcggccagggcaccaagctggaaatcaagagactcgaggacctgaagaacgtgttcccacctgaggtggccgtgttcgagcctagcgaggccgagatcagccacacccagaaagccaccctcgtgtgcctggctaccggcttctaccccgaccatgtggaactgtcttggtgggtcaacggcaaagaggtgcacagcggcgtgtgtaccgacccccagccactgaaagaacagcccgccctgaacgacagccggtactgcctgagcagcagactgagagtgtccgccaccttctggcagaacccccggaaccacttcagatgccaggtgcagttctacggcctgagcgagaacgacgagtggacccaggacagagccaagcccgtgacccagatcgtgtctgccgaagcctggggcagagccgattgcggctttaccagcgagagctaccagcagggcgtgctgagcgccaccatcctgtacgagatcctgctgggcaaggccaccctgtacgccgtgctggtgtctgccctggtgctgatggctatggtcaagcggaaggacagccggggaagggccaagcgatctggatctggagcaacaaacttctcactactcaaacaagcaggtgacgtggaggagaatcccgggcctactagtatggactggatttggcgcatccttttccttgtcggcgctgctaccggcgcccattccgggcccgaagtgcagctggttgaatctggcggaggactggttcagcctggcggatctctgagactgtcttgtgccgcctctggcttcgccagcgactactatatcatcggctggttcagacaggcccctggcaaagagagagagggcgtcagctgtatcagcagcagatacgccaacaccaactacgccgacagcgtgaagggcagattcaccatcagccgggacaacgccaagaacaccgtgtacctccagatgaacagcctgaagcctgaggacaccgccgtgtactactgtgccgccgacaccagaagatacacctgtcctgacattgccaccatgcaccggaacttcgattcttggggccagggcacactggtcaccgtttcttctggatccggcggcggaggatctggcggaggcggatctgggggcggaggctctttcgaacaagttcagcttcaacagcctggcgctgagctggtcaaacctggcgcttctgtgaagatgagctgcaaagccagcggctacgccttcagcagctactggatcaactggatgaagcagaaacccggccagggactcgaatggatcggccaaatctatcccggcgacggcgacaccaactacaacggcaagttcaagggcagagccacactgaccgccgatacctctagcagcacagcctacatgcagctgagcagcctgaccagcgaagatagcgccgtgtacttctgtgcccggtccatcacaacagtcgtgggctgcgctatggactattggggccagggaacaagcgtgaccgtgtctagtacgcgtatccagaaccctgatcctgccgtgtaccagctgcgggatagcaagagcagcgacaagagcgtgtgtctgttcaccgacttcgacagccagaccaacgtgtcccagagcaaggactccgacgtgtacatcaccgataagtgcgtgctggacatgcggagcatggacttcaagagcaactccgccgtggcctggtccaacaagtccgatttcgcctgcgccaacgccttcaacaacagcattatccccgaggacacattcttcccaagccccgagagcagctgcgacgtgaagctggtggaaaagagcttcgagacagacaccaacctgaacttccagaacctgagcgtgatcggcttcagaatcctgctgctgaaagtggccggctttaacctgctgatgaccctgcggctgtggtccagccgcgccaagagaagcggatctggcgtgaagcagaccctgaatttcgacctgctgaagctggctggcgacgtggaatccaacccaggcccttctagaggcgggatccacaccatggctacctacgaggtgctgtgcgaggtggcaagaaagctgggcaccgacgacagagaagtggtgctgttcctgctgaacgtgttcatccctcagcctacactggcccagctgatcggtgcactgagagccctgaaagaggaaggccggctgacctttcctctgctggccgaatgcctgttcagagccggaagaagggatctgctgcgggacctgctgcatctggaccccagatttctggaaagacacctggccggcaccatgagctacttcagcccttaccagctgaccgtgctgcacgttgacggcgaactgtgcgccagagatattcggagcctgatcttcctgagcaaggacaccatcggcagccggtctacccctcagacatttctgcactgggtgtactgcatggaaaacctggacctgctcggccccacagatgtggatgccctgatgtccatgctgagaagcctgagcagagtggacctccagagacaggtgcagacactgatgggactgcacctgagcggacctagccacagccagcactacagacacacccct

SEQ ID NO: 6045 - DNA, 2748 bp, Artificial Sequence
  Synthetic Polynucloetide
atggccttaccagtgaccgccttgctcctgccgctggccttgctgctccacgccgccaggccggaagtgcaactggtggaatctggaggctctctggtgcagccagggggaagcctgagactgtcttgtgccgcttccggcttcaccttcgacgactacgccatgagctgggtgcgccaggtgccaggcaaaggcctggaatgggtgtccagcatcaactggagcggcacccacaccgattacgccgactccgtgaaaggcagattcacaatcagcagaaacaacgccaacaataccctgtacctgcagatgaactccctgaagtctgaggatacagcagtgtattattgcgccaagaactggcgggacgccggcaccacttggtttgagaaaagcggctctgccggacagggaacccaagtgacagtgtcctccggtaccggcggaggcggatctggcggcggaggtagcggtggcggaggatctgaattcgacatccagatgacacagagccctagcagcctgtctgccagcgtgggagacagagtgaccatcacatgcaaggccagcgaccacatcaacaactggctggcctggtatcagcagaagcctggacaggcccctaagctgctgatctacggcgctaccacactggaaacaggcgtgcccagcagattttctggcagcggctctggcaccgactacaccctgacaatatccagcctccagcctgaggacttcgccacctactactgtcagcagagctggaacaccccttggacattcggccagggcaccaagctggaaatcaagagactcgagatccagaaccctgatcctgccgtgtaccagctgcgggatagcaagagcagcgacaagagcgtgtgtctgttcaccgacttcgacagccagaccaacgtgtcccagagcaaggactccgacgtgtacatcaccgataagtgcgtgctggacatgcggagcatggacttcaagagcaactccgccgtggcctggtccaacaagtccgatttcgcctgcgccaacgccttcaacaacagcattatccccgaggacacattcttcccaagccccgagagcagctgcgacgtgaagctggtggaaaagagcttcgagacagacaccaacctgaacttccagaacctgagcgtgatcggcttcagaatcctgctgctgaaagtggccggctttaacctgctgatgaccctgcggctgtggtccagccgcgccaagagaagcggatctggcgtgaagcagaccctgaatttcgacctgctgaagctggctggcgacgtggaatccaacccaggccctactagtatggactggatttggcgcatccttttccttgtcggcgctgctaccggcgcccattccgggcccgaagtgcagctggttgaatctggcggaggactggttcagcctggcggatctctgagactgtcttgtgccgcctctggcttcgccagcgactactatatcatcggctggttcagacaggcccctggcaaagagagagagggcgtcagctgtatcagcagcagatacgccaacaccaactacgccgacagcgtgaagggcagattcaccatcagccgggacaacgccaagaacaccgtgtacctccagatgaacagcctgaagcctgaggacaccgccgtgtactactgtgccgccgacaccagaagatacacctgtcctgacattgccaccatgcaccggaacttcgattcttggggccagggcacactggtcaccgtttcttctggatccggcggcggaggatctggcggaggcggatctgggggcggaggctctttcgaacaagttcagcttcaacagcctggcgctgagctggtcaaacctggcgcttctgtgaagatgagctgcaaagccagcggctacgccttcagcagctactggatcaactggatgaagcagaaacccggccagggactcgaatggatcggccaaatctatcccggcgacggcgacaccaactacaacggcaagttcaagggcagagccacactgaccgccgatacctctagcagcacagcctacatgcagctgagcagcctgaccagcgaagatagcgccgtgtacttctgtgcccggtccatcacaacagtcgtgggctgcgctatggactattggggccagggaacaagcgtgaccgtgtctagtacgcgtgaggacctgaagaacgtgttcccacctgaggtggccgtgttcgagcctagcgaggccgagatcagccacacccagaaagccaccctcgtgtgcctggctaccggcttctaccccgaccatgtggaactgtcttggtgggtcaacggcaaagaggtgcacagcggcgtgtgtaccgacccccagccactgaaagaacagcccgccctgaacgacagccggtactgcctgagcagcagactgagagtgtccgccaccttctggcagaacccccggaaccacttcagatgccaggtgcagttctacggcctgagcgagaacgacgagtggacccaggacagagccaagcccgtgacccagatcgtgtctgccgaagcctggggcagagccgattgcggctttaccagcgagagctaccagcagggcgtgctgagcgccaccatcctgtacgagatcctgctgggcaaggccaccctgtacgccgtgctggtgtctgccctggtgctgatggctatggtcaagcggaaggacagccgggga

SEQ ID NO: 6046 - DNA, 3414 bp, Artificial Sequence
  Synthetic Polynucloetide
atggccttaccagtgaccgccttgctcctgccgctggccttgctgctccacgccgccaggccggaagtgcaactggtggaatctggaggctctctggtgcagccagggggaagcctgagactgtcttgtgccgcttccggcttcaccttcgacgactacgccatgagctgggtgcgccaggtgccaggcaaaggcctggaatgggtgtccagcatcaactggagcggcacccacaccgattacgccgactccgtgaaaggcagattcacaatcagcagaaacaacgccaacaataccctgtacctgcagatgaactccctgaagtctgaggatacagcagtgtattattgcgccaagaactggcgggacgccggcaccacttggtttgagaaaagcggctctgccggacagggaacccaagtgacagtgtcctccggtaccggcggaggcggatctggcggcggaggtagcggtggcggaggatctgaattcgacatccagatgacacagagccctagcagcctgtctgccagcgtgggagacagagtgaccatcacatgcaaggccagcgaccacatcaacaactggctggcctggtatcagcagaagcctggacaggcccctaagctgctgatctacggcgctaccacactggaaacaggcgtgcccagcagattttctggcagcggctctggcaccgactacaccctgacaatatccagcctccagcctgaggacttcgccacctactactgtcagcagagctggaacaccccttggacattcggccagggcaccaagctggaaatcaagagactcgagatccagaaccctgatcctgccgtgtaccagctgcgggatagcaagagcagcgacaagagcgtgtgtctgttcaccgacttcgacagccagaccaacgtgtcccagagcaaggactccgacgtgtacatcaccgataagtgcgtgctggacatgcggagcatggacttcaagagcaactccgccgtggcctggtccaacaagtccgatttcgcctgcgccaacgccttcaacaacagcattatccccgaggacacattcttcccaagccccgagagcagctgcgacgtgaagctggtggaaaagagcttcgagacagacaccaacctgaacttccagaacctgagcgtgatcggcttcagaatcctgctgctgaaagtggccggctttaacctgctgatgaccctgcggctgtggtccagccgcgccaagagaagcggatctggcgtgaagcagaccctgaatttcgacctgctgaagctggctggcgacgtggaatccaacccaggccctactagtatggactggatttggcgcatccttttccttgtcggcgctgctaccggcgcccattccgggcccgaagtgcagctggttgaatctggcggaggactggttcagcctggcggatctctgagactgtcttgtgccgcctctggcttcgccagcgactactatatcatcggctggttcagacaggcccctggcaaagagagagagggcgtcagctgtatcagcagcagatacgccaacaccaactacgccgacagcgtgaagggcagattcaccatcagccgggacaacgccaagaacaccgtgtacctccagatgaacagcctgaagcctgaggacaccgccgtgtactactgtgccgccgacaccagaagatacacctgtcctgacattgccaccatgcaccggaacttcgattcttggggccagggcacactggtcaccgtttcttctggatccggcggcggaggatctggcggaggcggatctgggggcggaggctctttcgaacaagttcagcttcaacagcctggcgctgagctggtcaaacctggcgcttctgtgaagatgagctgcaaagccagcggctacgccttcagcagctactggatcaactggatgaagcagaaacccggccagggactcgaatggatcggccaaatctatcccggcgacggcgacaccaactacaacggcaagttcaagggcagagccacactgaccgccgatacctctagcagcacagcctacatgcagctgagcagcctgaccagcgaagatagcgccgtgtacttctgtgcccggtccatcacaacagtcgtgggctgcgctatggactattggggccagggaacaagcgtgaccgtgtctagtacgcgtgaggacctgaagaacgtgttcccacctgaggtggccgtgttcgagcctagcgaggccgagatcagccacacccagaaagccaccctcgtgtgcctggctaccggcttctaccccgaccatgtggaactgtcttggtgggtcaacggcaaagaggtgcacagcggcgtgtgtaccgacccccagccactgaaagaacagcccgccctgaacgacagccggtactgcctgagcagcagactgagagtgtccgccaccttctggcagaacccccggaaccacttcagatgccaggtgcagttctacggcctgagcgagaacgacgagtggacccaggacagagccaagcccgtgacccagatcgtgtctgccgaagcctggggcagagccgattgcggctttaccagcgagagctaccagcagggcgtgctgagcgccaccatcctgtacgagatcctgctgggcaaggccaccctgtacgccgtgctggtgtctgccctggtgctgatggctatggtcaagcggaaggacagccggggaagggccaagcgatctggatctggagcaacaaacttctcactactcaaacaagcaggtgacgtggaggagaatcccgggccttctagaggcgggatccacaccatggctacctacgaggtgctgtgcgaggtggcaagaaagctgggcaccgacgacagagaagtggtgctgttcctgctgaacgtgttcatccctcagcctacactggcccagctgatcggtgcactgagagccctgaaagaggaaggccggctgacctttcctctgctggccgaatgcctgttcagagccggaagaagggatctgctgcgggacctgctgcatctggaccccagatttctggaaagacacctggccggcaccatgagctacttcagcccttaccagctgaccgtgctgcacgttgacggcgaactgtgcgccagagatattcggagcctgatcttcctgagcaaggacaccatcggcagccggtctacccctcagacatttctgcactgggtgtactgcatggaaaacctggacctgctcggccccacagatgtggatgccctgatgtccatgctgagaagcctgagcagagtggacctccagagacaggtgcagacactgatgggactgcacctgagcggacctagccacagccagcactacagacacacccct

SEQ ID NO: 6047 - DNA, 3438 bp, Artificial Sequence
  Synthetic Polynucloetide
atggccttaccagtgaccgccttgctcctgccgctggccttgctgctccacgccgccaggccggaagtgcaactggtggaatctggaggctctctggtgcagccagggggaagcctgagactgtcttgtgccgcttccggcttcaccttcgacgactacgccatgagctgggtgcgccaggtgccaggcaaaggcctggaatgggtgtccagcatcaactggagcggcacccacaccgattacgccgactccgtgaaaggcagattcacaatcagcagaaacaacgccaacaataccctgtacctgcagatgaactccctgaagtctgaggatacagcagtgtattattgcgccaagaactggcgggacgccggcaccacttggtttgagaaaagcggctctgccggacagggaacccaagtgacagtgtcctccggtaccggcggaggcggatctggcggcggaggtagcggtggcggaggatctgaattcgacatccagatgacacagagccctagcagcctgtctgccagcgtgggagacagagtgaccatcacatgcaaggccagcgaccacatcaacaactggctggcctggtatcagcagaagcctggacaggcccctaagctgctgatctacggcgctaccacactggaaacaggcgtgcccagcagattttctggcagcggctctggcaccgactacaccctgacaatatccagcctccagcctgaggacttcgccacctactactgtcagcagagctggaacaccccttggacattcggccagggcaccaagctggaaatcaagagactcgaggacctgaagaacgtgttcccacctgaggtggccgtgttcgagcctagcgaggccgagatcagccacacccagaaagccaccctcgtgtgcctggctaccggcttctaccccgaccatgtggaactgtcttggtgggtcaacggcaaagaggtgcacagcggcgtgtctaccgacccccagccactgaaagaacagcccgccctgaacgacagccggtactgcctgagcagcagactgagagtgtccgccaccttctggcagaacccccggaaccacttcagatgccaggtgcagttctacggcctgagcgagaacgacgagtggacccaggacagagccaagcccgtgacccagatcgtgtctgccgaagcctggggcagagccgattgcggctttaccagcgagagctaccagcagggcgtgctgagcgccaccatcctgtacgagatcctgctgggcaaggccaccctgtacgccgtgctggtgtctgccctggtgctgatggctatggtcaagcggaaggacagccggggaagggccaagcgatctggatctggagcaacaaacttctcactactcaaacaagcaggtgacgtggaggagaatcccgggcctactagtatggactggatttggcgcatccttttccttgtcggcgctgctaccggcgcccattccgggcccgaagtgcagctggttgaatctggcggaggactggttcagcctggcggatctctgagactgtcttgtgccgcctctggcttcgccagcgactactatatcatcggctggttcagacaggcccctggcaaagagagagagggcgtcagctgtatcagcagcagatacgccaacaccaactacgccgacagcgtgaagggcagattcaccatcagccgggacaacgccaagaacaccgtgtacctccagatgaacagcctgaagcctgaggacaccgccgtgtactactgtgccgccgacaccagaagatacacctgtcctgacattgccaccatgcaccggaacttcgattcttggggccagggcacactggtcaccgtttcttctggatccggcggcggaggatctggcggaggcggatctgggggcggaggctctttcgaacaagttcagcttcaacagcctggcgctgagctggtcaaacctggcgcttctgtgaagatgagctgcaaagccagcggctacgccttcagcagctactggatcaactggatgaagcagaaacccggccagggactcgaatggatcggccaaatctatcccggcgacggcgacaccaactacaacggcaagttcaagggcagagccacactgaccgccgatacctctagcagcacagcctacatgcagctgagcagcctgaccagcgaagatagcgccgtgtacttctgtgcccggtccatcacaacagtcgtgggctgcgctatggactattggggccagggaacaagcgtgaccgtgtctagtacgcgtatccagaaccctgatcctgccgtgtaccagctgcgggatagcaagagcagcgacaagagcgtgtgtctgttcaccgacttcgacagccagaccaacgtgtcccagagcaaggactccgacgtgtacatcaccgataagaccgtgctggacatgcggagcatggacttcaagagcaactccgccgtggcctggtccaacaagtccgatttcgcctgcgccaacgccttcaacaacagcattatccccgaggacacattcttcccaagccccgagagcagctgcgacgtgaagctggtggaaaagagcttcgagacagacaccaacctgaacttccagaacctgagcgtgatcggcttcagaatcctgctgctgaaagtggccggctttaacctgctgatgaccctgcggctgtggtccagccgcgccaagagaagcggatctggcgtgaagcagaccctgaatttcgacctgctgaagctggctggcgacgtggaatccaacccaggcccttctagaggccatatgaccgagtacaagcccacggtgcgcctcgccacccgcgacgacgtccccagggccgtacgcaccctcgccgccgcgttcgccgactaccccgccacgcgccacaccgtcgatccggaccgccacatcgagcgggtcaccgagctgcaagaactcttcctcacgcgcgtcgggctcgacatcggcaaggtgtgggtcgcggacgacggcgccgcggtggcggtctggaccacgccggagagcgtcgaagcgggggcggtgttcgccgagatcggcccgcgcatggccgagttgagcggttcccggctggccgcgcagcaacagatggaaggcctcctggcgccgcaccggcccaaggagcccgcgtggttcctggccaccgtcggcgtctcgcccgaccaccagggcaagggtctgggcagcgccgtcgtgctccccggagtggaggcggccgagcgcgccggggtgcccgccttcctggagacctccgcgccccgcaacctccccttctacgagcggctcggcttcaccgtcaccgccgacgtcgaggtgcccgaaggaccgcgcacctggtgcatgacccgcaagcccggtgcctga

SEQ ID NO: 6048 - DNA, 3684 bp, Artificial Sequence
  Synthetic Polynucloetide
atggccttaccagtgaccgccttgctcctgccgctggccttgctgctccacgccgccaggccggaagtgcaactggtggaatctggaggctctctggtgcagccagggggaagcctgagactgtcttgtgccgcttccggcttcaccttcgacgactacgccatgagctgggtgcgccaggtgccaggcaaaggcctggaatgggtgtccagcatcaactggagcggcacccacaccgattacgccgactccgtgaaaggcagattcacaatcagcagaaacaacgccaacaataccctgtacctgcagatgaactccctgaagtctgaggatacagcagtgtattattgcgccaagaactggcgggacgccggcaccacttggtttgagaaaagcggctctgccggacagggaacccaagtgacagtgtcctccggtaccggcggaggcggatctggcggcggaggtagcggtggcggaggatctgaattcgacatccagatgacacagagccctagcagcctgtctgccagcgtgggagacagagtgaccatcacatgcaaggccagcgaccacatcaacaactggctggcctggtatcagcagaagcctggacaggcccctaagctgctgatctacggcgctaccacactggaaacaggcgtgcccagcagattttctggcagcggctctggcaccgactacaccctgacaatatccagcctccagcctgaggacttcgccacctactactgtcagcagagctggaacaccccttggacattcggccagggcaccaagctggaaatcaagagactcgaggacctgaagaacgtgttcccacctgaggtggccgtgttcgagcctagcgaggccgagatcagccacacccagaaagccaccctcgtgtgcctggctaccggcttctaccccgaccatgtggaactgtcttggtgggtcaacggcaaagaggtgcacagcggcgtgtctaccgacccccagccactgaaagaacagcccgccctgaacgacagccggtactgcctgagcagcagactgagagtgtccgccaccttctggcagaacccccggaaccacttcagatgccaggtgcagttctacggcctgagcgagaacgacgagtggacccaggacagagccaagcccgtgacccagatcgtgtctgccgaagcctggggcagagccgattgcggctttaccagcgagagctaccagcagggcgtgctgagcgccaccatcctgtacgagatcctgctgggcaaggccaccctgtacgccgtgctggtgtctgccctggtgctgatggctatggtcaagcggaaggacagccggggaagggccaagcgatctggatctggagcaacaaacttctcactactcaaacaagcaggtgacgtggaggagaatcccgggcctactagtatggactggatttggcgcatccttttccttgtcggcgctgctaccggcgcccattccgggcccgaagtgcagctggttgaatctggcggaggactggttcagcctggcggatctctgagactgtcttgtgccgcctctggcttcgccagcgactactatatcatcggctggttcagacaggcccctggcaaagagagagagggcgtcagctgtatcagcagcagatacgccaacaccaactacgccgacagcgtgaagggcagattcaccatcagccgggacaacgccaagaacaccgtgtacctccagatgaacagcctgaagcctgaggacaccgccgtgtactactgtgccgccgacaccagaagatacacctgtcctgacattgccaccatgcaccggaacttcgattcttggggccagggcacactggtcaccgtttcttctggatccggcggcggaggatctggcggaggcggatctgggggcggaggctctttcgaacaagttcagcttcaacagcctggcgctgagctggtcaaacctggcgcttctgtgaagatgagctgcaaagccagcggctacgccttcagcagctactggatcaactggatgaagcagaaacccggccagggactcgaatggatcggccaaatctatcccggcgacggcgacaccaactacaacggcaagttcaagggcagagccacactgaccgccgatacctctagcagcacagcctacatgcagctgagcagcctgaccagcgaagatagcgccgtgtacttctgtgcccggtccatcacaacagtcgtgggctgcgctatggactattggggccagggaacaagcgtgaccgtgtctagtacgcgtgagcagaaactgatctcggaagaggatgggagcggcaccccattcccttctctggcccctcccatcatgctgctggtggacggcaagcagcagatggtggtcgtgtgcctggtgctggatgtggccccacctggactggacagccccatctggtttagcgccggcaatggctctgccctggacgcctttacctacggcccaagccctgccaccgatggcacctggacaaatctggcccacctgagcctgcccagcgaggaactggcttcttgggagcctctcgtgtgccacacaggacctggcgctgagggacacagcagatccacccagcctatgcacctgtctggcgaggccagcaccgccagaacctgtcctcaggaacctctgagaggcacccctggcggagcactgtggctgggagtgctgagactgctgctgttcaagctgctgctgtttgacctgctgctgacctgctcctgtctgtgcgatcctgccggccctctgccttctcctgccaccaccacaagactgagagccctgggcagccacagactgcaccctgccacagagacaggcggcagagaggccacaagcagccctagaccccagcccagagacagaagatggggcgataccccccctggcagaaagcctggatctccagtccgcgccaagagaagcggatctggcgtgaagcagaccctgaatttcgacctgctgaagctggctggcgacgtggaatccaacccaggcccttctagaggccatatgaccgagtacaagcccacggtgcgcctcgccacccgcgacgacgtccccagggccgtacgcaccctcgccgccgcgttcgccgactaccccgccacgcgccacaccgtcgatccggaccgccacatcgagcgggtcaccgagctgcaagaactcttcctcacgcgcgtcgggctcgacatcggcaaggtgtgggtcgcggacgacggcgccgcggtggcggtctggaccacgccggagagcgtcgaagcgggggcggtgttcgccgagatcggcccgcgcatggccgagttgagcggttcccggctggccgcgcagcaacagatggaaggcctcctggcgccgcaccggcccaaggagcccgcgtggttcctggccaccgtcggcgtctcgcccgaccaccagggcaagggtctgggcagcgccgtcgtgctccccggagtggaggcggccgagcgcgccggggtgcccgccttcctggagacctccgcgccccgcaacctccccttctacgagcggctcggcttcaccgtcaccgccgacgtcgaggtgcccgaaggaccgcgcacctggtgcatgacccgcaagcccggtgcctga

SEQ ID NO: 6049 - DNA, 3549 bp, Artificial Sequence
  Synthetic Polynucloetide
atggccttaccagtgaccgccttgctcctgccgctggccttgctgctccacgccgccaggccggaagtgcaactggtggaatctggaggctctctggtgcagccagggggaagcctgagactgtcttgtgccgcttccggcttcaccttcgacgactacgccatgagctgggtgcgccaggtgccaggcaaaggcctggaatgggtgtccagcatcaactggagcggcacccacaccgattacgccgactccgtgaaaggcagattcacaatcagcagaaacaacgccaacaataccctgtacctgcagatgaactccctgaagtctgaggatacagcagtgtattattgcgccaagaactggcgggacgccggcaccacttggtttgagaaaagcggctctgccggacagggaacccaagtgacagtgtcctccggtaccggcggaggcggatctggcggcggaggtagcggtggcggaggatctgaattcgacatccagatgacacagagccctagcagcctgtctgccagcgtgggagacagagtgaccatcacatgcaaggccagcgaccacatcaacaactggctggcctggtatcagcagaagcctggacaggcccctaagctgctgatctacggcgctaccacactggaaacaggcgtgcccagcagattttctggcagcggctctggcaccgactacaccctgacaatatccagcctccagcctgaggacttcgccacctactactgtcagcagagctggaacaccccttggacattcggccagggcaccaagctggaaatcaagagactcgaggggaaaccaattcccaaccctcttctgggactggattcaaccggcagcggcgacaagcagctggacgccgacgtgtcccccaagcctaccatcttcctgccctctatcgccgagacaaagctccagaaggccggcacctacctgtgcctgctggaaaagttcttcccagatgtgattaagatccactggcaggaaaagaagtccaacaccatcctgggcagccaggaaggcaacaccatgaagaccaacgacacctacatgaagttcagctggctgaccgtgcccgagaagtccctggacaaagaacacagatgcatcgtgcggcacgaaaacaacaagaacggcgtggaccaggaaatcatcttcccacccatcaagaccgatgtgattacaatggaccccaaggacaactgctccaaggacgccaacgataccctgctgctccagctgaccaacaccagcgcctactacatgtacttgttgctgctgctgaagtccgtggtgtacttcgccatcatcacatgctgcctgctgcggagaaccgccttctgctgcaacggcgagaagtctagggccaagcgatctggatctggagcaacaaacttctcactactcaaacaagcaggtgacgtggaggagaatcccgggcctactagtatggactggatttggcgcatccttttccttgtcggcgctgctaccggcgcccattccgggcccgaagtgcagctggttgaatctggcggaggactggttcagcctggcggatctctgagactgtcttgtgccgcctctggcttcgccagcgactactatatcatcggctggttcagacaggcccctggcaaagagagagagggcgtcagctgtatcagcagcagatacgccaacaccaactacgccgacagcgtgaagggcagattcaccatcagccgggacaacgccaagaacaccgtgtacctccagatgaacagcctgaagcctgaggacaccgccgtgtactactgtgccgccgacaccagaagatacacctgtcctgacattgccaccatgcaccggaacttcgattcttggggccagggcacactggtcaccgtttcttctggatccggcggcggaggatctggcggaggcggatctgggggcggaggctctttcgaacaagttcagcttcaacagcctggcgctgagctggtcaaacctggcgcttctgtgaagatgagctgcaaagccagcggctacgccttcagcagctactggatcaactggatgaagcagaaacccggccagggactcgaatggatcggccaaatctatcccggcgacggcgacaccaactacaacggcaagttcaagggcagagccacactgaccgccgatacctctagcagcacagcctacatgcagctgagcagcctgaccagcgaagatagcgccgtgtacttctgtgcccggtccatcacaacagtcgtgggctgcgctatggactattggggccagggaacaagcgtgaccgtgtctagtacgcgtgagcagaaactgatctcggaagaggatgggagcggcagccagcctcacaccaagcccagcgtgttcgtgatgaagaacggcaccaacgtggcctgcctcgtgaaagagttctaccccaaggacatcaggatcaacctggtgtccagcaagaagatcaccgagttcgaccccgccatcgtgatctcccccagcggcaagtacaacgccgtgaagctggggaagtacgaggacagcaacagcgtgacctgctccgtgcagcacgacaacaagaccgtgcacagcaccgactttgaagtgaaaaccgactccaccgaccacgtgaagcccaaagagacagagaacaccaagcagcccagcaagagctgccacaagcccaaggccatcgtgcacaccgagaaagtgaacatgatgagcctgaccgtgctgggcctgcggatgctgttcgccaaaaccgtggccgtgaacttcctgctgaccgccaagctgttcttcctccgcgccaagagaagcggatctggcgtgaagcagaccctgaatttcgacctgctgaagctggctggcgacgtggaatccaacccaggcccttctagaggccatatgaccgagtacaagcccacggtgcgcctcgccacccgcgacgacgtccccagggccgtacgcaccctcgccgccgcgttcgccgactaccccgccacgcgccacaccgtcgatccggaccgccacatcgagcgggtcaccgagctgcaagaactcttcctcacgcgcgtcgggctcgacatcggcaaggtgtgggtcgcggacgacggcgccgcggtggcggtctggaccacgccggagagcgtcgaagcgggggcggtgttcgccgagatcggcccgcgcatggccgagttgagcggttcccggctggccgcgcagcaacagatggaaggcctcctggcgccgcaccggcccaaggagcccgcgtggttcctggccaccgtcggcgtctcgcccgaccaccagggcaagggtctgggcagcgccgtcgtgctccccggagtggaggcggccgagcgcgccggggtgcccgccttcctggagacctccgcgccccgcaacctccccttctacgagcggctcggcttcaccgtcaccgccgacgtcgaggtgcccgaaggaccgcgcacctggtgcatgacccgcaagcccggtgcctga

SEQ ID NO: 6050 - DNA, 2760 bp, Artificial Sequence
  Synthetic Polynucloetide
atggccttaccagtgaccgccttgctcctgccgctggccttgctgctccacgccgccaggccggaagtgcaactggtggaatctggaggctctctggtgcagccagggggaagcctgagactgtcttgtgccgcttccggcttcaccttcgacgactacgccatgagctgggtgcgccaggtgccaggcaaaggcctggaatgggtgtccagcatcaactggagcggcacccacaccgattacgccgactccgtgaaaggcagattcacaatcagcagaaacaacgccaacaataccctgtacctgcagatgaactccctgaagtctgaggatacagcagtgtattattgcgccaagaactggcgggacgccggcaccacttggtttgagaaaagcggctctgccggacagggaacccaagtgacagtgtcctccggtaccggcggaggcggatctggcggcggaggtagcggtggcggaggatctgaattcgacatccagatgacacagagccctagcagcctgtctgccagcgtgggagacagagtgaccatcacatgcaaggccagcgaccacatcaacaactggctggcctggtatcagcagaagcctggacaggcccctaagctgctgatctacggcgctaccacactggaaacaggcgtgcccagcagattttctggcagcggctctggcaccgactacaccctgacaatatccagcctccagcctgaggacttcgccacctactactgtcagcagagctggaacaccccttggacattcggccagggcaccaagctggaaatcaagagactcgagagccagcctcacaccaagcccagcgtgttcgtgatgaagaacggcaccaacgtggcctgcctcgtgaaagagttctaccccaaggacatcaggatcaacctggtgtccagcaagaagatcaccgagttcgaccccgccatcgtgatctcccccagcggcaagtacaacgccgtgaagctggggaagtacgaggacagcaacagcgtgacctgctccgtgcagcacgacaacaagaccgtgcacagcaccgactttgaagtgaaaaccgactccaccgaccacgtgaagcccaaagagacagagaacaccaagcagcccagcaagagctgccacaagcccaaggccatcgtgcacaccgagaaagtgaacatgatgagcctgaccgtgctgggcctgcggatgctgttcgccaaaaccgtggccgtgaacttcctgctgaccgccaagctgttcttcctcagggccaagcgatctggatctggagcaacaaacttctcactactcaaacaagcaggtgacgtggaggagaatcccgggcctactagtatggactggatttggcgcatccttttccttgtcggcgctgctaccggcgcccattccgggcccgaagtgcagctggttgaatctggcggaggactggttcagcctggcggatctctgagactgtcttgtgccgcctctggcttcgccagcgactactatatcatcggctggttcagacaggcccctggcaaagagagagagggcgtcagctgtatcagcagcagatacgccaacaccaactacgccgacagcgtgaagggcagattcaccatcagccgggacaacgccaagaacaccgtgtacctccagatgaacagcctgaagcctgaggacaccgccgtgtactactgtgccgccgacaccagaagatacacctgtcctgacattgccaccatgcaccggaacttcgattcttggggccagggcacactggtcaccgtttcttctggatccggcggcggaggatctggcggaggcggatctgggggcggaggctctttcgaacaagttcagcttcaacagcctggcgctgagctggtcaaacctggcgcttctgtgaagatgagctgcaaagccagcggctacgccttcagcagctactggatcaactggatgaagcagaaacccggccagggactcgaatggatcggccaaatctatcccggcgacggcgacaccaactacaacggcaagttcaagggcagagccacactgaccgccgatacctctagcagcacagcctacatgcagctgagcagcctgaccagcgaagatagcgccgtgtacttctgtgcccggtccatcacaacagtcgtgggctgcgctatggactattggggccagggaacaagcgtgaccgtgtctagtacgcgtgacaagcagctggacgccgacgtgtcccccaagcctaccatcttcctgccctctatcgccgagacaaagctccagaaggccggcacctacctgtgcctgctggaaaagttcttcccagatgtgattaagatccactggcaggaaaagaagtccaacaccatcctgggcagccaggaaggcaacaccatgaagaccaacgacacctacatgaagttcagctggctgaccgtgcccgagaagtccctggacaaagaacacagatgcatcgtgcggcacgaaaacaacaagaacggcgtggaccaggaaatcatcttcccacccatcaagaccgatgtgattacaatggaccccaaggacaactgctccaaggacgccaacgataccctgctgctccagctgaccaacaccagcgcctactacatgtacttgttgctgctgctgaagtccgtggtgtacttcgccatcatcacatgctgcctgctgcggagaaccgccttctgctgcaacggcgagaagtct

SEQ ID NO: 6051 - DNA, 3969 bp, Artificial Sequence
  Synthetic Polynucloetide
atggccttaccagtgaccgccttgctcctgccgctggccttgctgctccacgccgccaggccggaagtgcaactggtggaatctggaggctctctggtgcagccagggggaagcctgagactgtcttgtgccgcttccggcttcaccttcgacgactacgccatgagctgggtgcgccaggtgccaggcaaaggcctggaatgggtgtccagcatcaactggagcggcacccacaccgattacgccgactccgtgaaaggcagattcacaatcagcagaaacaacgccaacaataccctgtacctgcagatgaactccctgaagtctgaggatacagcagtgtattattgcgccaagaactggcgggacgccggcaccacttggtttgagaaaagcggctctgccggacagggaacccaagtgacagtgtcctccggtaccggcggaggcggatctggcggcggaggtagcggtggcggaggatctgaattcgacatccagatgacacagagccctagcagcctgtctgccagcgtgggagacagagtgaccatcacatgcaaggccagcgaccacatcaacaactggctggcctggtatcagcagaagcctggacaggcccctaagctgctgatctacggcgctaccacactggaaacaggcgtgcccagcagattttctggcagcggctctggcaccgactacaccctgacaatatccagcctccagcctgaggacttcgccacctactactgtcagcagagctggaacaccccttggacattcggccagggcaccaagctggaaatcaagagaggacagcctaaggccaatcctaccgtgacactgttccctccaagcagcgaagaactccaggccaacaaggccacacttgtgtgcctgatctccgacttctaccctggggctgtgacagtggcttggaaggccgatggatctcctgtgaaagccggcgtggaaaccaccaagccatccaagcagagcaacaacaaatacgccgccagctcctacctgagcctgacacctgagcagtggaagtcccacagatcctacagctgccaagtgacccacgaaggcagcaccgtggaaaagacagtggcccctacagagtgcagcggatcccagagcttcggcctgctggaccccaagctgtgctacctgctggatggcatcctgttcatctacggcgtgatcctgaccgccctgttcctgagagtgaagttcagcagaagcgccgacgcccctgcctaccagcagggacagaaccaactgtacaacgagctgaacctgggcagacgggaagagtacgacgtgctggacaagcggagaggcagggaccctgagatgggcggaaagccccagcggagaaagaacccccaggaaggactgtataacgaactccagaaagacaagatggccgaagcctacagcgagatcggcatgaagggcgagcggagaagaggcaagggccacgatggcctgtaccagggcctgagcaccgccaccaaggacacctatgacgccctgcacatgcaggccctgcctccaagaagggccaagcgatctggatctggagcaacaaacttctcactactcaaacaagcaggtgacgtggaggagaatcccgggcctactagtatggactggatttggcgcatccttttccttgtcggcgctgctaccggcgcccattccgggcccgaagtgcagctggttgaatctggcggaggactggttcagcctggcggatctctgagactgtcttgtgccgcctctggcttcgccagcgactactatatcatcggctggttcagacaggcccctggcaaagagagagagggcgtcagctgtatcagcagcagatacgccaacaccaactacgccgacagcgtgaagggcagattcaccatcagccgggacaacgccaagaacaccgtgtacctccagatgaacagcctgaagcctgaggacaccgccgtgtactactgtgccgccgacaccagaagatacacctgtcctgacattgccaccatgcaccggaacttcgattcttggggccagggcacactggtcaccgtttcttctggatccggcggcggaggatctggcggaggcggatctgggggcggaggctctttcgaacaagttcagcttcaacagcctggcgctgagctggtcaaacctggcgcttctgtgaagatgagctgcaaagccagcggctacgccttcagcagctactggatcaactggatgaagcagaaacccggccagggactcgaatggatcggccaaatctatcccggcgacggcgacaccaactacaacggcaagttcaagggcagagccacactgaccgccgatacctctagcagcacagcctacatgcagctgagcagcctgaccagcgaagatagcgccgtgtacttctgtgcccggtccatcacaacagtcgtgggctgcgctatggactattggggccagggaacaagcgtgaccgtgtctagtgcctctacaaagggaccctccgtgtttcctctggctcccagcagcaagtctacaagcggaggaacagccgctctgggctgcctggtcaaggattactttcccgagcctgtgaccgtgtcctggaatagcggagcactgacaagcggcgtgcacacctttccagccgtgctgcaaagcagcggcctgtactctctgagcagcgtggtcacagtgcctagctctagcctgggcacccagacctacatctgcaatgtgaaccacaagcctagcaacaccaaggtggacaagagagtggaacccaagagctgtggtacccagagttttgggttgttggaccctaaattgtgctatctgttggacggaatcctgttcatttacggagtgatcctgaccgcattgttcctgcgggttaagttttccagatccgcagacgcacccgcttaccaacaagggcagaaccaactctacaatgaacttaatttggggcggagggaagagtacgacgttctggacaaaaggaggggacgagatcccgagatgggcggaaagcctcagcgaaggaagaatccgcaagaggggctttataacgaactccagaaagataaaatggcagaagcctatagtgagattgggatgaagggagaaaggaggaggggtaaaggtcacgatgggttgtaccaaggattgagcacagccactaaagatacctatgatgcgctccacatgcaggccctgccgccaagacgcgccaagagaagcggatctggcgtgaagcagaccctgaatttcgacctgctgaagctggctggcgacgtggaatccaacccaggcccttctagaggccatatgaccgagtacaagcccacggtgcgcctcgccacccgcgacgacgtccccagggccgtacgcaccctcgccgccgcgttcgccgactaccccgccacgcgccacaccgtcgatccggaccgccacatcgagcgggtcaccgagctgcaagaactcttcctcacgcgcgtcgggctcgacatcggcaaggtgtgggtcgcggacgacggcgccgcggtggcggtctggaccacgccggagagcgtcgaagcgggggcggtgttcgccgagatcggcccgcgcatggccgagttgagcggttcccggctggccgcgcagcaacagatggaaggcctcctggcgccgcaccggcccaaggagcccgcgtggttcctggccaccgtcggcgtctcgcccgaccaccagggcaagggtctgggcagcgccgtcgtgctccccggagtggaggcggccgagcgcgccggggtgcccgccttcctggagacctccgcgccccgcaacctccccttctacgagcggctcggcttcaccgtcaccgccgacgtcgaggtgcccgaaggaccgcgcacctggtgcatgacccgcaagcccggtgcctga

SEQ ID NO: 6052 - DNA, 3324 bp, Artificial Sequence
  Synthetic Polynucloetide
atggccttaccagtgaccgccttgctcctgccgctggccttgctgctccacgccgccaggccggaagtgcaactggtggaatctggaggctctctggtgcagccagggggaagcctgagactgtcttgtgccgcttccggcttcaccttcgacgactacgccatgagctgggtgcgccaggtgccaggcaaaggcctggaatgggtgtccagcatcaactggagcggcacccacaccgattacgccgactccgtgaaaggcagattcacaatcagcagaaacaacgccaacaataccctgtacctgcagatgaactccctgaagtctgaggatacagcagtgtattattgcgccaagaactggcgggacgccggcaccacttggtttgagaaaagcggctctgccggacagggaacccaagtgacagtgtcctccggtaccggcggaggcggatctggcggcggaggtagcggtggcggaggatctgaattcgacatccagatgacacagagccctagcagcctgtctgccagcgtgggagacagagtgaccatcacatgcaaggccagcgaccacatcaacaactggctggcctggtatcagcagaagcctggacaggcccctaagctgctgatctacggcgctaccacactggaaacaggcgtgcccagcagattttctggcagcggctctggcaccgactacaccctgacaatatccagcctccagcctgaggacttcgccacctactactgtcagcagagctggaacaccccttggacattcggccagggcaccaagctggaaatcaagagactcgaggacctgaagaacgtgttcccacctgaggtggccgtgttcgagcctagcgaggccgagatcagccacacccagaaagccaccctcgtgtgcctggctaccggcttctaccccgaccatgtggaactgtcttggtgggtcaacggcaaagaggtgcacagcggcgtgtctaccgacccccagccactgaaagaacagcccgccctgaacgacagccggtactgcctgagcagcagactgagagtgtccgccaccttctggcagaacccccggaaccacttcagatgccaggtgcagttctacggcctgagcgagaacgacgagtggacccaggacagagccaagcccgtgacccagatcgtgtctgccgaagcctggggcagagccgattgcggatcccagagcttcggcctgctggaccccaagctgtgctacctgctggatggcatcctgttcatctacggcgtgatcctgaccgccctgttcctgagagtgaagttcagcagaagcgccgacgcccctgcctaccagcagggacagaaccaactgtacaacgagctgaacctgggcagacgggaagagtacgacgtgctggacaagcggagaggcagggaccctgagatgggcggaaagccccagcggagaaagaacccccaggaaggactgtataacgaactccagaaagacaagatggccgaagcctacagcgagatcggcatgaagggcgagcggagaagaggcaagggccacgatggcctgtaccagggcctgagcaccgccaccaaggacacctatgacgccctgcacatgcaggccctgcctccaagaagggccaagcgatctggatctggagcaacaaacttctcactactcaaacaagcaggtgacgtggaggagaatcccgggcctactagtatggactggatttggcgcatccttttccttgtcggcgctgctaccggcgcccattccgggcccgaagtgcagctggttgaatctggcggaggactggttcagcctggcggatctctgagactgtcttgtgccgcctctggcttcgccagcgactactatatcatcggctggttcagacaggcccctggcaaagagagagagggcgtcagctgtatcagcagcagatacgccaacaccaactacgccgacagcgtgaagggcagattcaccatcagccgggacaacgccaagaacaccgtgtacctccagatgaacagcctgaagcctgaggacaccgccgtgtactactgtgccgccgacaccagaagatacacctgtcctgacattgccaccatgcaccggaacttcgattcttggggccagggcacactggtcaccgtttcttctggatccggcggcggaggatctggcggaggcggatctgggggcggaggctctttcgaacaagttcagcttcaacagcctggcgctgagctggtcaaacctggcgcttctgtgaagatgagctgcaaagccagcggctacgccttcagcagctactggatcaactggatgaagcagaaacccggccagggactcgaatggatcggccaaatctatcccggcgacggcgacaccaactacaacggcaagttcaagggcagagccacactgaccgccgatacctctagcagcacagcctacatgcagctgagcagcctgaccagcgaagatagcgccgtgtacttctgtgcccggtccatcacaacagtcgtgggctgcgctatggactattggggccagggaacaagcgtgaccgtgtctagtacgcgtatccagaaccctgatcctgccgtgtaccagctgcgggatagcaagagcagcgacaagagcgtgtgtctgttcaccgacttcgacagccagaccaacgtgtcccagagcaaggactccgacgtgtacatcaccgataagaccgtgctggacatgcggagcatggacttcaagagcaactccgccgtggcctggtccaacaagtccgatttcgcctgcgccaacgccttcaacaacagcattatccccgaggacacattcttcccaagccccgagagcagctgcggtacccagagttttgggttgttggaccctaaattgtgctatctgttggacggaatcctgttcatttacggagtgatcctgaccgcattgttcctgcgggttaagttttccagatccgcagacgcacccgcttaccaacaagggcagaaccaactctacaatgaacttaatttggggcggagggaagagtacgacgttctggacaaaaggaggggacgagatcccgagatgggcggaaagcctcagcgaaggaagaatccgcaagaggggctttataacgaactccagaaagataaaatggcagaagcctatagtgagattgggatgaagggagaaaggaggaggggtaaaggtcacgatgggttgtaccaaggattgagcacagccactaaagatacctatgatgcgctccacatgcaggccctgccgccaaga

SEQ ID NO: 6053 - DNA, 3324 bp, Artificial Sequence
  Synthetic Polynucloetide
atggccttaccagtgaccgccttgctcctgccgctggccttgctgctccacgccgccaggccggaagtgcaactggtggaatctggaggctctctggtgcagccagggggaagcctgagactgtcttgtgccgcttccggcttcaccttcgacgactacgccatgagctgggtgcgccaggtgccaggcaaaggcctggaatgggtgtccagcatcaactggagcggcacccacaccgattacgccgactccgtgaaaggcagattcacaatcagcagaaacaacgccaacaataccctgtacctgcagatgaactccctgaagtctgaggatacagcagtgtattattgcgccaagaactggcgggacgccggcaccacttggtttgagaaaagcggctctgccggacagggaacccaagtgacagtgtcctccggtaccggcggaggcggatctggcggcggaggtagcggtggcggaggatctgaattcgacatccagatgacacagagccctagcagcctgtctgccagcgtgggagacagagtgaccatcacatgcaaggccagcgaccacatcaacaactggctggcctggtatcagcagaagcctggacaggcccctaagctgctgatctacggcgctaccacactggaaacaggcgtgcccagcagattttctggcagcggctctggcaccgactacaccctgacaatatccagcctccagcctgaggacttcgccacctactactgtcagcagagctggaacaccccttggacattcggccagggcaccaagctggaaatcaagagactcgaggacctgaagaacgtgttcccacctgaggtggccgtgttcgagcctagcaaggccgagatcgcccacacccagaaagccaccctcgtgtgcctggctaccggcttctaccccgaccatgtggaactgtcttggtgggtcaacggcaaagaggtgcacagcggcgtgtgtaccgacccccagccactgaaagaacagcccgccctgaacgacagccggtactgcctgagcagcagactgagagtgtccgccaccttctggcagaacccccggaaccacttcagatgccaggtgcagttctacggcctgagcgagaacgacgagtggacccaggacagagccaagcccgtgacccagatcgtgtctgccgaagcctggggcagagccgattgcggatcccagagcttcggcctgctggaccccaagctgtgctacctgctggatggcatcctgttcatctacggcgtgatcctgaccgccctgttcctgagagtgaagttcagcagaagcgccgacgcccctgcctaccagcagggacagaaccaactgtacaacgagctgaacctgggcagacgggaagagtacgacgtgctggacaagcggagaggcagggaccctgagatgggcggaaagccccagcggagaaagaacccccaggaaggactgtataacgaactccagaaagacaagatggccgaagcctacagcgagatcggcatgaagggcgagcggagaagaggcaagggccacgatggcctgtaccagggcctgagcaccgccaccaaggacacctatgacgccctgcacatgcaggccctgcctccaagaagggccaagcgatctggatctggagcaacaaacttctcactactcaaacaagcaggtgacgtggaggagaatcccgggcctactagtatggactggatttggcgcatccttttccttgtcggcgctgctaccggcgcccattccgggcccgaagtgcagctggttgaatctggcggaggactggttcagcctggcggatctctgagactgtcttgtgccgcctctggcttcgccagcgactactatatcatcggctggttcagacaggcccctggcaaagagagagagggcgtcagctgtatcagcagcagatacgccaacaccaactacgccgacagcgtgaagggcagattcaccatcagccgggacaacgccaagaacaccgtgtacctccagatgaacagcctgaagcctgaggacaccgccgtgtactactgtgccgccgacaccagaagatacacctgtcctgacattgccaccatgcaccggaacttcgattcttggggccagggcacactggtcaccgtttcttctggatccggcggcggaggatctggcggaggcggatctgggggcggaggctctttcgaacaagttcagcttcaacagcctggcgctgagctggtcaaacctggcgcttctgtgaagatgagctgcaaagccagcggctacgccttcagcagctactggatcaactggatgaagcagaaacccggccagggactcgaatggatcggccaaatctatcccggcgacggcgacaccaactacaacggcaagttcaagggcagagccacactgaccgccgatacctctagcagcacagcctacatgcagctgagcagcctgaccagcgaagatagcgccgtgtacttctgtgcccggtccatcacaacagtcgtgggctgcgctatggactattggggccagggaacaagcgtgaccgtgtctagtacgcgtatccagaaccctgatcctgccgtgtaccagctgcgggatagcaagagcagcgacaagagcgtgtgtctgttcaccgacttcgacagccagaccaacgtgtcccagagcaaggactccgacgtgtacatcaccgataagtgcgtgctggacatgcggagcatggacttcaagagcaactccgccgtggcctggtccaacaagtccgatttcgcctgcgccaacgccttcaacaacagcattatccccgaggacacattcttcccaagcagcgacgtgccctgcggtacccagagttttgggttgttggaccctaaattgtgctatctgttggacggaatcctgttcatttacggagtgatcctgaccgcattgttcctgcgggttaagttttccagatccgcagacgcacccgcttaccaacaagggcagaaccaactctacaatgaacttaatttggggcggagggaagagtacgacgttctggacaaaaggaggggacgagatcccgagatgggcggaaagcctcagcgaaggaagaatccgcaagaggggctttataacgaactccagaaagataaaatggcagaagcctatagtgagattgggatgaagggagaaaggaggaggggtaaaggtcacgatgggttgtaccaaggattgagcacagccactaaagatacctatgatgcgctccacatgcaggccctgccgccaaga

SEQ ID NO: 6054 - DNA, 3537 bp, Artificial Sequence
  Synthetic Polynucloetide
atggccttaccagtgaccgccttgctcctgccgctggccttgctgctccacgccgccaggccggaagtgcaactggtggaatctggaggctctctggtgcagccagggggaagcctgagactgtcttgtgccgcttccggcttcaccttcgacgactacgccatgagctgggtgcgccaggtgccaggcaaaggcctggaatgggtgtccagcatcaactggagcggcacccacaccgattacgccgactccgtgaaaggcagattcacaatcagcagaaacaacgccaacaataccctgtacctgcagatgaactccctgaagtctgaggatacagcagtgtattattgcgccaagaactggcgggacgccggcaccacttggtttgagaaaagcggctctgccggacagggaacccaagtgacagtgtcctccggtaccggcggaggcggatctggcggcggaggtagcggtggcggaggatctgaattcgacatccagatgacacagagccctagcagcctgtctgccagcgtgggagacagagtgaccatcacatgcaaggccagcgaccacatcaacaactggctggcctggtatcagcagaagcctggacaggcccctaagctgctgatctacggcgctaccacactggaaacaggcgtgcccagcagattttctggcagcggctctggcaccgactacaccctgacaatatccagcctccagcctgaggacttcgccacctactactgtcagcagagctggaacaccccttggacattcggccagggcaccaagctggaaatcaagagactcgaggggaaaccaattcccaaccctcttctgggactggattcaaccggcagcggcgaggacctgaagaacgtgttcccacctgaggtggccgtgttcgagcctagcgaggccgagatcagccacacccagaaagccaccctcgtgtgcctggctaccggcttctaccccgaccatgtggaactgtcttggtgggtcaacggcaaagaggtgcacagcggcgtgtctaccgacccccagccactgaaagaacagcccgccctgaacgacagccggtactgcctgagcagcagactgagagtgtccgccaccttctggcagaacccccggaaccacttcagatgccaggtgcagttctacggcctgagcgagaacgacgagtggacccaggacagagccaagcccgtgacccagatcgtgtctgccgaagcctggggcagagccgattgcggatcccagagcttcggcctgctggaccccaagctgtgctacctgctggatggcatcctgttcatctacggcgtgatcctgaccgccctgttcctgagagtgaagttcagcagaagcgccgacgcccctgcctaccagcagggacagaaccaactgtacaacgagctgaacctgggcagacgggaagagtacgacgtgctggacaagcggagaggcagggaccctgagatgggcggaaagccccagcggagaaagaacccccaggaaggactgtataacgaactccagaaagacaagatggccgaagcctacagcgagatcggcatgaagggcgagcggagaagaggcaagggccacgatggcctgtaccagggcctgagcaccgccaccaaggacacctatgacgccctgcacatgcaggccctgcctccaagaagggccaagcgatctggatctggagcaacaaacttctcactactcaaacaagcaggtgacgtggaggagaatcccgggcctactagtatggactggatttggcgcatccttttccttgtcggcgctgctaccggcgcccattccgggcccgaagtgcagctggttgaatctggcggaggactggttcagcctggcggatctctgagactgtcttgtgccgcctctggcttcgccagcgactactatatcatcggctggttcagacaggcccctggcaaagagagagagggcgtcagctgtatcagcagcagatacgccaacaccaactacgccgacagcgtgaagggcagattcaccatcagccgggacaacgccaagaacaccgtgtacctccagatgaacagcctgaagcctgaggacaccgccgtgtactactgtgccgccgacaccagaagatacacctgtcctgacattgccaccatgcaccggaacttcgattcttggggccagggcacactggtcaccgtttcttctggatccggcggcggaggatctggcggaggcggatctgggggcggaggctctttcgaacaagttcagcttcaacagcctggcgctgagctggtcaaacctggcgcttctgtgaagatgagctgcaaagccagcggctacgccttcagcagctactggatcaactggatgaagcagaaacccggccagggactcgaatggatcggccaaatctatcccggcgacggcgacaccaactacaacggcaagttcaagggcagagccacactgaccgccgatacctctagcagcacagcctacatgcagctgagcagcctgaccagcgaagatagcgccgtgtacttctgtgcccggtccatcacaacagtcgtgggctgcgctatggactattggggccagggaacaagcgtgaccgtgtctagtacgcgtgagcagaaactgatctcggaagaggatgggagcggcatccagaaccctgatcctgccgtgtaccagctgcgggatagcaagagcagcgacaagagcgtgtgtctgttcaccgacttcgacagccagaccaacgtgtcccagagcaaggactccgacgtgtacatcaccgataagaccgtgctggacatgcggagcatggacttcaagagcaactccgccgtggcctggtccaacaagtccgatttcgcctgcgccaacgccttcaacaacagcattatccccgaggacacattcttcccaagccccgagagcagctgcggtacccagagttttgggttgttggaccctaaattgtgctatctgttggacggaatcctgttcatttacggagtgatcctgaccgcattgttcctgaggagcaagcggtcacggctgctccacagcgattacatgaatatgacaccacgaagaccgggtcctactcgcaaacactaccaaccctacgcacctccccgcgactttgcagcgtaccgatctcgggttaagttttccagatccgcagacgcacccgcttaccaacaagggcagaaccaactctacaatgaacttaatttggggcggagggaagagtacgacgttctggacaaaaggaggggacgagatcccgagatgggcggaaagcctcagcgaaggaagaatccgcaagaggggctttataacgaactccagaaagataaaatggcagaagcctatagtgagattgggatgaagggagaaaggaggaggggtaaaggtcacgatgggttgtaccaaggattgagcacagccactaaagatacctatgatgcgctccacatgcaggccctgccgccaaga

SEQ ID NO: 6055 - DNA, 3660 bp, Artificial Sequence
  Synthetic Polynucloetide
atggccttaccagtgaccgccttgctcctgccgctggccttgctgctccacgccgccaggccggaagtgcaactggtggaatctggaggctctctggtgcagccagggggaagcctgagactgtcttgtgccgcttccggcttcaccttcgacgactacgccatgagctgggtgcgccaggtgccaggcaaaggcctggaatgggtgtccagcatcaactggagcggcacccacaccgattacgccgactccgtgaaaggcagattcacaatcagcagaaacaacgccaacaataccctgtacctgcagatgaactccctgaagtctgaggatacagcagtgtattattgcgccaagaactggcgggacgccggcaccacttggtttgagaaaagcggctctgccggacagggaacccaagtgacagtgtcctccggtaccggcggaggcggatctggcggcggaggtagcggtggcggaggatctgaattcgacatccagatgacacagagccctagcagcctgtctgccagcgtgggagacagagtgaccatcacatgcaaggccagcgaccacatcaacaactggctggcctggtatcagcagaagcctggacaggcccctaagctgctgatctacggcgctaccacactggaaacaggcgtgcccagcagattttctggcagcggctctggcaccgactacaccctgacaatatccagcctccagcctgaggacttcgccacctactactgtcagcagagctggaacaccccttggacattcggccagggcaccaagctggaaatcaagagactcgaggggaaaccaattcccaaccctcttctgggactggattcaaccggcagcggcgaggacctgaagaacgtgttcccacctgaggtggccgtgttcgagcctagcgaggccgagatcagccacacccagaaagccaccctcgtgtgcctggctaccggcttctaccccgaccatgtggaactgtcttggtgggtcaacggcaaagaggtgcacagcggcgtgtctaccgacccccagccactgaaagaacagcccgccctgaacgacagccggtactgcctgagcagcagactgagagtgtccgccaccttctggcagaacccccggaaccacttcagatgccaggtgcagttctacggcctgagcgagaacgacgagtggacccaggacagagccaagcccgtgacccagatcgtgtctgccgaagcctggggcagagccgattgcggatcccagagcttcggcctgctggaccccaagctgtgctacctgctggatggcatcctgttcatctacggcgtgatcctgaccgccctgttcctgaggagtaagaggagcaggctcctgcacagtgactacatgaacatgactccacgccgccccggacccacccgcaagcattaccagccctatgccccaccacgcgacttcgcagcctatcgctccagagtgaagttcagcagaagcgccgacgcccctgcctaccagcagggacagaaccaactgtacaacgagctgaacctgggcagacgggaagagtacgacgtgctggacaagcggagaggcagggaccctgagatgggcggaaagccccagcggagaaagaacccccaggaaggactgtataacgaactccagaaagacaagatggccgaagcctacagcgagatcggcatgaagggcgagcggagaagaggcaagggccacgatggcctgtaccagggcctgagcaccgccaccaaggacacctatgacgccctgcacatgcaggccctgcctccaagaagggccaagcgatctggatctggagcaacaaacttctcactactcaaacaagcaggtgacgtggaggagaatcccgggcctactagtatggactggatttggcgcatccttttccttgtcggcgctgctaccggcgcccattccgggcccgaagtgcagctggttgaatctggcggaggactggttcagcctggcggatctctgagactgtcttgtgccgcctctggcttcgccagcgactactatatcatcggctggttcagacaggcccctggcaaagagagagagggcgtcagctgtatcagcagcagatacgccaacaccaactacgccgacagcgtgaagggcagattcaccatcagccgggacaacgccaagaacaccgtgtacctccagatgaacagcctgaagcctgaggacaccgccgtgtactactgtgccgccgacaccagaagatacacctgtcctgacattgccaccatgcaccggaacttcgattcttggggccagggcacactggtcaccgtttcttctggatccggcggcggaggatctggcggaggcggatctgggggcggaggctctttcgaacaagttcagcttcaacagcctggcgctgagctggtcaaacctggcgcttctgtgaagatgagctgcaaagccagcggctacgccttcagcagctactggatcaactggatgaagcagaaacccggccagggactcgaatggatcggccaaatctatcccggcgacggcgacaccaactacaacggcaagttcaagggcagagccacactgaccgccgatacctctagcagcacagcctacatgcagctgagcagcctgaccagcgaagatagcgccgtgtacttctgtgcccggtccatcacaacagtcgtgggctgcgctatggactattggggccagggaacaagcgtgaccgtgtctagtacgcgtgagcagaaactgatctcggaagaggatgggagcggcatccagaaccctgatcctgccgtgtaccagctgcgggatagcaagagcagcgacaagagcgtgtgtctgttcaccgacttcgacagccagaccaacgtgtcccagagcaaggactccgacgtgtacatcaccgataagaccgtgctggacatgcggagcatggacttcaagagcaactccgccgtggcctggtccaacaagtccgatttcgcctgcgccaacgccttcaacaacagcattatccccgaggacacattcttcccaagccccgagagcagctgcggtacccagagttttgggttgttggaccctaaattgtgctatctgttggacggaatcctgttcatttacggagtgatcctgaccgcattgttcctgaggagcaagcggtcacggctgctccacagcgattacatgaatatgacaccacgaagaccgggtcctactcgcaaacactaccaaccctacgcacctccccgcgactttgcagcgtaccgatctcgggttaagttttccagatccgcagacgcacccgcttaccaacaagggcagaaccaactctacaatgaacttaatttggggcggagggaagagtacgacgttctggacaaaaggaggggacgagatcccgagatgggcggaaagcctcagcgaaggaagaatccgcaagaggggctttataacgaactccagaaagataaaatggcagaagcctatagtgagattgggatgaagggagaaaggaggaggggtaaaggtcacgatgggttgtaccaaggattgagcacagccactaaagatacctatgatgcgctccacatgcaggccctgccgccaaga

SEQ ID NO: 6056 - DNA, 3543 bp, Artificial Sequence
  Synthetic Polynucloetide
atggccttaccagtgaccgccttgctcctgccgctggccttgctgctccacgccgccaggccggaagtgcaactggtggaatctggaggctctctggtgcagccagggggaagcctgagactgtcttgtgccgcttccggcttcaccttcgacgactacgccatgagctgggtgcgccaggtgccaggcaaaggcctggaatgggtgtccagcatcaactggagcggcacccacaccgattacgccgactccgtgaaaggcagattcacaatcagcagaaacaacgccaacaataccctgtacctgcagatgaactccctgaagtctgaggatacagcagtgtattattgcgccaagaactggcgggacgccggcaccacttggtttgagaaaagcggctctgccggacagggaacccaagtgacagtgtcctccggtaccggcggaggcggatctggcggcggaggtagcggtggcggaggatctgaattcgacatccagatgacacagagccctagcagcctgtctgccagcgtgggagacagagtgaccatcacatgcaaggccagcgaccacatcaacaactggctggcctggtatcagcagaagcctggacaggcccctaagctgctgatctacggcgctaccacactggaaacaggcgtgcccagcagattttctggcagcggctctggcaccgactacaccctgacaatatccagcctccagcctgaggacttcgccacctactactgtcagcagagctggaacaccccttggacattcggccagggcaccaagctggaaatcaagagactcgaggggaaaccaattcccaaccctcttctgggactggattcaaccggcagcggcgaggacctgaagaacgtgttcccacctgaggtggccgtgttcgagcctagcgaggccgagatcagccacacccagaaagccaccctcgtgtgcctggctaccggcttctaccccgaccatgtggaactgtcttggtgggtcaacggcaaagaggtgcacagcggcgtgtctaccgacccccagccactgaaagaacagcccgccctgaacgacagccggtactgcctgagcagcagactgagagtgtccgccaccttctggcagaacccccggaaccacttcagatgccaggtgcagttctacggcctgagcgagaacgacgagtggacccaggacagagccaagcccgtgacccagatcgtgtctgccgaagcctggggcagagccgattgcggatcccagagcttcggcctgctggaccccaagctgtgctacctgctggatggcatcctgttcatctacggcgtgatcctgaccgccctgttcctgagagtgaagttcagcagaagcgccgacgcccctgcctaccagcagggacagaaccaactgtacaacgagctgaacctgggcagacgggaagagtacgacgtgctggacaagcggagaggcagggaccctgagatgggcggaaagccccagcggagaaagaacccccaggaaggactgtataacgaactccagaaagacaagatggccgaagcctacagcgagatcggcatgaagggcgagcggagaagaggcaagggccacgatggcctgtaccagggcctgagcaccgccaccaaggacacctatgacgccctgcacatgcaggccctgcctccaagaagggccaagcgatctggatctggagcaacaaacttctcactactcaaacaagcaggtgacgtggaggagaatcccgggcctactagtatggactggatttggcgcatccttttccttgtcggcgctgctaccggcgcccattccgggcccgaagtgcagctggttgaatctggcggaggactggttcagcctggcggatctctgagactgtcttgtgccgcctctggcttcgccagcgactactatatcatcggctggttcagacaggcccctggcaaagagagagagggcgtcagctgtatcagcagcagatacgccaacaccaactacgccgacagcgtgaagggcagattcaccatcagccgggacaacgccaagaacaccgtgtacctccagatgaacagcctgaagcctgaggacaccgccgtgtactactgtgccgccgacaccagaagatacacctgtcctgacattgccaccatgcaccggaacttcgattcttggggccagggcacactggtcaccgtttcttctggatccggcggcggaggatctggcggaggcggatctgggggcggaggctctttcgaacaagttcagcttcaacagcctggcgctgagctggtcaaacctggcgcttctgtgaagatgagctgcaaagccagcggctacgccttcagcagctactggatcaactggatgaagcagaaacccggccagggactcgaatggatcggccaaatctatcccggcgacggcgacaccaactacaacggcaagttcaagggcagagccacactgaccgccgatacctctagcagcacagcctacatgcagctgagcagcctgaccagcgaagatagcgccgtgtacttctgtgcccggtccatcacaacagtcgtgggctgcgctatggactattggggccagggaacaagcgtgaccgtgtctagtacgcgtgagcagaaactgatctcggaagaggatctggggagcggcatccagaaccctgatcctgccgtgtaccagctgcgggatagcaagagcagcgacaagagcgtgtgtctgttcaccgacttcgacagccagaccaacgtgtcccagagcaaggactccgacgtgtacatcaccgataagaccgtgctggacatgcggagcatggacttcaagagcaactccgccgtggcctggtccaacaagtccgatttcgcctgcgccaacgccttcaacaacagcattatccccgaggacacattcttcccaagccccgagagcagctgcggtacccagagttttgggttgttggaccctaaattgtgctatctgttggacggaatcctgttcatttacggagtgatcctgaccgcattgttcctgaagagaggccggaagaagctgctgtacatcttcaagcagcctttcatgcggcccgtgcagaccacccaggaagaggacggctgctcctgccggttccccgaggaagaagaaggcggctgcgagctgcgggttaagttttccagatccgcagacgcacccgcttaccaacaagggcagaaccaactctacaatgaacttaatttggggcggagggaagagtacgacgttctggacaaaaggaggggacgagatcccgagatgggcggaaagcctcagcgaaggaagaatccgcaagaggggctttataacgaactccagaaagataaaatggcagaagcctatagtgagattgggatgaagggagaaaggaggaggggtaaaggtcacgatgggttgtaccaaggattgagcacagccactaaagatacctatgatgcgctccacatgcaggccctgccgccaaga

SEQ ID NO: 6057 - DNA, 3669 bp, Artificial Sequence
  Synthetic Polynucloetide
atggccttaccagtgaccgccttgctcctgccgctggccttgctgctccacgccgccaggccggaagtgcaactggtggaatctggaggctctctggtgcagccagggggaagcctgagactgtcttgtgccgcttccggcttcaccttcgacgactacgccatgagctgggtgcgccaggtgccaggcaaaggcctggaatgggtgtccagcatcaactggagcggcacccacaccgattacgccgactccgtgaaaggcagattcacaatcagcagaaacaacgccaacaataccctgtacctgcagatgaactccctgaagtctgaggatacagcagtgtattattgcgccaagaactggcgggacgccggcaccacttggtttgagaaaagcggctctgccggacagggaacccaagtgacagtgtcctccggtaccggcggaggcggatctggcggcggaggtagcggtggcggaggatctgaattcgacatccagatgacacagagccctagcagcctgtctgccagcgtgggagacagagtgaccatcacatgcaaggccagcgaccacatcaacaactggctggcctggtatcagcagaagcctggacaggcccctaagctgctgatctacggcgctaccacactggaaacaggcgtgcccagcagattttctggcagcggctctggcaccgactacaccctgacaatatccagcctccagcctgaggacttcgccacctactactgtcagcagagctggaacaccccttggacattcggccagggcaccaagctggaaatcaagagactcgaggggaaaccaattcccaaccctcttctgggactggattcaaccggcagcggcgaggacctgaagaacgtgttcccacctgaggtggccgtgttcgagcctagcgaggccgagatcagccacacccagaaagccaccctcgtgtgcctggctaccggcttctaccccgaccatgtggaactgtcttggtgggtcaacggcaaagaggtgcacagcggcgtgtctaccgacccccagccactgaaagaacagcccgccctgaacgacagccggtactgcctgagcagcagactgagagtgtccgccaccttctggcagaacccccggaaccacttcagatgccaggtgcagttctacggcctgagcgagaacgacgagtggacccaggacagagccaagcccgtgacccagatcgtgtctgccgaagcctggggcagagccgattgcggatcccagagcttcggcctgctggaccccaagctgtgctacctgctggatggcatcctgttcatctacggcgtgatcctgaccgccctgttcctgaaacggggcagaaagaaactcctgtatatattcaaacaaccatttatgagaccagtacaaactactcaagaggaagatggctgtagctgccgatttccagaagaagaagaaggaggatgtgaactgagagtgaagttcagcagaagcgccgacgcccctgcctaccagcagggacagaaccaactgtacaacgagctgaacctgggcagacgggaagagtacgacgtgctggacaagcggagaggcagggaccctgagatgggcggaaagccccagcggagaaagaacccccaggaaggactgtataacgaactccagaaagacaagatggccgaagcctacagcgagatcggcatgaagggcgagcggagaagaggcaagggccacgatggcctgtaccagggcctgagcaccgccaccaaggacacctatgacgccctgcacatgcaggccctgcctccaagaagggccaagcgatctggatctggagcaacaaacttctcactactcaaacaagcaggtgacgtggaggagaatcccgggcctactagtatggactggatttggcgcatccttttccttgtcggcgctgctaccggcgcccattccgggcccgaagtgcagctggttgaatctggcggaggactggttcagcctggcggatctctgagactgtcttgtgccgcctctggcttcgccagcgactactatatcatcggctggttcagacaggcccctggcaaagagagagagggcgtcagctgtatcagcagcagatacgccaacaccaactacgccgacagcgtgaagggcagattcaccatcagccgggacaacgccaagaacaccgtgtacctccagatgaacagcctgaagcctgaggacaccgccgtgtactactgtgccgccgacaccagaagatacacctgtcctgacattgccaccatgcaccggaacttcgattcttggggccagggcacactggtcaccgtttcttctggatccggcggcggaggatctggcggaggcggatctgggggcggaggctctttcgaacaagttcagcttcaacagcctggcgctgagctggtcaaacctggcgcttctgtgaagatgagctgcaaagccagcggctacgccttcagcagctactggatcaactggatgaagcagaaacccggccagggactcgaatggatcggccaaatctatcccggcgacggcgacaccaactacaacggcaagttcaagggcagagccacactgaccgccgatacctctagcagcacagcctacatgcagctgagcagcctgaccagcgaagatagcgccgtgtacttctgtgcccggtccatcacaacagtcgtgggctgcgctatggactattggggccagggaacaagcgtgaccgtgtctagtacgcgtgagcagaaactgatctcggaagaggatctggggagcggcatccagaaccctgatcctgccgtgtaccagctgcgggatagcaagagcagcgacaagagcgtgtgtctgttcaccgacttcgacagccagaccaacgtgtcccagagcaaggactccgacgtgtacatcaccgataagaccgtgctggacatgcggagcatggacttcaagagcaactccgccgtggcctggtccaacaagtccgatttcgcctgcgccaacgccttcaacaacagcattatccccgaggacacattcttcccaagccccgagagcagctgcggtacccagagttttgggttgttggaccctaaattgtgctatctgttggacggaatcctgttcatttacggagtgatcctgaccgcattgttcctgaagagaggccggaagaagctgctgtacatcttcaagcagcctttcatgcggcccgtgcagaccacccaggaagaggacggctgctcctgccggttccccgaggaagaagaaggcggctgcgagctgcgggttaagttttccagatccgcagacgcacccgcttaccaacaagggcagaaccaactctacaatgaacttaatttggggcggagggaagagtacgacgttctggacaaaaggaggggacgagatcccgagatgggcggaaagcctcagcgaaggaagaatccgcaagaggggctttataacgaactccagaaagataaaatggcagaagcctatagtgagattgggatgaagggagaaaggaggaggggtaaaggtcacgatgggttgtaccaaggattgagcacagccactaaagatacctatgatgcgctccacatgcaggccctgccgccaaga

SEQ ID NO: 6058 - DNA, 3342 bp, Artificial Sequence
  Synthetic Polynucloetide
atggccttaccagtgaccgccttgctcctgccgctggccttgctgctccacgccgccaggccggaagtgcaactggtggaatctggaggctctctggtgcagccagggggaagcctgagactgtcttgtgccgcttccggcttcaccttcgacgactacgccatgagctgggtgcgccaggtgccaggcaaaggcctggaatgggtgtccagcatcaactggagcggcacccacaccgattacgccgactccgtgaaaggcagattcacaatcagcagaaacaacgccaacaataccctgtacctgcagatgaactccctgaagtctgaggatacagcagtgtattattgcgccaagaactggcgggacgccggcaccacttggtttgagaaaagcggctctgccggacagggaacccaagtgacagtgtcctccggtaccggcggaggcggatctggcggcggaggtagcggtggcggaggatctgaattcgacatccagatgacacagagccctagcagcctgtctgccagcgtgggagacagagtgaccatcacatgcaaggccagcgaccacatcaacaactggctggcctggtatcagcagaagcctggacaggcccctaagctgctgatctacggcgctaccacactggaaacaggcgtgcccagcagattttctggcagcggctctggcaccgactacaccctgacaatatccagcctccagcctgaggacttcgccacctactactgtcagcagagctggaacaccccttggacattcggccagggcaccaagctggaaatcaagagactcgagcagagcttcggcctgctggaccccaagctgtgctacctgctggatggcatcctgttcatctacggcgtgatcctgaccgccctgttcctgagagtgaagttcagcagaagcgccgacgcccctgcctaccagcagggacagaaccaactgtacaacgagctgaacctgggcagacgggaagagtacgacgtgctggacaagcggagaggcagggaccctgagatgggcggaaagccccagcggagaaagaacccccaggaaggactgtataacgaactccagaaagacaagatggccgaagcctacagcgagatcggcatgaagggcgagcggagaagaggcaagggccacgatggcctgtaccagggcctgagcaccgccaccaaggacacctatgacgccctgcacatgcaggccctgcctccaagaagggccaagcgatctggatctggagcaacaaacttctcactactcaaacaagcaggtgacgtggaggagaatcccgggcctactagtatggactggatttggcgcatccttttccttgtcggcgctgctaccggcgcccattccgggcccgaagtgcagctggttgaatctggcggaggactggttcagcctggcggatctctgagactgtcttgtgccgcctctggcttcgccagcgactactatatcatcggctggttcagacaggcccctggcaaagagagagagggcgtcagctgtatcagcagcagatacgccaacaccaactacgccgacagcgtgaagggcagattcaccatcagccgggacaacgccaagaacaccgtgtacctccagatgaacagcctgaagcctgaggacaccgccgtgtactactgtgccgccgacaccagaagatacacctgtcctgacattgccaccatgcaccggaacttcgattcttggggccagggcacactggtcaccgtttcttctggatccggcggcggaggatctggcggaggcggatctgggggcggaggctctttcgaacaagttcagcttcaacagcctggcgctgagctggtcaaacctggcgcttctgtgaagatgagctgcaaagccagcggctacgccttcagcagctactggatcaactggatgaagcagaaacccggccagggactcgaatggatcggccaaatctatcccggcgacggcgacaccaactacaacggcaagttcaagggcagagccacactgaccgccgatacctctagcagcacagcctacatgcagctgagcagcctgaccagcgaagatagcgccgtgtacttctgtgcccggtccatcacaacagtcgtgggctgcgctatggactattggggccagggaacaagcgtgaccgtgtctagtacgcgtcagagttttgggttgttggaccctaaattgtgctatctgttggacggaatcctgttcatttacggagtgatcctgaccgcattgttcctgcgggttaagttttccagatccgcagacgcacccgcttaccaacaagggcagaaccaactctacaatgaacttaatttggggcggagggaagagtacgacgttctggacaaaaggaggggacgagatcccgagatgggcggaaagcctcagcgaaggaagaatccgcaagaggggctttataacgaactccagaaagataaaatggcagaagcctatagtgagattgggatgaagggagaaaggaggaggggtaaaggtcacgatgggttgtaccaaggattgagcacagccactaaagatacctatgatgcgctccacatgcaggccctgccgccaagacgcgccaagagaagcggatctggcgtgaagcagaccctgaatttcgacctgctgaagctggctggcgacgtggaatccaacccaggcccttctagaggccatatgaccgagtacaagcccacggtgcgcctcgccacccgcgacgacgtccccagggccgtacgcaccctcgccgccgcgttcgccgactaccccgccacgcgccacaccgtcgatccggaccgccacatcgagcgggtcaccgagctgcaagaactcttcctcacgcgcgtcgggctcgacatcggcaaggtgtgggtcgcggacgacggcgccgcggtggcggtctggaccacgccggagagcgtcgaagcgggggcggtgttcgccgagatcggcccgcgcatggccgagttgagcggttcccggctggccgcgcagcaacagatggaaggcctcctggcgccgcaccggcccaaggagcccgcgtggttcctggccaccgtcggcgtctcgcccgaccaccagggcaagggtctgggcagcgccgtcgtgctccccggagtggaggcggccgagcgcgccggggtgcccgccttcctggagacctccgcgccccgcaacctccccttctacgagcggctcggcttcaccgtcaccgccgacgtcgaggtgcccgaaggaccgcgcacctggtgcatgacccgcaagcccggtgcctga

SEQ ID NO: 6059 - DNA, 2814 bp, Artificial Sequence
  Synthetic Polynucloetide
atggccttaccagtgaccgccttgctcctgccgctggccttgctgctccacgccgccaggccggaagtgcaactggtggaatctggaggctctctggtgcagccagggggaagcctgagactgtcttgtgccgcttccggcttcaccttcgacgactacgccatgagctgggtgcgccaggtgccaggcaaaggcctggaatgggtgtccagcatcaactggagcggcacccacaccgattacgccgactccgtgaaaggcagattcacaatcagcagaaacaacgccaacaataccctgtacctgcagatgaactccctgaagtctgaggatacagcagtgtattattgcgccaagaactggcgggacgccggcaccacttggtttgagaaaagcggctctgccggacagggaacccaagtgacagtgtcctccggtaccggcggaggcggatctggcggcggaggtagcggtggcggaggatctgaattcgacatccagatgacacagagccctagcagcctgtctgccagcgtgggagacagagtgaccatcacatgcaaggccagcgaccacatcaacaactggctggcctggtatcagcagaagcctggacaggcccctaagctgctgatctacggcgctaccacactggaaacaggcgtgcccagcagattttctggcagcggctctggcaccgactacaccctgacaatatccagcctccagcctgaggacttcgccacctactactgtcagcagagctggaacaccccttggacattcggccagggcaccaagctggaaatcaagagactcgagggacagcctaaggccaatcctaccgtgacactgttccctccaagcagcgaagaactccaggccaacaaggccacacttgtgtgcctgatctccgacttctaccctggggctgtgacagtggcttggaaggccgatggatctcctgtgaaagccggcgtggaaaccaccaagccatccaagcagagcaacaacaaatacgccgccagctcctacctgagcctgacacctgagcagtggaagtcccacagatcctacagctgccaagtgacccacgaaggcagcaccgtggaaaagacagtggcccctacagagtgcagccccatcaagaccgatgtgattacaatggaccccaaggacaactgctccaaggacgccaacgataccctgctgctccagctgaccaacaccagcgcctactacatgtacttgttgctgctgctgaagtccgtggtgtacttcgccatcatcacatgctgcctgctgcggagaaccgccttctgctgcaacggcgagaagtctagggccaagcgatctggatctggagcaacaaacttctcactactcaaacaagcaggtgacgtggaggagaatcccgggcctactagtatggactggatttggcgcatccttttccttgtcggcgctgctaccggcgcccattccgggcccgaagtgcagctggttgaatctggcggaggactggttcagcctggcggatctctgagactgtcttgtgccgcctctggcttcgccagcgactactatatcatcggctggttcagacaggcccctggcaaagagagagagggcgtcagctgtatcagcagcagatacgccaacaccaactacgccgacagcgtgaagggcagattcaccatcagccgggacaacgccaagaacaccgtgtacctccagatgaacagcctgaagcctgaggacaccgccgtgtactactgtgccgccgacaccagaagatacacctgtcctgacattgccaccatgcaccggaacttcgattcttggggccagggcacactggtcaccgtttcttctggatccggcggcggaggatctggcggaggcggatctgggggcggaggctctttcgaacaagttcagcttcaacagcctggcgctgagctggtcaaacctggcgcttctgtgaagatgagctgcaaagccagcggctacgccttcagcagctactggatcaactggatgaagcagaaacccggccagggactcgaatggatcggccaaatctatcccggcgacggcgacaccaactacaacggcaagttcaagggcagagccacactgaccgccgatacctctagcagcacagcctacatgcagctgagcagcctgaccagcgaagatagcgccgtgtacttctgtgcccggtccatcacaacagtcgtgggctgcgctatggactattggggccagggaacaagcgtgaccgtgtctagtacgcgtgcctctacaaagggaccctccgtgtttcctctggctcccagcagcaagtctacaagcggaggaacagccgctctgggctgcctggtcaaggattactttcccgagcctgtgaccgtgtcctggaatagcggagcactgacaagcggcgtgcacacctttccagccgtgctgcaaagcagcggcctgtactctctgagcagcgtggtcacagtgcctagctctagcctgggcacccagacctacatctgcaatgtgaaccacaagcctagcaacaccaaggtggacaagagagtggaacccaagagctgtgaagtgaaaaccgactccaccgaccacgtgaagcccaaagagacagagaacaccaagcagcccagcaagagctgccacaagcccaaggccatcgtgcacaccgagaaagtgaacatgatgagcctgaccgtgctgggcctgcggatgctgttcgccaaaaccgtggccgtgaacttcctgctgaccgccaagctgttcttcctc

SEQ ID NO: 6060 - DNA, 2748 bp, Artificial Sequence
  Synthetic Polynucloetide
atggccttaccagtgaccgccttgctcctgccgctggccttgctgctccacgccgccaggccggaagtgcaactggtggaatctggaggctctctggtgcagccagggggaagcctgagactgtcttgtgccgcttccggcttcaccttcgacgactacgccatgagctgggtgcgccaggtgccaggcaaaggcctggaatgggtgtccagcatcaactggagcggcacccacaccgattacgccgactccgtgaaaggcagattcacaatcagcagaaacaacgccaacaataccctgtacctgcagatgaactccctgaagtctgaggatacagcagtgtattattgcgccaagaactggcgggacgccggcaccacttggtttgagaaaagcggctctgccggacagggaacccaagtgacagtgtcctccggtaccggcggaggcggatctggcggcggaggtagcggtggcggaggatctgaattcgacatccagatgacacagagccctagcagcctgtctgccagcgtgggagacagagtgaccatcacatgcaaggccagcgaccacatcaacaactggctggcctggtatcagcagaagcctggacaggcccctaagctgctgatctacggcgctaccacactggaaacaggcgtgcccagcagattttctggcagcggctctggcaccgactacaccctgacaatatccagcctccagcctgaggacttcgccacctactactgtcagcagagctggaacaccccttggacattcggccagggcaccaagctggaaatcaagagactcgagggacagcctaaggccaatcctaccgtgacactgttccctccaagcagcgaagaactccaggccaacaaggccacacttgtgtgcctgatctccgacttctaccctggggctgtgacagtggcttggaaggccgatggatctcctgtgaaagccggcgtggaaaccaccaagccatccaagcagagcaacaacaaatacgccgccagctcctacctgagcctgacacctgagcagtggaagtcccacagatcctacagctgccaagtgacccacgaaggcagcaccgtggaaaagacagtggcccctacagagtgcagcggcagagccgattgcggcatcaccagcgccagctaccaccagggcgtgctgagcgccaccatcctgtacgagatcctgctgggcaaggccaccctgtacgccgtgctggtgtctgccctggtgctgatggctatggtcaagcggaaggacagccggggaagggccaagcgatctggatctggagcaacaaacttctcactactcaaacaagcaggtgacgtggaggagaatcccgggcctactagtatggactggatttggcgcatccttttccttgtcggcgctgctaccggcgcccattccgggcccgaagtgcagctggttgaatctggcggaggactggttcagcctggcggatctctgagactgtcttgtgccgcctctggcttcgccagcgactactatatcatcggctggttcagacaggcccctggcaaagagagagagggcgtcagctgtatcagcagcagatacgccaacaccaactacgccgacagcgtgaagggcagattcaccatcagccgggacaacgccaagaacaccgtgtacctccagatgaacagcctgaagcctgaggacaccgccgtgtactactgtgccgccgacaccagaagatacacctgtcctgacattgccaccatgcaccggaacttcgattcttggggccagggcacactggtcaccgtttcttctggatccggcggcggaggatctggcggaggcggatctgggggcggaggctctttcgaacaagttcagcttcaacagcctggcgctgagctggtcaaacctggcgcttctgtgaagatgagctgcaaagccagcggctacgccttcagcagctactggatcaactggatgaagcagaaacccggccagggactcgaatggatcggccaaatctatcccggcgacggcgacaccaactacaacggcaagttcaagggcagagccacactgaccgccgatacctctagcagcacagcctacatgcagctgagcagcctgaccagcgaagatagcgccgtgtacttctgtgcccggtccatcacaacagtcgtgggctgcgctatggactattggggccagggaacaagcgtgaccgtgtctagtacgcgtgcctctacaaagggaccctccgtgtttcctctggctcccagcagcaagtctacaagcggaggaacagccgctctgggctgcctggtcaaggattactttcccgagcctgtgaccgtgtcctggaatagcggagcactgacaagcggcgtgcacacctttccagccgtgctgcaaagcagcggcctgtactctctgagcagcgtggtcacagtgcctagctctagcctgggcacccagacctacatctgcaatgtgaaccacaagcctagcaacaccaaggtggacaagagagtggaacccaagagctgtatccccgaggacacattcttcccaagcagcgacgtgccctgcgacgtgaagctggtggaaaagagcttcgagacagacaccaacctgaacttccagaacctgagcgtgatcggcttcagaatcctgctgctgaaagtggccggctttaacctgctgatgaccctgcggctgtggtccagc

SEQ ID NO: 6061 - DNA, 2748 bp, Artificial Sequence
  Synthetic Polynucloetide
atggccttaccagtgaccgccttgctcctgccgctggccttgctgctccacgccgccaggccggaagtgcaactggtggaatctggaggctctctggtgcagccagggggaagcctgagactgtcttgtgccgcttccggcttcaccttcgacgactacgccatgagctgggtgcgccaggtgccaggcaaaggcctggaatgggtgtccagcatcaactggagcggcacccacaccgattacgccgactccgtgaaaggcagattcacaatcagcagaaacaacgccaacaataccctgtacctgcagatgaactccctgaagtctgaggatacagcagtgtattattgcgccaagaactggcgggacgccggcaccacttggtttgagaaaagcggctctgccggacagggaacccaagtgacagtgtcctccggtaccggcggaggcggatctggcggcggaggtagcggtggcggaggatctgaattcgacatccagatgacacagagccctagcagcctgtctgccagcgtgggagacagagtgaccatcacatgcaaggccagcgaccacatcaacaactggctggcctggtatcagcagaagcctggacaggcccctaagctgctgatctacggcgctaccacactggaaacaggcgtgcccagcagattttctggcagcggctctggcaccgactacaccctgacaatatccagcctccagcctgaggacttcgccacctactactgtcagcagagctggaacaccccttggacattcggccagggcaccaagctggaaatcaagagactcgagggacagcctaaggccaatcctaccgtgacactgttccctccaagcagcgaagaactccaggccaacaaggccacacttgtgtgcctgatctccgacttctaccctggggctgtgacagtggcttggaaggccgatggatctcctgtgaaagccggcgtggaaaccaccaagccatccaagcagagcaacaacaaatacgccgccagctcctacctgagcctgacacctgagcagtggaagtcccacagatcctacagctgccaagtgacccacgaaggcagcaccgtggaaaagacagtggcccctacagagtgcagcggcagagccgattgcggctttaccagcgagagctaccagcagggcgtgctgagcgccaccatcctgtacgagatcctgctgggcaaggccaccctgtacgccgtgctggtgtctgccctggtgctgatggctatggtcaagcggaaggacagccggggaagggccaagcgatctggatctggagcaacaaacttctcactactcaaacaagcaggtgacgtggaggagaatcccgggcctactagtatggactggatttggcgcatccttttccttgtcggcgctgctaccggcgcccattccgggcccgaagtgcagctggttgaatctggcggaggactggttcagcctggcggatctctgagactgtcttgtgccgcctctggcttcgccagcgactactatatcatcggctggttcagacaggcccctggcaaagagagagagggcgtcagctgtatcagcagcagatacgccaacaccaactacgccgacagcgtgaagggcagattcaccatcagccgggacaacgccaagaacaccgtgtacctccagatgaacagcctgaagcctgaggacaccgccgtgtactactgtgccgccgacaccagaagatacacctgtcctgacattgccaccatgcaccggaacttcgattcttggggccagggcacactggtcaccgtttcttctggatccggcggcggaggatctggcggaggcggatctgggggcggaggctctttcgaacaagttcagcttcaacagcctggcgctgagctggtcaaacctggcgcttctgtgaagatgagctgcaaagccagcggctacgccttcagcagctactggatcaactggatgaagcagaaacccggccagggactcgaatggatcggccaaatctatcccggcgacggcgacaccaactacaacggcaagttcaagggcagagccacactgaccgccgatacctctagcagcacagcctacatgcagctgagcagcctgaccagcgaagatagcgccgtgtacttctgtgcccggtccatcacaacagtcgtgggctgcgctatggactattggggccagggaacaagcgtgaccgtgtctagtacgcgtgcctctacaaagggaccctccgtgtttcctctggctcccagcagcaagtctacaagcggaggaacagccgctctgggctgcctggtcaaggattactttcccgagcctgtgaccgtgtcctggaatagcggagcactgacaagcggcgtgcacacctttccagccgtgctgcaaagcagcggcctgtactctctgagcagcgtggtcacagtgcctagctctagcctgggcacccagacctacatctgcaatgtgaaccacaagcctagcaacaccaaggtggacaagagagtggaacccaagagctgtatccccgaggacacattcttcccaagccccgagagcagctgcgacgtgaagctggtggaaaagagcttcgagacagacaccaacctgaacttccagaacctgagcgtgatcggcttcagaatcctgctgctgaaagtggccggctttaacctgctgatgaccctgcggctgtggtccagc

SEQ ID NO: 6062 - DNA, 2307 bp, Artificial Sequence
  Synthetic Polynucloetide
atggccttaccagtgaccgccttgctcctgccgctggccttgctgctccacgccgccaggccggaggttcagctgcttgagtctggcggaggactggttcaacctggcggaagcctgagactgtcttgtgccgccagcggcttcacctttagcagctacgccatgagctgggtccgacaggctcctggcaaaggactggaatgggtgtccagcatcagcggcagcggcgactacatctactacgccgatagcgtgaagggcagattcaccatcagccgggacatcagcaagaacaccctgtacctccagatgaacagcctgagagccgaggacaccgccgtgtactactgtgccaaagaaggcaccggcgctaacagcagcctggccgattatagaggccagggcacactggtcaccgtgtctagtggcggaggaagcggcggaggatctgaagtgcaactggtggaatctggaggctctctggtgcagccagggggaagcctgagactgtcttgtgccgcttccggcttcaccttcgacgactacgccatgagctgggtgcgccaggtgccaggcaaaggcctggaatgggtgtccagcatcaactggagcggcacccacaccgattacgccgactccgtgaaaggcagattcacaatcagcagaaacaacgccaacaataccctgtacctgcagatgaactccctgaagtctgaggatacagcagtgtattattgcgccaagaactggcgggacgccggcaccacttggtttgagaaaagcggctctgccggacagggaacccaagtgacagtgtcctccggtaccggcggaggcggatctggcggcggaggtagcggtggcggaggatctgaattcgacatccagatgacacagagccctagcagcctgtctgccagcgtgggagacagagtgaccatcacatgcaaggccagcgaccacatcaacaactggctggcctggtatcagcagaagcctggacaggcccctaagctgctgatctacggcgctaccacactggaaacaggcgtgcccagcagattttctggcagcggctctggcaccgactacaccctgacaatatccagcctccagcctgaggacttcgccacctactactgtcagcagagctggaacaccccttggacattcggccagggcaccaagctggaaatcaagagaggcggaggcggaagtggaggcggaggatctggcggcggaggctctcaagttcagcttcaacagcctggcgctgagctggtcaaacctggcgcttctgtgaagatgagctgcaaagccagcggctacgccttcagcagctactggatcaactggatgaagcagaaacccggccagggactcgaatggatcggccaaatctatcccggcgacggcgacaccaactacaacggcaagttcaagggcagagccacactgaccgccgatacctctagcagcacagcctacatgcagctgagcagcctgaccagcgaagatagcgccgtgtacttctgtgcccggtccatcacaacagtcgtgggctgcgctatggactattggggccagggaacaagcgtgaccgtgtctagtacgcgtgagcagaaactgatctcggaagaggatctgaaaattgaagttatgtatcctcctccttacctagacaatgagaagagcaatggaaccattatccatgtgaaagggaaacacctttgtccaagtcccctatttcccggaccttctaagcccttttgggtgctggtggtggttgggggagtcctggcttgctatagcttgctagtaacagtggcctttattattttctgggtgaggagtaagaggagcaggctcctgcacagtgactacatgaacatgactccacgccgccccggacccacccgcaagcattaccagccctatgccccaccacgcgacttcgcagcctatcgctccagagtgaagttcagcaggagcgcagacgcccccgcgtaccagcagggccagaaccagctctataacgagctcaatctaggacgaagagaggagtacgatgttttggacaagagacgtggccgggaccctgagatggggggaaagccgagaaggaagaaccctcaggaaggcctgtacaatgaactgcagaaagataagatggcggaggcctacagtgagattgggatgaaaggcgagcgccggaggggcaaggggcacgatggcctttaccagggtctcagtacagccaccaaggacacctacgacgcccttcacatgcaggccctgccccctcgc

SEQ ID NO: 6063 - DNA, 2328 bp, Artificial Sequence
  Synthetic Polynucloetide
atggccttaccagtgaccgccttgctcctgccgctggccttgctgctccacgccgccaggccggaggttcagctgcttgagtctggcggaggactggttcaacctggcggaagcctgagactgtcttgtgccgccagcggcttcacctttagcagctacgccatgagctgggtccgacaggctcctggcaaaggactggaatgggtgtccagcatcagcggcagcggcgactacatctactacgccgatagcgtgaagggcagattcaccatcagccgggacatcagcaagaacaccctgtacctccagatgaacagcctgagagccgaggacaccgccgtgtactactgtgccaaagaaggcaccggcgctaacagcagcctggccgattatagaggccagggcacactggtcaccgtgtctagtggcggaggaagcggcggaggatctgaagtgcaactggtggaatctggaggctctctggtgcagccagggggaagcctgagactgtcttgtgccgcttccggcttcaccttcgacgactacgccatgagctgggtgcgccaggtgccaggcaaaggcctggaatgggtgtccagcatcaactggagcggcacccacaccgattacgccgactccgtgaaaggcagattcacaatcagcagaaacaacgccaacaataccctgtacctgcagatgaactccctgaagtctgaggatacagcagtgtattattgcgccaagaactggcgggacgccggcaccacttggtttgagaaaagcggctctgccggacagggaacccaagtgacagtgtcctccggtaccggcggaggcggatctggcggcggaggtagcggtggcggaggatctgaattcgacatccagatgacacagagccctagcagcctgtctgccagcgtgggagacagagtgaccatcacatgcaaggccagcgaccacatcaacaactggctggcctggtatcagcagaagcctggacaggcccctaagctgctgatctacggcgctaccacactggaaacaggcgtgcccagcagattttctggcagcggctctggcaccgactacaccctgacaatatccagcctccagcctgaggacttcgccacctactactgtcagcagagctggaacaccccttggacattcggccagggcaccaagctggaaatcaagagaggcggaggcggaagtggaggcggaggatctggcggcggaggctctcaagttcagcttcaacagcctggcgctgagctggtcaaacctggcgcttctgtgaagatgagctgcaaagccagcggctacgccttcagcagctactggatcaactggatgaagcagaaacccggccagggactcgaatggatcggccaaatctatcccggcgacggcgacaccaactacaacggcaagttcaagggcagagccacactgaccgccgatacctctagcagcacagcctacatgcagctgagcagcctgaccagcgaagatagcgccgtgtacttctgtgcccggtccatcacaacagtcgtgggctgcgctatggactattggggccagggaacaagcgtgaccgtgtctagtacgcgtgagcagaaactgatctcggaagaggatctggcgaagcccaccacgacgccagcgccgcgaccaccaacaccggcgcccaccatcgcgtcgcagcccctgtccctgcgcccagaggcgtgccggccagcggcggggggcgcagtgcacacgagggggctggacttcgcctgtgacatctacatctgggcgcccttggccgggacttgtggggtccttctcctgtcactggttatcaccctttactgcaaacggggcagaaagaaactcctgtatatattcaaacaaccatttatgagaccagtacaaactactcaagaggaagatggctgtagctgccgatttccagaagaagaagaaggaggatgtgaactgagagtgaagttcagcaggagcgcagacgcccccgcgtaccagcagggccagaaccagctctataacgagctgaatctaggacgaagagaggagtacgatgttttggacaagagacgtggccgggaccctgagatggggggaaagccgagaaggaagaaccctcaggaaggcctgtacaatgaactgcagaaagataagatggcggaggcctacagtgagattgggatgaaaggcgagcgccggaggggcaaggggcacgatggcctttaccagggtctcagtacagccaccaaggacacctacgacgcccttcacatgcaggccctgccccctcgctga

SEQ ID NO: 6064 - DNA, 3567 bp, Artificial Sequence
  Synthetic Polynucloetide
atggccttaccagtgaccgccttgctcctgccgctggccttgctgctccacgccgccaggccggaggttcagctgcttgagtctggcggaggactggttcaacctggcggaagcctgagactgtcttgtgccgccagcggcttcacctttagcagctacgccatgagctgggtccgacaggctcctggcaaaggactggaatgggtgtccagcatcagcggcagcggcgactacatctactacgccgatagcgtgaagggcagattcaccatcagccgggacatcagcaagaacaccctgtacctccagatgaacagcctgagagccgaggacaccgccgtgtactactgtgccaaagaaggcaccggcgctaacagcagcctggccgattatagaggccagggcacactggtcaccgtgtctagtggcggaggaagcggcggaggatctgaagtgcaactggtggaatctggaggctctctggtgcagccagggggaagcctgagactgtcttgtgccgcttccggcttcaccttcgacgactacgccatgagctgggtgcgccaggtgccaggcaaaggcctggaatgggtgtccagcatcaactggagcggcacccacaccgattacgccgactccgtgaaaggcagattcacaatcagcagaaacaacgccaacaataccctgtacctgcagatgaactccctgaagtctgaggatacagcagtgtattattgcgccaagaactggcgggacgccggcaccacttggtttgagaaaagcggctctgccggacagggaacccaagtgacagtgtcctccggtaccggcggaggcggatctggcggcggaggtagcggtggcggaggatctgaattcgacatccagatgacacagagccctagcagcctgtctgccagcgtgggagacagagtgaccatcacatgcaaggccagcgaccacatcaacaactggctggcctggtatcagcagaagcctggacaggcccctaagctgctgatctacggcgctaccacactggaaacaggcgtgcccagcagattttctggcagcggctctggcaccgactacaccctgacaatatccagcctccagcctgaggacttcgccacctactactgtcagcagagctggaacaccccttggacattcggccagggcaccaagctggaaatcaagagaggcggaggcggaagtggaggcggaggatctggcggcggaggctctcaagttcagcttcaacagcctggcgctgagctggtcaaacctggcgcttctgtgaagatgagctgcaaagccagcggctacgccttcagcagctactggatcaactggatgaagcagaaacccggccagggactcgaatggatcggccaaatctatcccggcgacggcgacaccaactacaacggcaagttcaagggcagagccacactgaccgccgatacctctagcagcacagcctacatgcagctgagcagcctgaccagcgaagatagcgccgtgtacttctgtgcccggtccatcacaacagtcgtgggctgcgctatggactattggggccagggaacaagcgtgaccgtgtctagtacgcgtgagcagaaactgatctcggaagaggatctggcgaagcccaccacgacgccagcgccgcgaccaccaacaccggcgcccaccatcgcgtcgcagcccctgtccctgcgcccagaggcgtgccggccagcggcggggggcgcagtgcacacgagggggctggacttcgcctgtgacatctacatctgggcgcccttggccgggacttgtggggtccttctcctgtcactggttatcaccctttactgcgggcgcgccagagtgaagttcagcaggagcgcagacgcccccgcgtaccagcagggccagaaccagctctataacgagctgaatctaggacgaagagaggagtacgatgttttggacaagagacgtggccgggaccctgagatggggggaaagccgagaaggaagaaccctcaggaaggcctgtacaatgaactgcagaaagataagatggcggaggcctacagtgagattgggatgaaaggcgagcgccggaggggcaaggggcacgatggcctttaccagggtctcagtacagccaccaaggacacctacgacgcccttcacatgcaggccctgccccctcgctctagaggatctggagcaacaaacttctcactactcaaacaagcaggtgacgtggaggagaatcccgggcctgggatccacatggccacttacgaggttctctgtgaggtggcgcggaaactgggcacggatgacagggaagtggtattgttcctcctaaacgtgttcatacctcaacccacactggcccaattaattggagctcttagagctttaaaggaggagggcaggttaacgtttcccctgttagcggaatgtctgtttcgtgcaggtcgcagagacctcttgcgcgacctgcttcacttagacccgcgttttttagagcgccacctagcgggcacaatgagttatttcagcccttatcagctcactgttctccacgtagacggggagctgtgtgcgagggatattaggtctttgatatttttaagcaaggacactatagggtctcgcagcacaccacagacattcttacactgggtgtactgtatggaaaacttagacctactgggtcccactgacgtggatgccctaatgtcaatgcttagatctttgtcaagagtagacctacagcgccaagtgcaaaccctaatgggccttcacctttccggcccatcacactcccaacactatcgccatacaccactcgagaccgatttctacgactacaaggacgacgatgacaagactagtggctccggcgagggcagaggaagtctactaacctgcggagatgtggaagaaaatcctggcccacatatgaccgagtacaagcccacggtgcgcctcgccacccgcgacgacgtccccagggccgtacgcaccctcgccgccgcgttcgccgactaccccgccacgcgccacaccgtcgatccggaccgccacatcgagcgggtcaccgagctgcaagaactcttcctcacgcgcgtcgggctcgacatcggcaaggtgtgggtcgcggacgacggcgccgcggtggcggtctggaccacgccggagagcgtcgaagcgggggcggtgttcgccgagatcggcccgcgcatggccgagttgagcggttcccggctggccgcgcagcaacagatggaaggcctcctggcgccgcaccggcccaaggagcccgcgtggttcctggccaccgtcggcgtctcgcccgaccaccagggcaagggtctgggcagcgccgtcgtgctccccggagtggaggcggccgagcgcgccggggtgcccgccttcctggagacctccgcgccccgcaacctccccttctacgagcggctcggcttcaccgtcaccgccgacgtcgaggtgcccgaaggaccgcgcacctggtgcatgacccgcaagcccggtgcctga

SEQ ID NO: 6065 - DNA, 3387 bp, Artificial Sequence
  Synthetic Polynucloetide
atggccttaccagtgaccgccttgctcctgccgctggccttgctgctccacgccgccaggccggaggttcagctgcttgagtctggcggaggactggttcaacctggcggaagcctgagactgtcttgtgccgccagcggcttcacctttagcagctacgccatgagctgggtccgacaggctcctggcaaaggactggaatgggtgtccagcatcagcggcagcggcgactacatctactacgccgatagcgtgaagggcagattcaccatcagccgggacatcagcaagaacaccctgtacctccagatgaacagcctgagagccgaggacaccgccgtgtactactgtgccaaagaaggcaccggcgctaacagcagcctggccgattatagaggccagggcacactggtcaccgtgtctagtggcggaggaagcggcggaggatctgaagtgcaactggtggaatctggaggctctctggtgcagccagggggaagcctgagactgtcttgtgccgcttccggcttcaccttcgacgactacgccatgagctgggtgcgccaggtgccaggcaaaggcctggaatgggtgtccagcatcaactggagcggcacccacaccgattacgccgactccgtgaaaggcagattcacaatcagcagaaacaacgccaacaataccctgtacctgcagatgaactccctgaagtctgaggatacagcagtgtattattgcgccaagaactggcgggacgccggcaccacttggtttgagaaaagcggctctgccggacagggaacccaagtgacagtgtcctccggtaccggcggaggcggatctggcggcggaggtagcggtggcggaggatctgaattcgacatccagatgacacagagccctagcagcctgtctgccagcgtgggagacagagtgaccatcacatgcaaggccagcgaccacatcaacaactggctggcctggtatcagcagaagcctggacaggcccctaagctgctgatctacggcgctaccacactggaaacaggcgtgcccagcagattttctggcagcggctctggcaccgactacaccctgacaatatccagcctccagcctgaggacttcgccacctactactgtcagcagagctggaacaccccttggacattcggccagggcaccaagctggaaatcaagagactcgagatccagaaccctgatcctgccgtgtaccagctgcgggatagcaagagcagcgacaagagcgtgtgtctgttcaccgacttcgacagccagaccaacgtgtcccagagcaaggactccgacgtgtacatcaccgataagtgcgtgctggacatgcggagcatggacttcaagagcaactccgccgtggcctggtccaacaagtccgatttcgcctgcgccaacgccttcaacaacagcattatccccgaggacacattcttcccaagcagcgacgtgccctgcgacgtgaagctggtggaaaagagcttcgagacagacaccaacctgaacttccagaacctgagcgtgatcggcttcagaatcctgctgctgaaagtggccggctttaacctgctgatgaccctgcggctgtggtccagccgcgccaagagaagcggatctggcgtgaagcagaccctgaatttcgacctgctgaagctggctggcgacgtggaatccaacccaggccctactagtatggactggatttggcgcatccttttccttgtcggcgctgctaccggcgcgcattccttcgaacaagttcagcttcaacagcctggcgctgagctggtcaaacctggcgcttctgtgaagatgagctgcaaagccagcggctacgccttcagcagctactggatcaactggatgaagcagaaacccggccagggactcgaatggatcggccaaatctatcccggcgacggcgacaccaactacaacggcaagttcaagggcagagccacactgaccgccgatacctctagcagcacagcctacatgcagctgagcagcctgaccagcgaagatagcgccgtgtacttctgtgcccggtccatcacaacagtcgtgggctgcgctatggactattggggccagggaacaagcgtgaccgtgtctagtacgcgtgaggacctgaagaacgtgttcccacctgaggtggccgtgttcgagcctagcaaggccgagatcgcccacacccagaaagccaccctcgtgtgcctggctaccggcttctaccccgaccatgtggaactgtcttggtgggtcaacggcaaagaggtgcacagcggcgtgtgtaccgacccccagccactgaaagaacagcccgccctgaacgacagccggtactgcctgagcagcagactgagagtgtccgccaccttctggcagaacccccggaaccacttcagatgccaggtgcagttctacggcctgagcgagaacgacgagtggacccaggacagagccaagcccgtgacccagatcgtgtctgccgaagcctggggcagagccgattgcggcatcaccagcgccagctaccaccagggcgtgctgagcgccaccatcctgtacgagatcctgctgggcaaggccaccctgtacgccgtgctggtgtctgccctggtgctgatggctatggtcaagcggaaggacagccggggaagggccaagcgatctggatctggagcaacaaacttctcactactcaaacaagcaggtgacgtggaggagaatcccgggccttctagaggccatatgaccgagtacaagcccacggtgcgcctcgccacccgcgacgacgtccccagggccgtacgcaccctcgccgccgcgttcgccgactaccccgccacgcgccacaccgtcgatccggaccgccacatcgagcgggtcaccgagctgcaagaactcttcctcacgcgcgtcgggctcgacatcggcaaggtgtgggtcgcggacgacggcgccgcggtggcggtctggaccacgccggagagcgtcgaagcgggggcggtgttcgccgagatcggcccgcgcatggccgagttgagcggttcccggctggccgcgcagcaacagatggaaggcctcctggcgccgcaccggcccaaggagcccgcgtggttcctggccaccgtcggcgtctcgcccgaccaccagggcaagggtctgggcagcgccgtcgtgctccccggagtggaggcggccgagcgcgccggggtgcccgccttcctggagacctccgcgccccgcaacctccccttctacgagcggctcggcttcaccgtcaccgccgacgtcgaggtgcccgaaggaccgcgcacctggtgcatgacccgcaagcccggtgcctga

SEQ ID NO: 6066 - DNA, 3384 bp, Artificial Sequence
  Synthetic Polynucloetide
atggccttaccagtgaccgccttgctcctgccgctggccttgctgctccacgccgccaggccggaggttcagctgcttgagtctggcggaggactggttcaacctggcggaagcctgagactgtcttgtgccgccagcggcttcacctttagcagctacgccatgagctgggtccgacaggctcctggcaaaggactggaatgggtgtccagcatcagcggcagcggcgactacatctactacgccgatagcgtgaagggcagattcaccatcagccgggacatcagcaagaacaccctgtacctccagatgaacagcctgagagccgaggacaccgccgtgtactactgtgccaaagaaggcaccggcgctaacagcagcctggccgattatagaggccagggcacactggtcaccgtgtctagtggcggaggaagcggcggaggatctgaagtgcaactggtggaatctggaggctctctggtgcagccagggggaagcctgagactgtcttgtgccgcttccggcttcaccttcgacgactacgccatgagctgggtgcgccaggtgccaggcaaaggcctggaatgggtgtccagcatcaactggagcggcacccacaccgattacgccgactccgtgaaaggcagattcacaatcagcagaaacaacgccaacaataccctgtacctgcagatgaactccctgaagtctgaggatacagcagtgtattattgcgccaagaactggcgggacgccggcaccacttggtttgagaaaagcggctctgccggacagggaacccaagtgacagtgtcctccggtaccggcggaggcggatctggcggcggaggtagcggtggcggaggatctgaattcgacatccagatgacacagagccctagcagcctgtctgccagcgtgggagacagagtgaccatcacatgcaaggccagcgaccacatcaacaactggctggcctggtatcagcagaagcctggacaggcccctaagctgctgatctacggcgctaccacactggaaacaggcgtgcccagcagattttctggcagcggctctggcaccgactacaccctgacaatatccagcctccagcctgaggacttcgccacctactactgtcagcagagctggaacaccccttggacattcggccagggcaccaagctggaaatcaagagactcgaggacctgaagaacgtgttcccacctgaggtggccgtgttcgagcctagcaaggccgagatcgcccacacccagaaagccaccctcgtgtgcctggctaccggcttctaccccgaccatgtggaactgtcttggtgggtcaacggcaaagaggtgcacagcggcgtgtgtaccgacccccagccactgaaagaacagcccgccctgaacgacagccggtactgcctgagcagcagactgagagtgtccgccaccttctggcagaacccccggaaccacttcagatgccaggtgcagttctacggcctgagcgagaacgacgagtggacccaggacagagccaagcccgtgacccagatcgtgtctgccgaagcctggggcagagccgattgcggcatcaccagcgccagctaccaccagggcgtgctgagcgccaccatcctgtacgagatcctgctgggcaaggccaccctgtacgccgtgctggtgtctgccctggtgctgatggctatggtcaagcggaaggacagccggggaagggccaagcgatctggatctggagcaacaaacttctcactactcaaacaagcaggtgacgtggaggagaatcccgggcctactagtatggactggatttggcgcatccttttccttgtcggcgctgctaccggcgcgcattccttcgaacaagttcagcttcaacagcctggcgctgagctggtcaaacctggcgcttctgtgaagatgagctgcaaagccagcggctacgccttcagcagctactggatcaactggatgaagcagaaacccggccagggactcgaatggatcggccaaatctatcccggcgacggcgacaccaactacaacggcaagttcaagggcagagccacactgaccgccgatacctctagcagcacagcctacatgcagctgagcagcctgaccagcgaagatagcgccgtgtacttctgtgcccggtccatcacaacagtcgtgggctgcgctatggactattggggccagggaacaagcgtgaccgtgtctagtacgcgtatccagaaccctgatcctgccgtgtaccagctgcgggatagcaagagcagcgacaagagcgtgtgtctgttcaccgacttcgacagccagaccaacgtgtcccagagcaaggactccgacgtgtacatcaccgataagtgcgtgctggacatgcggagcatggacttcaagagcaactccgccgtggcctggtccaacaagtccgatttcgcctgcgccaacgccttcaacaacagcattatccccgaggacacattcttcccaagcagcgacgtgccctgcgacgtgaagctggtggaaaagagcttcgagacagacaccaacctgaacttccagaacctgagcgtgatcggcttcagaatcctgctgctgaaagtggccggctttaacctgctgatgaccctgcggctgtggtccagccgcgccaagagaagcggatctggcgtgaagcagaccctgaatttcgacctgctgaagctggctggcgacgtggaatccaacccaggcccttctagaggccatatgaccgagtacaagcccacggtgcgcctcgccacccgcgacgacgtccccagggccgtacgcaccctcgccgccgcgttcgccgactaccccgccacgcgccacaccgtcgatccggaccgccacatcgagcgggtcaccgagctgcaagaactcttcctcacgcgcgtcgggctcgacatcggcaaggtgtgggtcgcggacgacggcgccgcggtggcggtctggaccacgccggagagcgtcgaagcgggggcggtgttcgccgagatcggcccgcgcatggccgagttgagcggttcccggctggccgcgcagcaacagatggaaggcctcctggcgccgcaccggcccaaggagcccgcgtggttcctggccaccgtcggcgtctcgcccgaccaccagggcaagggtctgggcagcgccgtcgtgctccccggagtggaggcggccgagcgcgccggggtgcccgccttcctggagacctccgcgccccgcaacctccccttctacgagcggctcggcttcaccgtcaccgccgacgtcgaggtgcccgaaggaccgcgcacctggtgcatgacccgcaagcccggtgcctga

SEQ ID NO: 6067 - DNA, 2682 bp, Artificial Sequence
  Synthetic Polynucloetide
atggccttaccagtgaccgccttgctcctgccgctggccttgctgctccacgccgccaggccggaggttcagctgcttgagtctggcggaggactggttcaacctggcggaagcctgagactgtcttgtgccgccagcggcttcacctttagcagctacgccatgagctgggtccgacaggctcctggcaaaggactggaatgggtgtccagcatcagcggcagcggcgactacatctactacgccgatagcgtgaagggcagattcaccatcagccgggacatcagcaagaacaccctgtacctccagatgaacagcctgagagccgaggacaccgccgtgtactactgtgccaaagaaggcaccggcgctaacagcagcctggccgattatagaggccagggcacactggtcaccgtgtctagtggcggaggaagcggcggaggatctgaagtgcaactggtggaatctggaggctctctggtgcagccagggggaagcctgagactgtcttgtgccgcttccggcttcaccttcgacgactacgccatgagctgggtgcgccaggtgccaggcaaaggcctggaatgggtgtccagcatcaactggagcggcacccacaccgattacgccgactccgtgaaaggcagattcacaatcagcagaaacaacgccaacaataccctgtacctgcagatgaactccctgaagtctgaggatacagcagtgtattattgcgccaagaactggcgggacgccggcaccacttggtttgagaaaagcggctctgccggacagggaacccaagtgacagtgtcctccggtaccggcggaggcggatctggcggcggaggtagcggtggcggaggatctgaattcgacatccagatgacacagagccctagcagcctgtctgccagcgtgggagacagagtgaccatcacatgcaaggccagcgaccacatcaacaactggctggcctggtatcagcagaagcctggacaggcccctaagctgctgatctacggcgctaccacactggaaacaggcgtgcccagcagattttctggcagcggctctggcaccgactacaccctgacaatatccagcctccagcctgaggacttcgccacctactactgtcagcagagctggaacaccccttggacattcggccagggcaccaagctggaaatcaagagactcgaggacctgaagaacgtgttcccacctgaggtggccgtgttcgagcctagcgaggccgagatcagccacacccagaaagccaccctcgtgtgcctggctaccggcttctaccccgaccatgtggaactgtcttggtgggtcaacggcaaagaggtgcacagcggcgtgtgtaccgacccccagccactgaaagaacagcccgccctgaacgacagccggtactgcctgagcagcagactgagagtgtccgccaccttctggcagaacccccggaaccacttcagatgccaggtgcagttctacggcctgagcgagaacgacgagtggacccaggacagagccaagcccgtgacccagatcgtgtctgccgaagcctggggcagagccgattgcggctttaccagcgagagctaccagcagggcgtgctgagcgccaccatcctgtacgagatcctgctgggcaaggccaccctgtacgccgtgctggtgtctgccctggtgctgatggctatggtcaagcggaaggacagccggggaagggccaagcgatctggatctggagcaacaaacttctcactactcaaacaagcaggtgacgtggaggagaatcccgggcctactagtatggactggatttggcgcatccttttccttgtcggcgctgctaccggcgcgcattccttcgaacaagttcagcttcaacagcctggcgctgagctggtcaaacctggcgcttctgtgaagatgagctgcaaagccagcggctacgccttcagcagctactggatcaactggatgaagcagaaacccggccagggactcgaatggatcggccaaatctatcccggcgacggcgacaccaactacaacggcaagttcaagggcagagccacactgaccgccgatacctctagcagcacagcctacatgcagctgagcagcctgaccagcgaagatagcgccgtgtacttctgtgcccggtccatcacaacagtcgtgggctgcgctatggactattggggccagggaacaagcgtgaccgtgtctagtacgcgtatccagaaccctgatcctgccgtgtaccagctgcgggatagcaagagcagcgacaagagcgtgtgtctgttcaccgacttcgacagccagaccaacgtgtcccagagcaaggactccgacgtgtacatcaccgataagtgcgtgctggacatgcggagcatggacttcaagagcaactccgccgtggcctggtccaacaagtccgatttcgcctgcgccaacgccttcaacaacagcattatccccgaggacacattcttcccaagccccgagagcagctgcgacgtgaagctggtggaaaagagcttcgagacagacaccaacctgaacttccagaacctgagcgtgatcggcttcagaatcctgctgctgaaagtggccggctttaacctgctgatgaccctgcggctgtggtccagc

SEQ ID NO: 6068 - DNA, 3357 bp, Artificial Sequence
  Synthetic Polynucloetide
atggccttaccagtgaccgccttgctcctgccgctggccttgctgctccacgccgccaggccggaggttcagctgcttgagtctggcggaggactggttcaacctggcggaagcctgagactgtcttgtgccgccagcggcttcacctttagcagctacgccatgagctgggtccgacaggctcctggcaaaggactggaatgggtgtccagcatcagcggcagcggcgactacatctactacgccgatagcgtgaagggcagattcaccatcagccgggacatcagcaagaacaccctgtacctccagatgaacagcctgagagccgaggacaccgccgtgtactactgtgccaaagaaggcaccggcgctaacagcagcctggccgattatagaggccagggcacactggtcaccgtgtctagtggcggaggaagcggcggaggatctgaagtgcaactggtggaatctggaggctctctggtgcagccagggggaagcctgagactgtcttgtgccgcttccggcttcaccttcgacgactacgccatgagctgggtgcgccaggtgccaggcaaaggcctggaatgggtgtccagcatcaactggagcggcacccacaccgattacgccgactccgtgaaaggcagattcacaatcagcagaaacaacgccaacaataccctgtacctgcagatgaactccctgaagtctgaggatacagcagtgtattattgcgccaagaactggcgggacgccggcaccacttggtttgagaaaagcggctctgccggacagggaacccaagtgacagtgtcctccggtaccggcggaggcggatctggcggcggaggtagcggtggcggaggatctgaattcgacatccagatgacacagagccctagcagcctgtctgccagcgtgggagacagagtgaccatcacatgcaaggccagcgaccacatcaacaactggctggcctggtatcagcagaagcctggacaggcccctaagctgctgatctacggcgctaccacactggaaacaggcgtgcccagcagattttctggcagcggctctggcaccgactacaccctgacaatatccagcctccagcctgaggacttcgccacctactactgtcagcagagctggaacaccccttggacattcggccagggcaccaagctggaaatcaagagactcgaggacctgaagaacgtgttcccacctgaggtggccgtgttcgagcctagcgaggccgagatcagccacacccagaaagccaccctcgtgtgcctggctaccggcttctaccccgaccatgtggaactgtcttggtgggtcaacggcaaagaggtgcacagcggcgtgtgtaccgacccccagccactgaaagaacagcccgccctgaacgacagccggtactgcctgagcagcagactgagagtgtccgccaccttctggcagaacccccggaaccacttcagatgccaggtgcagttctacggcctgagcgagaacgacgagtggacccaggacagagccaagcccgtgacccagatcgtgtctgccgaagcctggggcagagccgattgcggctttaccagcgagagctaccagcagggcgtgctgagcgccaccatcctgtacgagatcctgctgggcaaggccaccctgtacgccgtgctggtgtctgccctggtgctgatggctatggtcaagcggaaggacagccggggaagggccaagcgatctggatctggagcaacaaacttctcactactcaaacaagcaggtgacgtggaggagaatcccgggcctactagtatggactggatttggcgcatccttttccttgtcggcgctgctaccggcgcgcattccttcgaacaagttcagcttcaacagcctggcgctgagctggtcaaacctggcgcttctgtgaagatgagctgcaaagccagcggctacgccttcagcagctactggatcaactggatgaagcagaaacccggccagggactcgaatggatcggccaaatctatcccggcgacggcgacaccaactacaacggcaagttcaagggcagagccacactgaccgccgatacctctagcagcacagcctacatgcagctgagcagcctgaccagcgaagatagcgccgtgtacttctgtgcccggtccatcacaacagtcgtgggctgcgctatggactattggggccagggaacaagcgtgaccgtgtctagtacgcgtatccagaaccctgatcctgccgtgtaccagctgcgggatagcaagagcagcgacaagagcgtgtgtctgttcaccgacttcgacagccagaccaacgtgtcccagagcaaggactccgacgtgtacatcaccgataagtgcgtgctggacatgcggagcatggacttcaagagcaactccgccgtggcctggtccaacaagtccgatttcgcctgcgccaacgccttcaacaacagcattatccccgaggacacattcttcccaagccccgagagcagctgcgacgtgaagctggtggaaaagagcttcgagacagacaccaacctgaacttccagaacctgagcgtgatcggcttcagaatcctgctgctgaaagtggccggctttaacctgctgatgaccctgcggctgtggtccagccgcgccaagagaagcggatctggcgtgaagcagaccctgaatttcgacctgctgaagctggctggcgacgtggaatccaacccaggcccttctagaggcgggatccacaccatggctacctacgaggtgctgtgcgaggtggcaagaaagctgggcaccgacgacagagaagtggtgctgttcctgctgaacgtgttcatccctcagcctacactggcccagctgatcggtgcactgagagccctgaaagaggaaggccggctgacctttcctctgctggccgaatgcctgttcagagccggaagaagggatctgctgcgggacctgctgcatctggaccccagatttctggaaagacacctggccggcaccatgagctacttcagcccttaccagctgaccgtgctgcacgttgacggcgaactgtgcgccagagatattcggagcctgatcttcctgagcaaggacaccatcggcagccggtctacccctcagacatttctgcactgggtgtactgcatggaaaacctggacctgctcggccccacagatgtggatgccctgatgtccatgctgagaagcctgagcagagtggacctccagagacaggtgcagacactgatgggactgcacctgagcggacctagccacagccagcactacagacacacccct

SEQ ID NO: 6069 - DNA, 2694 bp, Artificial Sequence
  Synthetic Polynucloetide
atggccttaccagtgaccgccttgctcctgccgctggccttgctgctccacgccgccaggccggaggttcagctgcttgagtctggcggaggactggttcaacctggcggaagcctgagactgtcttgtgccgccagcggcttcacctttagcagctacgccatgagctgggtccgacaggctcctggcaaaggactggaatgggtgtccagcatcagcggcagcggcgactacatctactacgccgatagcgtgaagggcagattcaccatcagccgggacatcagcaagaacaccctgtacctccagatgaacagcctgagagccgaggacaccgccgtgtactactgtgccaaagaaggcaccggcgctaacagcagcctggccgattatagaggccagggcacactggtcaccgtgtctagtggcggaggaagcggcggaggatctgaagtgcaactggtggaatctggaggctctctggtgcagccagggggaagcctgagactgtcttgtgccgcttccggcttcaccttcgacgactacgccatgagctgggtgcgccaggtgccaggcaaaggcctggaatgggtgtccagcatcaactggagcggcacccacaccgattacgccgactccgtgaaaggcagattcacaatcagcagaaacaacgccaacaataccctgtacctgcagatgaactccctgaagtctgaggatacagcagtgtattattgcgccaagaactggcgggacgccggcaccacttggtttgagaaaagcggctctgccggacagggaacccaagtgacagtgtcctccggtaccggcggaggcggatctggcggcggaggtagcggtggcggaggatctgaattcgacatccagatgacacagagccctagcagcctgtctgccagcgtgggagacagagtgaccatcacatgcaaggccagcgaccacatcaacaactggctggcctggtatcagcagaagcctggacaggcccctaagctgctgatctacggcgctaccacactggaaacaggcgtgcccagcagattttctggcagcggctctggcaccgactacaccctgacaatatccagcctccagcctgaggacttcgccacctactactgtcagcagagctggaacaccccttggacattcggccagggcaccaagctggaaatcaagagactcgagatccagaaccctgatcctgccgtgtaccagctgcgggatagcaagagcagcgacaagagcgtgtgtctgttcaccgacttcgacagccagaccaacgtgtcccagagcaaggactccgacgtgtacatcaccgataagtgcgtgctggacatgcggagcatggacttcaagagcaactccgccgtggcctggtccaacaagtccgatttcgcctgcgccaacgccttcaacaacagcattatccccgaggacacattcttcccaagccccgagagcagctgcgacgtgaagctggtggaaaagagcttcgagacagacaccaacctgaacttccagaacctgagcgtgatcggcttcagaatcctgctgctgaaagtggccggctttaacctgctgatgaccctgcggctgtggtccagccgcgccaagagaagcggatctggcgtgaagcagaccctgaatttcgacctgctgaagctggctggcgacgtggaatccaacccaggccctactagtatggactggatttggcgcatccttttccttgtcggcgctgctaccggcgcgcattccttcgaacaagttcagcttcaacagcctggcgctgagctggtcaaacctggcgcttctgtgaagatgagctgcaaagccagcggctacgccttcagcagctactggatcaactggatgaagcagaaacccggccagggactcgaatggatcggccaaatctatcccggcgacggcgacaccaactacaacggcaagttcaagggcagagccacactgaccgccgatacctctagcagcacagcctacatgcagctgagcagcctgaccagcgaagatagcgccgtgtacttctgtgcccggtccatcacaacagtcgtgggctgcgctatggactattggggccagggaacaagcgtgaccgtgtctagtacgcgtgaggacctgaagaacgtgttcccacctgaggtggccgtgttcgagcctagcgaggccgagatcagccacacccagaaagccaccctcgtgtgcctggctaccggcttctaccccgaccatgtggaactgtcttggtgggtcaacggcaaagaggtgcacagcggcgtgtgtaccgacccccagccactgaaagaacagcccgccctgaacgacagccggtactgcctgagcagcagactgagagtgtccgccaccttctggcagaacccccggaaccacttcagatgccaggtgcagttctacggcctgagcgagaacgacgagtggacccaggacagagccaagcccgtgacccagatcgtgtctgccgaagcctggggcagagccgattgcggctttaccagcgagagctaccagcagggcgtgctgagcgccaccatcctgtacgagatcctgctgggcaaggccaccctgtacgccgtgctggtgtctgccctggtgctgatggctatggtcaagcggaaggacagccgggga

SEQ ID NO: 6070 - DNA, 3360 bp, Artificial Sequence
  Synthetic Polynucloetide
atggccttaccagtgaccgccttgctcctgccgctggccttgctgctccacgccgccaggccggaggttcagctgcttgagtctggcggaggactggttcaacctggcggaagcctgagactgtcttgtgccgccagcggcttcacctttagcagctacgccatgagctgggtccgacaggctcctggcaaaggactggaatgggtgtccagcatcagcggcagcggcgactacatctactacgccgatagcgtgaagggcagattcaccatcagccgggacatcagcaagaacaccctgtacctccagatgaacagcctgagagccgaggacaccgccgtgtactactgtgccaaagaaggcaccggcgctaacagcagcctggccgattatagaggccagggcacactggtcaccgtgtctagtggcggaggaagcggcggaggatctgaagtgcaactggtggaatctggaggctctctggtgcagccagggggaagcctgagactgtcttgtgccgcttccggcttcaccttcgacgactacgccatgagctgggtgcgccaggtgccaggcaaaggcctggaatgggtgtccagcatcaactggagcggcacccacaccgattacgccgactccgtgaaaggcagattcacaatcagcagaaacaacgccaacaataccctgtacctgcagatgaactccctgaagtctgaggatacagcagtgtattattgcgccaagaactggcgggacgccggcaccacttggtttgagaaaagcggctctgccggacagggaacccaagtgacagtgtcctccggtaccggcggaggcggatctggcggcggaggtagcggtggcggaggatctgaattcgacatccagatgacacagagccctagcagcctgtctgccagcgtgggagacagagtgaccatcacatgcaaggccagcgaccacatcaacaactggctggcctggtatcagcagaagcctggacaggcccctaagctgctgatctacggcgctaccacactggaaacaggcgtgcccagcagattttctggcagcggctctggcaccgactacaccctgacaatatccagcctccagcctgaggacttcgccacctactactgtcagcagagctggaacaccccttggacattcggccagggcaccaagctggaaatcaagagactcgagatccagaaccctgatcctgccgtgtaccagctgcgggatagcaagagcagcgacaagagcgtgtgtctgttcaccgacttcgacagccagaccaacgtgtcccagagcaaggactccgacgtgtacatcaccgataagtgcgtgctggacatgcggagcatggacttcaagagcaactccgccgtggcctggtccaacaagtccgatttcgcctgcgccaacgccttcaacaacagcattatccccgaggacacattcttcccaagccccgagagcagctgcgacgtgaagctggtggaaaagagcttcgagacagacaccaacctgaacttccagaacctgagcgtgatcggcttcagaatcctgctgctgaaagtggccggctttaacctgctgatgaccctgcggctgtggtccagccgcgccaagagaagcggatctggcgtgaagcagaccctgaatttcgacctgctgaagctggctggcgacgtggaatccaacccaggccctactagtatggactggatttggcgcatccttttccttgtcggcgctgctaccggcgcgcattccttcgaacaagttcagcttcaacagcctggcgctgagctggtcaaacctggcgcttctgtgaagatgagctgcaaagccagcggctacgccttcagcagctactggatcaactggatgaagcagaaacccggccagggactcgaatggatcggccaaatctatcccggcgacggcgacaccaactacaacggcaagttcaagggcagagccacactgaccgccgatacctctagcagcacagcctacatgcagctgagcagcctgaccagcgaagatagcgccgtgtacttctgtgcccggtccatcacaacagtcgtgggctgcgctatggactattggggccagggaacaagcgtgaccgtgtctagtacgcgtgaggacctgaagaacgtgttcccacctgaggtggccgtgttcgagcctagcgaggccgagatcagccacacccagaaagccaccctcgtgtgcctggctaccggcttctaccccgaccatgtggaactgtcttggtgggtcaacggcaaagaggtgcacagcggcgtgtgtaccgacccccagccactgaaagaacagcccgccctgaacgacagccggtactgcctgagcagcagactgagagtgtccgccaccttctggcagaacccccggaaccacttcagatgccaggtgcagttctacggcctgagcgagaacgacgagtggacccaggacagagccaagcccgtgacccagatcgtgtctgccgaagcctggggcagagccgattgcggctttaccagcgagagctaccagcagggcgtgctgagcgccaccatcctgtacgagatcctgctgggcaaggccaccctgtacgccgtgctggtgtctgccctggtgctgatggctatggtcaagcggaaggacagccggggaagggccaagcgatctggatctggagcaacaaacttctcactactcaaacaagcaggtgacgtggaggagaatcccgggccttctagaggcgggatccacaccatggctacctacgaggtgctgtgcgaggtggcaagaaagctgggcaccgacgacagagaagtggtgctgttcctgctgaacgtgttcatccctcagcctacactggcccagctgatcggtgcactgagagccctgaaagaggaaggccggctgacctttcctctgctggccgaatgcctgttcagagccggaagaagggatctgctgcgggacctgctgcatctggaccccagatttctggaaagacacctggccggcaccatgagctacttcagcccttaccagctgaccgtgctgcacgttgacggcgaactgtgcgccagagatattcggagcctgatcttcctgagcaaggacaccatcggcagccggtctacccctcagacatttctgcactgggtgtactgcatggaaaacctggacctgctcggccccacagatgtggatgccctgatgtccatgctgagaagcctgagcagagtggacctccagagacaggtgcagacactgatgggactgcacctgagcggacctagccacagccagcactacagacacacccct

SEQ ID NO: 6071 - DNA, 3519 bp, Artificial Sequence
  Synthetic Polynucloetide
atggccttaccagtgaccgccttgctcctgccgctggccttgctgctccacgccgccaggccgctcgaggggaaaccaattcccaaccctcttctgggactggattcaaccggcagcggcgaggacctgaagaacgtgttcccacctgaggtggccgtgttcgagcctagcaaggccgagatcgcccacacccagaaagccaccctcgtgtgcctggctaccggcttctaccccgaccatgtggaactgtcttggtgggtcaacggcaaagaggtgcacagcggcgtgtgtaccgacccccagccactgaaagaacagcccgccctgaacgacagccggtactgcctgagcagcagactgagagtgtccgccaccttctggcagaacccccggaaccacttcagatgccaggtgcagttctacggcctgagcgagaacgacgagtggacccaggacagagccaagcccgtgacccagatcgtgtctgccgaagcctggggcagagccgattgcggcatcaccagcgccagctaccaccagggcgtgctgagcgccaccatcctgtacgagatcctgctgggcaaggccaccctgtacgccgtgctggtgtctgccctggtgctgatggctatggtcaagcggaaggacagccggggaagggccaagcgatctggatctggagcaacaaacttctcactactcaaacaagcaggtgacgtggaggagaatcccgggcctactagcatggccttaccagtgaccgccttgctcctgccgctggccttgctgctccacgccgccaggccggaggttcagctgcttgagtctggcggaggactggttcaacctggcggaagcctgagactgtcttgtgccgccagcggcttcacctttagcagctacgccatgagctgggtccgacaggctcctggcaaaggactggaatgggtgtccagcatcagcggcagcggcgactacatctactacgccgatagcgtgaagggcagattcaccatcagccgggacatcagcaagaacaccctgtacctccagatgaacagcctgagagccgaggacaccgccgtgtactactgtgccaaagaaggcaccggcgctaacagcagcctggccgattatagaggccagggcacactggtcaccgtgtctagtggcggaggaagcggcggaggatctgaagtgcaactggtggaatctggaggctctctggtgcagccagggggaagcctgagactgtcttgtgccgcttccggcttcaccttcgacgactacgccatgagctgggtgcgccaggtgccaggcaaaggcctggaatgggtgtccagcatcaactggagcggcacccacaccgattacgccgactccgtgaaaggcagattcacaatcagcagaaacaacgccaacaataccctgtacctgcagatgaactccctgaagtctgaggatacagcagtgtattattgcgccaagaactggcgggacgccggcaccacttggtttgagaaaagcggctctgccggacagggaacccaagtgacagtgtcctccggtaccggcggaggcggatctggcggcggaggtagcggtggcggaggatctgaattcgacatccagatgacacagagccctagcagcctgtctgccagcgtgggagacagagtgaccatcacatgcaaggccagcgaccacatcaacaactggctggcctggtatcagcagaagcctggacaggcccctaagctgctgatctacggcgctaccacactggaaacaggcgtgcccagcagattttctggcagcggctctggcaccgactacaccctgacaatatccagcctccagcctgaggacttcgccacctactactgtcagcagagctggaacaccccttggacattcggccagggcaccaagctggaaatcaagagaggcggaggcggaagtggaggcggaggatctggcggcggaggctctcaagttcagcttcaacagcctggcgctgagctggtcaaacctggcgcttctgtgaagatgagctgcaaagccagcggctacgccttcagcagctactggatcaactggatgaagcagaaacccggccagggactcgaatggatcggccaaatctatcccggcgacggcgacaccaactacaacggcaagttcaagggcagagccacactgaccgccgatacctctagcagcacagcctacatgcagctgagcagcctgaccagcgaagatagcgccgtgtacttctgtgcccggtccatcacaacagtcgtgggctgcgctatggactattggggccagggaacaagcgtgaccgtgtctagtacgcgtgagcagaaactgatctcggaagaggatgggagcggcatccagaaccctgatcctgccgtgtaccagctgcgggatagcaagagcagcgacaagagcgtgtgtctgttcaccgacttcgacagccagaccaacgtgtcccagagcaaggactccgacgtgtacatcaccgataagtgcgtgctggacatgcggagcatggacttcaagagcaactccgccgtggcctggtccaacaagtccgatttcgcctgcgccaacgccttcaacaacagcattatccccgaggacacattcttcccaagcagcgacgtgccctgcgacgtgaagctggtggaaaagagcttcgagacagacaccaacctgaacttccagaacctgagcgtgatcggcttcagaatcctgctgctgaaagtggccggctttaacctgctgatgaccctgcggctgtggtccagccgcgccaagagaagcggatctggcgtgaagcagaccctgaatttcgacctgctgaagctggctggcgacgtggaatccaacccaggcccttctagaggccatatgaccgagtacaagcccacggtgcgcctcgccacccgcgacgacgtccccagggccgtacgcaccctcgccgccgcgttcgccgactaccccgccacgcgccacaccgtcgatccggaccgccacatcgagcgggtcaccgagctgcaagaactcttcctcacgcgcgtcgggctcgacatcggcaaggtgtgggtcgcggacgacggcgccgcggtggcggtctggaccacgccggagagcgtcgaagcgggggcggtgttcgccgagatcggcccgcgcatggccgagttgagcggttcccggctggccgcgcagcaacagatggaaggcctcctggcgccgcaccggcccaaggagcccgcgtggttcctggccaccgtcggcgtctcgcccgaccaccagggcaagggtctgggcagcgccgtcgtgctccccggagtggaggcggccgagcgcgccggggtgcccgccttcctggagacctccgcgccccgcaacctccccttctacgagcggctcggcttcaccgtcaccgccgacgtcgaggtgcccgaaggaccgcgcacctggtgcatgacccgcaagcccggtgcctga

SEQ ID NO: 6072 - DNA, 3522 bp, Artificial Sequence
  Synthetic Polynucloetide
atggccttaccagtgaccgccttgctcctgccgctggccttgctgctccacgccgccaggccgctcgagcagaaactgatctcggaagaggatctgggctccggcgatcgccctgatcctgccgtgtaccagctgcgggatagcaagagcagcgacaagagcgtgtgtctgttcaccgacttcgacagccagaccaacgtgtcccagagcaaggactccgacgtgtacatcaccgataagtgcgtgctggacatgcggagcatggacttcaagagcaactccgccgtggcctggtccaacaagtccgatttcgcctgcgccaacgccttcaacaacagcattatccccgaggacacattcttcccaagccccgagagcagctgcgacgtgaagctggtggaaaagagcttcgagacagacaccaacctgaacttccagaacctgagcgtgatcggcttcagaatcctgctgctgaaagtggccggctttaacctgctgatgaccctgcggctgtggtccagctctagtcgcgccaagagaagcggatctggcgtgaagcagaccctgaatttcgacctgctgaagctggctggcgacgtggaatccaacccaggccccactagcatggccttaccagtgaccgccttgctcctgccgctggccttgctgctccacgccgccaggccggaggttcagctgcttgagtctggcggaggactggttcaacctggcggaagcctgagactgtcttgtgccgccagcggcttcacctttagcagctacgccatgagctgggtccgacaggctcctggcaaaggactggaatgggtgtccagcatcagcggcagcggcgactacatctactacgccgatagcgtgaagggcagattcaccatcagccgggacatcagcaagaacaccctgtacctccagatgaacagcctgagagccgaggacaccgccgtgtactactgtgccaaagaaggcaccggcgctaacagcagcctggccgattatagaggccagggcacactggtcaccgtgtctagtggcggaggaagcggcggaggatctgaagtgcaactggtggaatctggaggctctctggtgcagccagggggaagcctgagactgtcttgtgccgcttccggcttcaccttcgacgactacgccatgagctgggtgcgccaggtgccaggcaaaggcctggaatgggtgtccagcatcaactggagcggcacccacaccgattacgccgactccgtgaaaggcagattcacaatcagcagaaacaacgccaacaataccctgtacctgcagatgaactccctgaagtctgaggatacagcagtgtattattgcgccaagaactggcgggacgccggcaccacttggtttgagaaaagcggctctgccggacagggaacccaagtgacagtgtcctccggtaccggcggaggcggatctggcggcggaggtagcggtggcggaggatctgaattcgacatccagatgacacagagccctagcagcctgtctgccagcgtgggagacagagtgaccatcacatgcaaggccagcgaccacatcaacaactggctggcctggtatcagcagaagcctggacaggcccctaagctgctgatctacggcgctaccacactggaaacaggcgtgcccagcagattttctggcagcggctctggcaccgactacaccctgacaatatccagcctccagcctgaggacttcgccacctactactgtcagcagagctggaacaccccttggacattcggccagggcaccaagctggaaatcaagagaggcggaggcggaagtggaggcggaggatctggcggcggaggctctcaagttcagcttcaacagcctggcgctgagctggtcaaacctggcgcttctgtgaagatgagctgcaaagccagcggctacgccttcagcagctactggatcaactggatgaagcagaaacccggccagggactcgaatggatcggccaaatctatcccggcgacggcgacaccaactacaacggcaagttcaagggcagagccacactgaccgccgatacctctagcagcacagcctacatgcagctgagcagcctgaccagcgaagatagcgccgtgtacttctgtgcccggtccatcacaacagtcgtgggctgcgctatggactattggggccagggaacaagcgtgaccgtgtctagtacgcgtgggaaaccaattcccaaccctcttctgggactggattcaaccggcagcggcgaggacctgaagaacgtgttcccacctgaggtggccgtgttcgagcctagcgaggccgagatcagccacacccagaaagccaccctcgtgtgcctggctaccggcttctaccccgaccatgtggaactgtcttggtgggtcaacggcaaagaggtgcacagcggcgtgtgtaccgacccccagccactgaaagaacagcccgccctgaacgacagccggtactgcctgagcagcagactgagagtgtccgccaccttctggcagaacccccggaaccacttcagatgccaggtgcagttctacggcctgagcgagaacgacgagtggacccaggacagagccaagcccgtgacccagatcgtgtctgccgaagcctggggcagagccgattgcggctttaccagcgagagctaccagcagggcgtgctgagcgccaccatcctgtacgagatcctgctgggcaaggccaccctgtacgccgtgctggtgtctgccctggtgctgatggctatggtcaagcggaaggacagccggggaagggccaagcgatctggatctggagcaacaaacttctcactactcaaacaagcaggtgacgtggaggagaatcccgggccttctagaggccatatgaccgagtacaagcccacggtgcgcctcgccacccgcgacgacgtccccagggccgtacgcaccctcgccgccgcgttcgccgactaccccgccacgcgccacaccgtcgatccggaccgccacatcgagcgggtcaccgagctgcaagaactcttcctcacgcgcgtcgggctcgacatcggcaaggtgtgggtcgcggacgacggcgccgcggtggcggtctggaccacgccggagagcgtcgaagcgggggcggtgttcgccgagatcggcccgcgcatggccgagttgagcggttcccggctggccgcgcagcaacagatggaaggcctcctggcgccgcaccggcccaaggagcccgcgtggttcctggccaccgtcggcgtctcgcccgaccaccagggcaagggtctgggcagcgccgtcgtgctccccggagtggaggcggccgagcgcgccggggtgcccgccttcctggagacctccgcgccccgcaacctccccttctacgagcggctcggcttcaccgtcaccgccgacgtcgaggtgcccgaaggaccgcgcacctggtgcatgacccgcaagcccggtgcctga

SEQ ID NO: 6073 - DNA, 3384 bp, Artificial Sequence
  Synthetic Polynucloetide
atggccttaccagtgaccgccttgctcctgccgctggccttgctgctccacgccgccaggccggaggttcagctgcttgagtctggcggaggactggttcaacctggcggaagcctgagactgtcttgtgccgccagcggcttcacctttagcagctacgccatgagctgggtccgacaggctcctggcaaaggactggaatgggtgtccagcatcagcggcagcggcgactacatctactacgccgatagcgtgaagggcagattcaccatcagccgggacatcagcaagaacaccctgtacctccagatgaacagcctgagagccgaggacaccgccgtgtactactgtgccaaagaaggcaccggcgctaacagcagcctggccgattatagaggccagggcacactggtcaccgtgtctagtggcggaggaagcggcggaggatctgaagtgcaactggtggaatctggaggctctctggtgcagccagggggaagcctgagactgtcttgtgccgcttccggcttcaccttcgacgactacgccatgagctgggtgcgccaggtgccaggcaaaggcctggaatgggtgtccagcatcaactggagcggcacccacaccgattacgccgactccgtgaaaggcagattcacaatcagcagaaacaacgccaacaataccctgtacctgcagatgaactccctgaagtctgaggatacagcagtgtattattgcgccaagaactggcgggacgccggcaccacttggtttgagaaaagcggctctgccggacagggaacccaagtgacagtgtcctccggtaccggcggaggcggatctggcggcggaggtagcggtggcggaggatctgaattcgacatccagatgacacagagccctagcagcctgtctgccagcgtgggagacagagtgaccatcacatgcaaggccagcgaccacatcaacaactggctggcctggtatcagcagaagcctggacaggcccctaagctgctgatctacggcgctaccacactggaaacaggcgtgcccagcagattttctggcagcggctctggcaccgactacaccctgacaatatccagcctccagcctgaggacttcgccacctactactgtcagcagagctggaacaccccttggacattcggccagggcaccaagctggaaatcaagagactcgaggacctgaagaacgtgttcccacctgaggtggccgtgttcgagcctagcgaggccgagatcagccacacccagaaagccaccctcgtgtgcctggctaccggcttctaccccgaccatgtggaactgtcttggtgggtcaacggcaaagaggtgcacagcggcgtgtctaccgacccccagccactgaaagaacagcccgccctgaacgacagccggtactgcctgagcagcagactgagagtgtccgccaccttctggcagaacccccggaaccacttcagatgccaggtgcagttctacggcctgagcgagaacgacgagtggacccaggacagagccaagcccgtgacccagatcgtgtctgccgaagcctggggcagagccgattgcggctttaccagcgagagctaccagcagggcgtgctgagcgccaccatcctgtacgagatcctgctgggcaaggccaccctgtacgccgtgctggtgtctgccctggtgctgatggctatggtcaagcggaaggacagccggggaagggccaagcgatctggatctggagcaacaaacttctcactactcaaacaagcaggtgacgtggaggagaatcccgggcctactagtatggactggatttggcgcatccttttccttgtcggcgctgctaccggcgcgcattccttcgaacaagttcagcttcaacagcctggcgctgagctggtcaaacctggcgcttctgtgaagatgagctgcaaagccagcggctacgccttcagcagctactggatcaactggatgaagcagaaacccggccagggactcgaatggatcggccaaatctatcccggcgacggcgacaccaactacaacggcaagttcaagggcagagccacactgaccgccgatacctctagcagcacagcctacatgcagctgagcagcctgaccagcgaagatagcgccgtgtacttctgtgcccggtccatcacaacagtcgtgggctgcgctatggactattggggccagggaacaagcgtgaccgtgtctagtacgcgtatccagaaccctgatcctgccgtgtaccagctgcgggatagcaagagcagcgacaagagcgtgtgtctgttcaccgacttcgacagccagaccaacgtgtcccagagcaaggactccgacgtgtacatcaccgataagaccgtgctggacatgcggagcatggacttcaagagcaactccgccgtggcctggtccaacaagtccgatttcgcctgcgccaacgccttcaacaacagcattatccccgaggacacattcttcccaagccccgagagcagctgcgacgtgaagctggtggaaaagagcttcgagacagacaccaacctgaacttccagaacctgagcgtgatcggcttcagaatcctgctgctgaaagtggccggctttaacctgctgatgaccctgcggctgtggtccagccgcgccaagagaagcggatctggcgtgaagcagaccctgaatttcgacctgctgaagctggctggcgacgtggaatccaacccaggcccttctagaggccatatgaccgagtacaagcccacggtgcgcctcgccacccgcgacgacgtccccagggccgtacgcaccctcgccgccgcgttcgccgactaccccgccacgcgccacaccgtcgatccggaccgccacatcgagcgggtcaccgagctgcaagaactcttcctcacgcgcgtcgggctcgacatcggcaaggtgtgggtcgcggacgacggcgccgcggtggcggtctggaccacgccggagagcgtcgaagcgggggcggtgttcgccgagatcggcccgcgcatggccgagttgagcggttcccggctggccgcgcagcaacagatggaaggcctcctggcgccgcaccggcccaaggagcccgcgtggttcctggccaccgtcggcgtctcgcccgaccaccagggcaagggtctgggcagcgccgtcgtgctccccggagtggaggcggccgagcgcgccggggtgcccgccttcctggagacctccgcgccccgcaacctccccttctacgagcggctcggcttcaccgtcaccgccgacgtcgaggtgcccgaaggaccgcgcacctggtgcatgacccgcaagcccggtgcctga

SEQ ID NO: 6074 - DNA, 3630 bp, Artificial Sequence
  Synthetic Polynucloetide
atggccttaccagtgaccgccttgctcctgccgctggccttgctgctccacgccgccaggccggaggttcagctgcttgagtctggcggaggactggttcaacctggcggaagcctgagactgtcttgtgccgccagcggcttcacctttagcagctacgccatgagctgggtccgacaggctcctggcaaaggactggaatgggtgtccagcatcagcggcagcggcgactacatctactacgccgatagcgtgaagggcagattcaccatcagccgggacatcagcaagaacaccctgtacctccagatgaacagcctgagagccgaggacaccgccgtgtactactgtgccaaagaaggcaccggcgctaacagcagcctggccgattatagaggccagggcacactggtcaccgtgtctagtggcggaggaagcggcggaggatctgaagtgcaactggtggaatctggaggctctctggtgcagccagggggaagcctgagactgtcttgtgccgcttccggcttcaccttcgacgactacgccatgagctgggtgcgccaggtgccaggcaaaggcctggaatgggtgtccagcatcaactggagcggcacccacaccgattacgccgactccgtgaaaggcagattcacaatcagcagaaacaacgccaacaataccctgtacctgcagatgaactccctgaagtctgaggatacagcagtgtattattgcgccaagaactggcgggacgccggcaccacttggtttgagaaaagcggctctgccggacagggaacccaagtgacagtgtcctccggtaccggcggaggcggatctggcggcggaggtagcggtggcggaggatctgaattcgacatccagatgacacagagccctagcagcctgtctgccagcgtgggagacagagtgaccatcacatgcaaggccagcgaccacatcaacaactggctggcctggtatcagcagaagcctggacaggcccctaagctgctgatctacggcgctaccacactggaaacaggcgtgcccagcagattttctggcagcggctctggcaccgactacaccctgacaatatccagcctccagcctgaggacttcgccacctactactgtcagcagagctggaacaccccttggacattcggccagggcaccaagctggaaatcaagagactcgaggacctgaagaacgtgttcccacctgaggtggccgtgttcgagcctagcgaggccgagatcagccacacccagaaagccaccctcgtgtgcctggctaccggcttctaccccgaccatgtggaactgtcttggtgggtcaacggcaaagaggtgcacagcggcgtgtctaccgacccccagccactgaaagaacagcccgccctgaacgacagccggtactgcctgagcagcagactgagagtgtccgccaccttctggcagaacccccggaaccacttcagatgccaggtgcagttctacggcctgagcgagaacgacgagtggacccaggacagagccaagcccgtgacccagatcgtgtctgccgaagcctggggcagagccgattgcggctttaccagcgagagctaccagcagggcgtgctgagcgccaccatcctgtacgagatcctgctgggcaaggccaccctgtacgccgtgctggtgtctgccctggtgctgatggctatggtcaagcggaaggacagccggggaagggccaagcgatctggatctggagcaacaaacttctcactactcaaacaagcaggtgacgtggaggagaatcccgggcctactagtatggactggatttggcgcatccttttccttgtcggcgctgctaccggcgcgcattccttcgaacaagttcagcttcaacagcctggcgctgagctggtcaaacctggcgcttctgtgaagatgagctgcaaagccagcggctacgccttcagcagctactggatcaactggatgaagcagaaacccggccagggactcgaatggatcggccaaatctatcccggcgacggcgacaccaactacaacggcaagttcaagggcagagccacactgaccgccgatacctctagcagcacagcctacatgcagctgagcagcctgaccagcgaagatagcgccgtgtacttctgtgcccggtccatcacaacagtcgtgggctgcgctatggactattggggccagggaacaagcgtgaccgtgtctagtacgcgtgagcagaaactgatctcggaagaggatgggagcggcaccccattcccttctctggcccctcccatcatgctgctggtggacggcaagcagcagatggtggtcgtgtgcctggtgctggatgtggccccacctggactggacagccccatctggtttagcgccggcaatggctctgccctggacgcctttacctacggcccaagccctgccaccgatggcacctggacaaatctggcccacctgagcctgcccagcgaggaactggcttcttgggagcctctcgtgtgccacacaggacctggcgctgagggacacagcagatccacccagcctatgcacctgtctggcgaggccagcaccgccagaacctgtcctcaggaacctctgagaggcacccctggcggagcactgtggctgggagtgctgagactgctgctgttcaagctgctgctgtttgacctgctgctgacctgctcctgtctgtgcgatcctgccggccctctgccttctcctgccaccaccacaagactgagagccctgggcagccacagactgcaccctgccacagagacaggcggcagagaggccacaagcagccctagaccccagcccagagacagaagatggggcgataccccccctggcagaaagcctggatctccagtccgcgccaagagaagcggatctggcgtgaagcagaccctgaatttcgacctgctgaagctggctggcgacgtggaatccaacccaggcccttctagaggccatatgaccgagtacaagcccacggtgcgcctcgccacccgcgacgacgtccccagggccgtacgcaccctcgccgccgcgttcgccgactaccccgccacgcgccacaccgtcgatccggaccgccacatcgagcgggtcaccgagctgcaagaactcttcctcacgcgcgtcgggctcgacatcggcaaggtgtgggtcgcggacgacggcgccgcggtggcggtctggaccacgccggagagcgtcgaagcgggggcggtgttcgccgagatcggcccgcgcatggccgagttgagcggttcccggctggccgcgcagcaacagatggaaggcctcctggcgccgcaccggcccaaggagcccgcgtggttcctggccaccgtcggcgtctcgcccgaccaccagggcaagggtctgggcagcgccgtcgtgctccccggagtggaggcggccgagcgcgccggggtgcccgccttcctggagacctccgcgccccgcaacctccccttctacgagcggctcggcttcaccgtcaccgccgacgtcgaggtgcccgaaggaccgcgcacctggtgcatgacccgcaagcccggtgcctga

SEQ ID NO: 6075 - DNA, 3684 bp, Artificial Sequence
  Synthetic Polynucloetide
atggccttaccagtgaccgccttgctcctgccgctggccttgctgctccacgccgccaggccgctcgaggacctgaagaacgtgttcccacctgaggtggccgtgttcgagcctagcgaggccgagatcagccacacccagaaagccaccctcgtgtgcctggctaccggcttctaccccgaccatgtggaactgtcttggtgggtcaacggcaaagaggtgcacagcggcgtgtctaccgacccccagccactgaaagaacagcccgccctgaacgacagccggtactgcctgagcagcagactgagagtgtccgccaccttctggcagaacccccggaaccacttcagatgccaggtgcagttctacggcctgagcgagaacgacgagtggacccaggacagagccaagcccgtgacccagatcgtgtctgccgaagcctggggcagagccgattgcggctttaccagcgagagctaccagcagggcgtgctgagcgccaccatcctgtacgagatcctgctgggcaaggccaccctgtacgccgtgctggtgtctgccctggtgctgatggctatggtcaagcggaaggacagccggggaagggccaagcgatctggatctggagcaacaaacttctcactactcaaacaagcaggtgacgtggaggagaatcccgggcctactagcatggccttaccagtgaccgccttgctcctgccgctggccttgctgctccacgccgccaggccggaggttcagctgcttgagtctggcggaggactggttcaacctggcggaagcctgagactgtcttgtgccgccagcggcttcacctttagcagctacgccatgagctgggtccgacaggctcctggcaaaggactggaatgggtgtccagcatcagcggcagcggcgactacatctactacgccgatagcgtgaagggcagattcaccatcagccgggacatcagcaagaacaccctgtacctccagatgaacagcctgagagccgaggacaccgccgtgtactactgtgccaaagaaggcaccggcgctaacagcagcctggccgattatagaggccagggcacactggtcaccgtgtctagtggcggaggaagcggcggaggatctgaagtgcaactggtggaatctggaggctctctggtgcagccagggggaagcctgagactgtcttgtgccgcttccggcttcaccttcgacgactacgccatgagctgggtgcgccaggtgccaggcaaaggcctggaatgggtgtccagcatcaactggagcggcacccacaccgattacgccgactccgtgaaaggcagattcacaatcagcagaaacaacgccaacaataccctgtacctgcagatgaactccctgaagtctgaggatacagcagtgtattattgcgccaagaactggcgggacgccggcaccacttggtttgagaaaagcggctctgccggacagggaacccaagtgacagtgtcctccggtaccggcggaggcggatctggcggcggaggtagcggtggcggaggatctgaattcgacatccagatgacacagagccctagcagcctgtctgccagcgtgggagacagagtgaccatcacatgcaaggccagcgaccacatcaacaactggctggcctggtatcagcagaagcctggacaggcccctaagctgctgatctacggcgctaccacactggaaacaggcgtgcccagcagattttctggcagcggctctggcaccgactacaccctgacaatatccagcctccagcctgaggacttcgccacctactactgtcagcagagctggaacaccccttggacattcggccagggcaccaagctggaaatcaagagaggcggaggcggaagtggaggcggaggatctggcggcggaggctctcaagttcagcttcaacagcctggcgctgagctggtcaaacctggcgcttctgtgaagatgagctgcaaagccagcggctacgccttcagcagctactggatcaactggatgaagcagaaacccggccagggactcgaatggatcggccaaatctatcccggcgacggcgacaccaactacaacggcaagttcaagggcagagccacactgaccgccgatacctctagcagcacagcctacatgcagctgagcagcctgaccagcgaagatagcgccgtgtacttctgtgcccggtccatcacaacagtcgtgggctgcgctatggactattggggccagggaacaagcgtgaccgtgtctagtacgcgtgagcagaaactgatctcggaagaggatctggggagcggcaccccattcccttctctggcccctcccatcatgctgctggtggacggcaagcagcagatggtggtcgtgtgcctggtgctggatgtggccccacctggactggacagccccatctggtttagcgccggcaatggctctgccctggacgcctttacctacggcccaagccctgccaccgatggcacctggacaaatctggcccacctgagcctgcccagcgaggaactggcttcttgggagcctctcgtgtgccacacaggacctggcgctgagggacacagcagatccacccagcctatgcacctgtctggcgaggccagcaccgccagaacctgtcctcaggaacctctgagaggcacccctggcggagcactgtggctgggagtgctgagactgctgctgttcaagctgctgctgtttgacctgctgctgacctgctcctgtctgtgcgatcctgccggccctctgccttctcctgccaccaccacaagactgagagccctgggcagccacagactgcaccctgccacagagacaggcggcagagaggccacaagcagccctagaccccagcccagagacagaagatggggcgataccccccctggcagaaagcctggatctccagtccgcgccaagagaagcggatctggcgtgaagcagaccctgaatttcgacctgctgaagctggctggcgacgtggaatccaacccaggcccttctagatctagaggccatatgaccgagtacaagcccacggtgcgcctcgccacccgcgacgacgtccccagggccgtacgcaccctcgccgccgcgttcgccgactaccccgccacgcgccacaccgtcgatccggaccgccacatcgagcgggtcaccgagctgcaagaactcttcctcacgcgcgtcgggctcgacatcggcaaggtgtgggtcgcggacgacggcgccgcggtggcggtctggaccacgccggagagcgtcgaagcgggggcggtgttcgccgagatcggcccgcgcatggccgagttgagcggttcccggctggccgcgcagcaacagatggaaggcctcctggcgccgcaccggcccaaggagcccgcgtggttcctggccaccgtcggcgtctcgcccgaccaccagggcaagggtctgggcagcgccgtcgtgctccccggagtggaggcggccgagcgcgccggggtgcccgccttcctggagacctccgcgccccgcaacctccccttctacgagcggctcggcttcaccgtcaccgccgacgtcgaggtgcccgaaggaccgcgcacctggtgcatgacccgcaagcccggtgcctga

SEQ ID NO: 6076 - DNA, 3495 bp, Artificial Sequence
  Synthetic Polynucloetide
atggccttaccagtgaccgccttgctcctgccgctggccttgctgctccacgccgccaggccggaggttcagctgcttgagtctggcggaggactggttcaacctggcggaagcctgagactgtcttgtgccgccagcggcttcacctttagcagctacgccatgagctgggtccgacaggctcctggcaaaggactggaatgggtgtccagcatcagcggcagcggcgactacatctactacgccgatagcgtgaagggcagattcaccatcagccgggacatcagcaagaacaccctgtacctccagatgaacagcctgagagccgaggacaccgccgtgtactactgtgccaaagaaggcaccggcgctaacagcagcctggccgattatagaggccagggcacactggtcaccgtgtctagtggcggaggaagcggcggaggatctgaagtgcaactggtggaatctggaggctctctggtgcagccagggggaagcctgagactgtcttgtgccgcttccggcttcaccttcgacgactacgccatgagctgggtgcgccaggtgccaggcaaaggcctggaatgggtgtccagcatcaactggagcggcacccacaccgattacgccgactccgtgaaaggcagattcacaatcagcagaaacaacgccaacaataccctgtacctgcagatgaactccctgaagtctgaggatacagcagtgtattattgcgccaagaactggcgggacgccggcaccacttggtttgagaaaagcggctctgccggacagggaacccaagtgacagtgtcctccggtaccggcggaggcggatctggcggcggaggtagcggtggcggaggatctgaattcgacatccagatgacacagagccctagcagcctgtctgccagcgtgggagacagagtgaccatcacatgcaaggccagcgaccacatcaacaactggctggcctggtatcagcagaagcctggacaggcccctaagctgctgatctacggcgctaccacactggaaacaggcgtgcccagcagattttctggcagcggctctggcaccgactacaccctgacaatatccagcctccagcctgaggacttcgccacctactactgtcagcagagctggaacaccccttggacattcggccagggcaccaagctggaaatcaagagactcgaggggaaaccaattcccaaccctcttctgggactggattcaaccggcagcggcgacaagcagctggacgccgacgtgtcccccaagcctaccatcttcctgccctctatcgccgagacaaagctccagaaggccggcacctacctgtgcctgctggaaaagttcttcccagatgtgattaagatccactggcaggaaaagaagtccaacaccatcctgggcagccaggaaggcaacaccatgaagaccaacgacacctacatgaagttcagctggctgaccgtgcccgagaagtccctggacaaagaacacagatgcatcgtgcggcacgaaaacaacaagaacggcgtggaccaggaaatcatcttcccacccatcaagaccgatgtgattacaatggaccccaaggacaactgctccaaggacgccaacgataccctgctgctccagctgaccaacaccagcgcctactacatgtacttgttgctgctgctgaagtccgtggtgtacttcgccatcatcacatgctgcctgctgcggagaaccgccttctgctgcaacggcgagaagtctagggccaagcgatctggatctggagcaacaaacttctcactactcaaacaagcaggtgacgtggaggagaatcccgggcctactagtatggactggatttggcgcatccttttccttgtcggcgctgctaccggcgcgcattccttcgaacaagttcagcttcaacagcctggcgctgagctggtcaaacctggcgcttctgtgaagatgagctgcaaagccagcggctacgccttcagcagctactggatcaactggatgaagcagaaacccggccagggactcgaatggatcggccaaatctatcccggcgacggcgacaccaactacaacggcaagttcaagggcagagccacactgaccgccgatacctctagcagcacagcctacatgcagctgagcagcctgaccagcgaagatagcgccgtgtacttctgtgcccggtccatcacaacagtcgtgggctgcgctatggactattggggccagggaacaagcgtgaccgtgtctagtacgcgtgagcagaaactgatctcggaagaggatgggagcggcagccagcctcacaccaagcccagcgtgttcgtgatgaagaacggcaccaacgtggcctgcctcgtgaaagagttctaccccaaggacatcaggatcaacctggtgtccagcaagaagatcaccgagttcgaccccgccatcgtgatctcccccagcggcaagtacaacgccgtgaagctggggaagtacgaggacagcaacagcgtgacctgctccgtgcagcacgacaacaagaccgtgcacagcaccgactttgaagtgaaaaccgactccaccgaccacgtgaagcccaaagagacagagaacaccaagcagcccagcaagagctgccacaagcccaaggccatcgtgcacaccgagaaagtgaacatgatgagcctgaccgtgctgggcctgcggatgctgttcgccaaaaccgtggccgtgaacttcctgctgaccgccaagctgttcttcctccgcgccaagagaagcggatctggcgtgaagcagaccctgaatttcgacctgctgaagctggctggcgacgtggaatccaacccaggcccttctagaggccatatgaccgagtacaagcccacggtgcgcctcgccacccgcgacgacgtccccagggccgtacgcaccctcgccgccgcgttcgccgactaccccgccacgcgccacaccgtcgatccggaccgccacatcgagcgggtcaccgagctgcaagaactcttcctcacgcgcgtcgggctcgacatcggcaaggtgtgggtcgcggacgacggcgccgcggtggcggtctggaccacgccggagagcgtcgaagcgggggcggtgttcgccgagatcggcccgcgcatggccgagttgagcggttcccggctggccgcgcagcaacagatggaaggcctcctggcgccgcaccggcccaaggagcccgcgtggttcctggccaccgtcggcgtctcgcccgaccaccagggcaagggtctgggcagcgccgtcgtgctccccggagtggaggcggccgagcgcgccggggtgcccgccttcctggagacctccgcgccccgcaacctccccttctacgagcggctcggcttcaccgtcaccgccgacgtcgaggtgcccgaaggaccgcgcacctggtgcatgacccgcaagcccggtgcctga

SEQ ID NO: 6077 - DNA, 2706 bp, Artificial Sequence
  Synthetic Polynucloetide
atggccttaccagtgaccgccttgctcctgccgctggccttgctgctccacgccgccaggccggaggttcagctgcttgagtctggcggaggactggttcaacctggcggaagcctgagactgtcttgtgccgccagcggcttcacctttagcagctacgccatgagctgggtccgacaggctcctggcaaaggactggaatgggtgtccagcatcagcggcagcggcgactacatctactacgccgatagcgtgaagggcagattcaccatcagccgggacatcagcaagaacaccctgtacctccagatgaacagcctgagagccgaggacaccgccgtgtactactgtgccaaagaaggcaccggcgctaacagcagcctggccgattatagaggccagggcacactggtcaccgtgtctagtggcggaggaagcggcggaggatctgaagtgcaactggtggaatctggaggctctctggtgcagccagggggaagcctgagactgtcttgtgccgcttccggcttcaccttcgacgactacgccatgagctgggtgcgccaggtgccaggcaaaggcctggaatgggtgtccagcatcaactggagcggcacccacaccgattacgccgactccgtgaaaggcagattcacaatcagcagaaacaacgccaacaataccctgtacctgcagatgaactccctgaagtctgaggatacagcagtgtattattgcgccaagaactggcgggacgccggcaccacttggtttgagaaaagcggctctgccggacagggaacccaagtgacagtgtcctccggtaccggcggaggcggatctggcggcggaggtagcggtggcggaggatctgaattcgacatccagatgacacagagccctagcagcctgtctgccagcgtgggagacagagtgaccatcacatgcaaggccagcgaccacatcaacaactggctggcctggtatcagcagaagcctggacaggcccctaagctgctgatctacggcgctaccacactggaaacaggcgtgcccagcagattttctggcagcggctctggcaccgactacaccctgacaatatccagcctccagcctgaggacttcgccacctactactgtcagcagagctggaacaccccttggacattcggccagggcaccaagctggaaatcaagagactcgagagccagcctcacaccaagcccagcgtgttcgtgatgaagaacggcaccaacgtggcctgcctcgtgaaagagttctaccccaaggacatcaggatcaacctggtgtccagcaagaagatcaccgagttcgaccccgccatcgtgatctcccccagcggcaagtacaacgccgtgaagctggggaagtacgaggacagcaacagcgtgacctgctccgtgcagcacgacaacaagaccgtgcacagcaccgactttgaagtgaaaaccgactccaccgaccacgtgaagcccaaagagacagagaacaccaagcagcccagcaagagctgccacaagcccaaggccatcgtgcacaccgagaaagtgaacatgatgagcctgaccgtgctgggcctgcggatgctgttcgccaaaaccgtggccgtgaacttcctgctgaccgccaagctgttcttcctcagggccaagcgatctggatctggagcaacaaacttctcactactcaaacaagcaggtgacgtggaggagaatcccgggcctactagtatggactggatttggcgcatccttttccttgtcggcgctgctaccggcgcgcattccttcgaacaagttcagcttcaacagcctggcgctgagctggtcaaacctggcgcttctgtgaagatgagctgcaaagccagcggctacgccttcagcagctactggatcaactggatgaagcagaaacccggccagggactcgaatggatcggccaaatctatcccggcgacggcgacaccaactacaacggcaagttcaagggcagagccacactgaccgccgatacctctagcagcacagcctacatgcagctgagcagcctgaccagcgaagatagcgccgtgtacttctgtgcccggtccatcacaacagtcgtgggctgcgctatggactattggggccagggaacaagcgtgaccgtgtctagtacgcgtgacaagcagctggacgccgacgtgtcccccaagcctaccatcttcctgccctctatcgccgagacaaagctccagaaggccggcacctacctgtgcctgctggaaaagttcttcccagatgtgattaagatccactggcaggaaaagaagtccaacaccatcctgggcagccaggaaggcaacaccatgaagaccaacgacacctacatgaagttcagctggctgaccgtgcccgagaagtccctggacaaagaacacagatgcatcgtgcggcacgaaaacaacaagaacggcgtggaccaggaaatcatcttcccacccatcaagaccgatgtgattacaatggaccccaaggacaactgctccaaggacgccaacgataccctgctgctccagctgaccaacaccagcgcctactacatgtacttgttgctgctgctgaagtccgtggtgtacttcgccatcatcacatgctgcctgctgcggagaaccgccttctgctgcaacggcgagaagtct

SEQ ID NO: 6078 - DNA, 3540 bp, Artificial Sequence
  Synthetic Polynucloetide
atggccttaccagtgaccgccttgctcctgccgctggccttgctgctccacgccgccaggccgctcgaggggaaaccaattcccaaccctcttctgggactggattcaaccggcagcggcgacaagcagctggacgccgacgtgtcccccaagcctaccatcttcctgccctctatcgccgagacaaagctccagaaggccggcacctacctgtgcctgctggaaaagttcttcccagatgtgattaagatccactggcaggaaaagaagtccaacaccatcctgggcagccaggaaggcaacaccatgaagaccaacgacacctacatgaagttcagctggctgaccgtgcccgagaagtccctggacaaagaacacagatgcatcgtgcggcacgaaaacaacaagaacggcgtggaccaggaaatcatcttcccacccatcaagaccgatgtgattacaatggaccccaaggacaactgctccaaggacgccaacgataccctgctgctccagctgaccaacaccagcgcctactacatgtacttgttgctgctgctgaagtccgtggtgtacttcgccatcatcacatgctgcctgctgcggagaaccgccttctgctgcaacggcgagaagtctagggccaagcgatctggatctggagcaacaaacttctcactactcaaacaagcaggtgacgtggaggagaatcccgggcctactagcatggccttaccagtgaccgccttgctcctgccgctggccttgctgctccacgccgccaggccggaggttcagctgcttgagtctggcggaggactggttcaacctggcggaagcctgagactgtcttgtgccgccagcggcttcacctttagcagctacgccatgagctgggtccgacaggctcctggcaaaggactggaatgggtgtccagcatcagcggcagcggcgactacatctactacgccgatagcgtgaagggcagattcaccatcagccgggacatcagcaagaacaccctgtacctccagatgaacagcctgagagccgaggacaccgccgtgtactactgtgccaaagaaggcaccggcgctaacagcagcctggccgattatagaggccagggcacactggtcaccgtgtctagtggcggaggaagcggcggaggatctgaagtgcaactggtggaatctggaggctctctggtgcagccagggggaagcctgagactgtcttgtgccgcttccggcttcaccttcgacgactacgccatgagctgggtgcgccaggtgccaggcaaaggcctggaatgggtgtccagcatcaactggagcggcacccacaccgattacgccgactccgtgaaaggcagattcacaatcagcagaaacaacgccaacaataccctgtacctgcagatgaactccctgaagtctgaggatacagcagtgtattattgcgccaagaactggcgggacgccggcaccacttggtttgagaaaagcggctctgccggacagggaacccaagtgacagtgtcctccggtaccggcggaggcggatctggcggcggaggtagcggtggcggaggatctgaattcgacatccagatgacacagagccctagcagcctgtctgccagcgtgggagacagagtgaccatcacatgcaaggccagcgaccacatcaacaactggctggcctggtatcagcagaagcctggacaggcccctaagctgctgatctacggcgctaccacactggaaacaggcgtgcccagcagattttctggcagcggctctggcaccgactacaccctgacaatatccagcctccagcctgaggacttcgccacctactactgtcagcagagctggaacaccccttggacattcggccagggcaccaagctggaaatcaagagaggcggaggcggaagtggaggcggaggatctggcggcggaggctctcaagttcagcttcaacagcctggcgctgagctggtcaaacctggcgcttctgtgaagatgagctgcaaagccagcggctacgccttcagcagctactggatcaactggatgaagcagaaacccggccagggactcgaatggatcggccaaatctatcccggcgacggcgacaccaactacaacggcaagttcaagggcagagccacactgaccgccgatacctctagcagcacagcctacatgcagctgagcagcctgaccagcgaagatagcgccgtgtacttctgtgcccggtccatcacaacagtcgtgggctgcgctatggactattggggccagggaacaagcgtgaccgtgtctagtacgcgtgagcagaaactgatctcggaagaggatgggagcggcagccagcctcacaccaagcccagcgtgttcgtgatgaagaacggcaccaacgtggcctgcctcgtgaaagagttctaccccaaggacatcaggatcaacctggtgtccagcaagaagatcaccgagttcgaccccgccatcgtgatctcccccagcggcaagtacaacgccgtgaagctggggaagtacgaggacagcaacagcgtgacctgctccgtgcagcacgacaacaagaccgtgcacagcaccgactttgaagtgaaaaccgactccaccgaccacgtgaagcccaaagagacagagaacaccaagcagcccagcaagagctgccacaagcccaaggccatcgtgcacaccgagaaagtgaacatgatgagcctgaccgtgctgggcctgcggatgctgttcgccaaaaccgtggccgtgaacttcctgctgaccgccaagctgttcttcctccgcgccaagagaagcggatctggcgtgaagcagaccctgaatttcgacctgctgaagctggctggcgacgtggaatccaacccaggcccttctagaggccatatgaccgagtacaagcccacggtgcgcctcgccacccgcgacgacgtccccagggccgtacgcaccctcgccgccgcgttcgccgactaccccgccacgcgccacaccgtcgatccggaccgccacatcgagcgggtcaccgagctgcaagaactcttcctcacgcgcgtcgggctcgacatcggcaaggtgtgggtcgcggacgacggcgccgcggtggcggtctggaccacgccggagagcgtcgaagcgggggcggtgttcgccgagatcggcccgcgcatggccgagttgagcggttcccggctggccgcgcagcaacagatggaaggcctcctggcgccgcaccggcccaaggagcccgcgtggttcctggccaccgtcggcgtctcgcccgaccaccagggcaagggtctgggcagcgccgtcgtgctccccggagtggaggcggccgagcgcgccggggtgcccgccttcctggagacctccgcgccccgcaacctccccttctacgagcggctcggcttcaccgtcaccgccgacgtcgaggtgcccgaaggaccgcgcacctggtgcatgacccgcaagcccggtgcctga

SEQ ID NO: 6079 - DNA, 3915 bp, Artificial Sequence
  Synthetic Polynucloetide
atggccttaccagtgaccgccttgctcctgccgctggccttgctgctccacgccgccaggccggaggttcagctgcttgagtctggcggaggactggttcaacctggcggaagcctgagactgtcttgtgccgccagcggcttcacctttagcagctacgccatgagctgggtccgacaggctcctggcaaaggactggaatgggtgtccagcatcagcggcagcggcgactacatctactacgccgatagcgtgaagggcagattcaccatcagccgggacatcagcaagaacaccctgtacctccagatgaacagcctgagagccgaggacaccgccgtgtactactgtgccaaagaaggcaccggcgctaacagcagcctggccgattatagaggccagggcacactggtcaccgtgtctagtggcggaggaagcggcggaggatctgaagtgcaactggtggaatctggaggctctctggtgcagccagggggaagcctgagactgtcttgtgccgcttccggcttcaccttcgacgactacgccatgagctgggtgcgccaggtgccaggcaaaggcctggaatgggtgtccagcatcaactggagcggcacccacaccgattacgccgactccgtgaaaggcagattcacaatcagcagaaacaacgccaacaataccctgtacctgcagatgaactccctgaagtctgaggatacagcagtgtattattgcgccaagaactggcgggacgccggcaccacttggtttgagaaaagcggctctgccggacagggaacccaagtgacagtgtcctccggtaccggcggaggcggatctggcggcggaggtagcggtggcggaggatctgaattcgacatccagatgacacagagccctagcagcctgtctgccagcgtgggagacagagtgaccatcacatgcaaggccagcgaccacatcaacaactggctggcctggtatcagcagaagcctggacaggcccctaagctgctgatctacggcgctaccacactggaaacaggcgtgcccagcagattttctggcagcggctctggcaccgactacaccctgacaatatccagcctccagcctgaggacttcgccacctactactgtcagcagagctggaacaccccttggacattcggccagggcaccaagctggaaatcaagagaggacagcctaaggccaatcctaccgtgacactgttccctccaagcagcgaagaactccaggccaacaaggccacacttgtgtgcctgatctccgacttctaccctggggctgtgacagtggcttggaaggccgatggatctcctgtgaaagccggcgtggaaaccaccaagccatccaagcagagcaacaacaaatacgccgccagctcctacctgagcctgacacctgagcagtggaagtcccacagatcctacagctgccaagtgacccacgaaggcagcaccgtggaaaagacagtggcccctacagagtgcagcggatcccagagcttcggcctgctggaccccaagctgtgctacctgctggatggcatcctgttcatctacggcgtgatcctgaccgccctgttcctgagagtgaagttcagcagaagcgccgacgcccctgcctaccagcagggacagaaccaactgtacaacgagctgaacctgggcagacgggaagagtacgacgtgctggacaagcggagaggcagggaccctgagatgggcggaaagccccagcggagaaagaacccccaggaaggactgtataacgaactccagaaagacaagatggccgaagcctacagcgagatcggcatgaagggcgagcggagaagaggcaagggccacgatggcctgtaccagggcctgagcaccgccaccaaggacacctatgacgccctgcacatgcaggccctgcctccaagaagggccaagcgatctggatctggagcaacaaacttctcactactcaaacaagcaggtgacgtggaggagaatcccgggcctactagtatggactggatttggcgcatccttttccttgtcggcgctgctaccggcgcgcattccttcgaacaagttcagcttcaacagcctggcgctgagctggtcaaacctggcgcttctgtgaagatgagctgcaaagccagcggctacgccttcagcagctactggatcaactggatgaagcagaaacccggccagggactcgaatggatcggccaaatctatcccggcgacggcgacaccaactacaacggcaagttcaagggcagagccacactgaccgccgatacctctagcagcacagcctacatgcagctgagcagcctgaccagcgaagatagcgccgtgtacttctgtgcccggtccatcacaacagtcgtgggctgcgctatggactattggggccagggaacaagcgtgaccgtgtctagtgcctctacaaagggaccctccgtgtttcctctggctcccagcagcaagtctacaagcggaggaacagccgctctgggctgcctggtcaaggattactttcccgagcctgtgaccgtgtcctggaatagcggagcactgacaagcggcgtgcacacctttccagccgtgctgcaaagcagcggcctgtactctctgagcagcgtggtcacagtgcctagctctagcctgggcacccagacctacatctgcaatgtgaaccacaagcctagcaacaccaaggtggacaagagagtggaacccaagagctgtggtacccagagttttgggttgttggaccctaaattgtgctatctgttggacggaatcctgttcatttacggagtgatcctgaccgcattgttcctgcgggttaagttttccagatccgcagacgcacccgcttaccaacaagggcagaaccaactctacaatgaacttaatttggggcggagggaagagtacgacgttctggacaaaaggaggggacgagatcccgagatgggcggaaagcctcagcgaaggaagaatccgcaagaggggctttataacgaactccagaaagataaaatggcagaagcctatagtgagattgggatgaagggagaaaggaggaggggtaaaggtcacgatgggttgtaccaaggattgagcacagccactaaagatacctatgatgcgctccacatgcaggccctgccgccaagacgcgccaagagaagcggatctggcgtgaagcagaccctgaatttcgacctgctgaagctggctggcgacgtggaatccaacccaggcccttctagaggccatatgaccgagtacaagcccacggtgcgcctcgccacccgcgacgacgtccccagggccgtacgcaccctcgccgccgcgttcgccgactaccccgccacgcgccacaccgtcgatccggaccgccacatcgagcgggtcaccgagctgcaagaactcttcctcacgcgcgtcgggctcgacatcggcaaggtgtgggtcgcggacgacggcgccgcggtggcggtctggaccacgccggagagcgtcgaagcgggggcggtgttcgccgagatcggcccgcgcatggccgagttgagcggttcccggctggccgcgcagcaacagatggaaggcctcctggcgccgcaccggcccaaggagcccgcgtggttcctggccaccgtcggcgtctcgcccgaccaccagggcaagggtctgggcagcgccgtcgtgctccccggagtggaggcggccgagcgcgccggggtgcccgccttcctggagacctccgcgccccgcaacctccccttctacgagcggctcggcttcaccgtcaccgccgacgtcgaggtgcccgaaggaccgcgcacctggtgcatgacccgcaagcccggtgcctga

SEQ ID NO: 6080 - DNA, 3270 bp, Artificial Sequence
  Synthetic Polynucloetide
atggccttaccagtgaccgccttgctcctgccgctggccttgctgctccacgccgccaggccggaggttcagctgcttgagtctggcggaggactggttcaacctggcggaagcctgagactgtcttgtgccgccagcggcttcacctttagcagctacgccatgagctgggtccgacaggctcctggcaaaggactggaatgggtgtccagcatcagcggcagcggcgactacatctactacgccgatagcgtgaagggcagattcaccatcagccgggacatcagcaagaacaccctgtacctccagatgaacagcctgagagccgaggacaccgccgtgtactactgtgccaaagaaggcaccggcgctaacagcagcctggccgattatagaggccagggcacactggtcaccgtgtctagtggcggaggaagcggcggaggatctgaagtgcaactggtggaatctggaggctctctggtgcagccagggggaagcctgagactgtcttgtgccgcttccggcttcaccttcgacgactacgccatgagctgggtgcgccaggtgccaggcaaaggcctggaatgggtgtccagcatcaactggagcggcacccacaccgattacgccgactccgtgaaaggcagattcacaatcagcagaaacaacgccaacaataccctgtacctgcagatgaactccctgaagtctgaggatacagcagtgtattattgcgccaagaactggcgggacgccggcaccacttggtttgagaaaagcggctctgccggacagggaacccaagtgacagtgtcctccggtaccggcggaggcggatctggcggcggaggtagcggtggcggaggatctgaattcgacatccagatgacacagagccctagcagcctgtctgccagcgtgggagacagagtgaccatcacatgcaaggccagcgaccacatcaacaactggctggcctggtatcagcagaagcctggacaggcccctaagctgctgatctacggcgctaccacactggaaacaggcgtgcccagcagattttctggcagcggctctggcaccgactacaccctgacaatatccagcctccagcctgaggacttcgccacctactactgtcagcagagctggaacaccccttggacattcggccagggcaccaagctggaaatcaagagactcgaggacctgaagaacgtgttcccacctgaggtggccgtgttcgagcctagcgaggccgagatcagccacacccagaaagccaccctcgtgtgcctggctaccggcttctaccccgaccatgtggaactgtcttggtgggtcaacggcaaagaggtgcacagcggcgtgtctaccgacccccagccactgaaagaacagcccgccctgaacgacagccggtactgcctgagcagcagactgagagtgtccgccaccttctggcagaacccccggaaccacttcagatgccaggtgcagttctacggcctgagcgagaacgacgagtggacccaggacagagccaagcccgtgacccagatcgtgtctgccgaagcctggggcagagccgattgcggatcccagagcttcggcctgctggaccccaagctgtgctacctgctggatggcatcctgttcatctacggcgtgatcctgaccgccctgttcctgagagtgaagttcagcagaagcgccgacgcccctgcctaccagcagggacagaaccaactgtacaacgagctgaacctgggcagacgggaagagtacgacgtgctggacaagcggagaggcagggaccctgagatgggcggaaagccccagcggagaaagaacccccaggaaggactgtataacgaactccagaaagacaagatggccgaagcctacagcgagatcggcatgaagggcgagcggagaagaggcaagggccacgatggcctgtaccagggcctgagcaccgccaccaaggacacctatgacgccctgcacatgcaggccctgcctccaagaagggccaagcgatctggatctggagcaacaaacttctcactactcaaacaagcaggtgacgtggaggagaatcccgggcctactagtatggactggatttggcgcatccttttccttgtcggcgctgctaccggcgcgcattccttcgaacaagttcagcttcaacagcctggcgctgagctggtcaaacctggcgcttctgtgaagatgagctgcaaagccagcggctacgccttcagcagctactggatcaactggatgaagcagaaacccggccagggactcgaatggatcggccaaatctatcccggcgacggcgacaccaactacaacggcaagttcaagggcagagccacactgaccgccgatacctctagcagcacagcctacatgcagctgagcagcctgaccagcgaagatagcgccgtgtacttctgtgcccggtccatcacaacagtcgtgggctgcgctatggactattggggccagggaacaagcgtgaccgtgtctagtacgcgtatccagaaccctgatcctgccgtgtaccagctgcgggatagcaagagcagcgacaagagcgtgtgtctgttcaccgacttcgacagccagaccaacgtgtcccagagcaaggactccgacgtgtacatcaccgataagaccgtgctggacatgcggagcatggacttcaagagcaactccgccgtggcctggtccaacaagtccgatttcgcctgcgccaacgccttcaacaacagcattatccccgaggacacattcttcccaagccccgagagcagctgcggtacccagagttttgggttgttggaccctaaattgtgctatctgttggacggaatcctgttcatttacggagtgatcctgaccgcattgttcctgcgggttaagttttccagatccgcagacgcacccgcttaccaacaagggcagaaccaactctacaatgaacttaatttggggcggagggaagagtacgacgttctggacaaaaggaggggacgagatcccgagatgggcggaaagcctcagcgaaggaagaatccgcaagaggggctttataacgaactccagaaagataaaatggcagaagcctatagtgagattgggatgaagggagaaaggaggaggggtaaaggtcacgatgggttgtaccaaggattgagcacagccactaaagatacctatgatgcgctccacatgcaggccctgccgccaaga

SEQ ID NO: 6081 - DNA, 3270 bp, Artificial Sequence
  Synthetic Polynucloetide
atggccttaccagtgaccgccttgctcctgccgctggccttgctgctccacgccgccaggccggaggttcagctgcttgagtctggcggaggactggttcaacctggcggaagcctgagactgtcttgtgccgccagcggcttcacctttagcagctacgccatgagctgggtccgacaggctcctggcaaaggactggaatgggtgtccagcatcagcggcagcggcgactacatctactacgccgatagcgtgaagggcagattcaccatcagccgggacatcagcaagaacaccctgtacctccagatgaacagcctgagagccgaggacaccgccgtgtactactgtgccaaagaaggcaccggcgctaacagcagcctggccgattatagaggccagggcacactggtcaccgtgtctagtggcggaggaagcggcggaggatctgaagtgcaactggtggaatctggaggctctctggtgcagccagggggaagcctgagactgtcttgtgccgcttccggcttcaccttcgacgactacgccatgagctgggtgcgccaggtgccaggcaaaggcctggaatgggtgtccagcatcaactggagcggcacccacaccgattacgccgactccgtgaaaggcagattcacaatcagcagaaacaacgccaacaataccctgtacctgcagatgaactccctgaagtctgaggatacagcagtgtattattgcgccaagaactggcgggacgccggcaccacttggtttgagaaaagcggctctgccggacagggaacccaagtgacagtgtcctccggtaccggcggaggcggatctggcggcggaggtagcggtggcggaggatctgaattcgacatccagatgacacagagccctagcagcctgtctgccagcgtgggagacagagtgaccatcacatgcaaggccagcgaccacatcaacaactggctggcctggtatcagcagaagcctggacaggcccctaagctgctgatctacggcgctaccacactggaaacaggcgtgcccagcagattttctggcagcggctctggcaccgactacaccctgacaatatccagcctccagcctgaggacttcgccacctactactgtcagcagagctggaacaccccttggacattcggccagggcaccaagctggaaatcaagagactcgaggacctgaagaacgtgttcccacctgaggtggccgtgttcgagcctagcaaggccgagatcgcccacacccagaaagccaccctcgtgtgcctggctaccggcttctaccccgaccatgtggaactgtcttggtgggtcaacggcaaagaggtgcacagcggcgtgtgtaccgacccccagccactgaaagaacagcccgccctgaacgacagccggtactgcctgagcagcagactgagagtgtccgccaccttctggcagaacccccggaaccacttcagatgccaggtgcagttctacggcctgagcgagaacgacgagtggacccaggacagagccaagcccgtgacccagatcgtgtctgccgaagcctggggcagagccgattgcggatcccagagcttcggcctgctggaccccaagctgtgctacctgctggatggcatcctgttcatctacggcgtgatcctgaccgccctgttcctgagagtgaagttcagcagaagcgccgacgcccctgcctaccagcagggacagaaccaactgtacaacgagctgaacctgggcagacgggaagagtacgacgtgctggacaagcggagaggcagggaccctgagatgggcggaaagccccagcggagaaagaacccccaggaaggactgtataacgaactccagaaagacaagatggccgaagcctacagcgagatcggcatgaagggcgagcggagaagaggcaagggccacgatggcctgtaccagggcctgagcaccgccaccaaggacacctatgacgccctgcacatgcaggccctgcctccaagaagggccaagcgatctggatctggagcaacaaacttctcactactcaaacaagcaggtgacgtggaggagaatcccgggcctactagtatggactggatttggcgcatccttttccttgtcggcgctgctaccggcgcgcattccttcgaacaagttcagcttcaacagcctggcgctgagctggtcaaacctggcgcttctgtgaagatgagctgcaaagccagcggctacgccttcagcagctactggatcaactggatgaagcagaaacccggccagggactcgaatggatcggccaaatctatcccggcgacggcgacaccaactacaacggcaagttcaagggcagagccacactgaccgccgatacctctagcagcacagcctacatgcagctgagcagcctgaccagcgaagatagcgccgtgtacttctgtgcccggtccatcacaacagtcgtgggctgcgctatggactattggggccagggaacaagcgtgaccgtgtctagtacgcgtatccagaaccctgatcctgccgtgtaccagctgcgggatagcaagagcagcgacaagagcgtgtgtctgttcaccgacttcgacagccagaccaacgtgtcccagagcaaggactccgacgtgtacatcaccgataagtgcgtgctggacatgcggagcatggacttcaagagcaactccgccgtggcctggtccaacaagtccgatttcgcctgcgccaacgccttcaacaacagcattatccccgaggacacattcttcccaagcagcgacgtgccctgcggtacccagagttttgggttgttggaccctaaattgtgctatctgttggacggaatcctgttcatttacggagtgatcctgaccgcattgttcctgcgggttaagttttccagatccgcagacgcacccgcttaccaacaagggcagaaccaactctacaatgaacttaatttggggcggagggaagagtacgacgttctggacaaaaggaggggacgagatcccgagatgggcggaaagcctcagcgaaggaagaatccgcaagaggggctttataacgaactccagaaagataaaatggcagaagcctatagtgagattgggatgaagggagaaaggaggaggggtaaaggtcacgatgggttgtaccaaggattgagcacagccactaaagatacctatgatgcgctccacatgcaggccctgccgccaaga

SEQ ID NO: 6082 - DNA, 3483 bp, Artificial Sequence
  Synthetic Polynucloetide
atggccttaccagtgaccgccttgctcctgccgctggccttgctgctccacgccgccaggccggaggttcagctgcttgagtctggcggaggactggttcaacctggcggaagcctgagactgtcttgtgccgccagcggcttcacctttagcagctacgccatgagctgggtccgacaggctcctggcaaaggactggaatgggtgtccagcatcagcggcagcggcgactacatctactacgccgatagcgtgaagggcagattcaccatcagccgggacatcagcaagaacaccctgtacctccagatgaacagcctgagagccgaggacaccgccgtgtactactgtgccaaagaaggcaccggcgctaacagcagcctggccgattatagaggccagggcacactggtcaccgtgtctagtggcggaggaagcggcggaggatctgaagtgcaactggtggaatctggaggctctctggtgcagccagggggaagcctgagactgtcttgtgccgcttccggcttcaccttcgacgactacgccatgagctgggtgcgccaggtgccaggcaaaggcctggaatgggtgtccagcatcaactggagcggcacccacaccgattacgccgactccgtgaaaggcagattcacaatcagcagaaacaacgccaacaataccctgtacctgcagatgaactccctgaagtctgaggatacagcagtgtattattgcgccaagaactggcgggacgccggcaccacttggtttgagaaaagcggctctgccggacagggaacccaagtgacagtgtcctccggtaccggcggaggcggatctggcggcggaggtagcggtggcggaggatctgaattcgacatccagatgacacagagccctagcagcctgtctgccagcgtgggagacagagtgaccatcacatgcaaggccagcgaccacatcaacaactggctggcctggtatcagcagaagcctggacaggcccctaagctgctgatctacggcgctaccacactggaaacaggcgtgcccagcagattttctggcagcggctctggcaccgactacaccctgacaatatccagcctccagcctgaggacttcgccacctactactgtcagcagagctggaacaccccttggacattcggccagggcaccaagctggaaatcaagagactcgaggggaaaccaattcccaaccctcttctgggactggattcaaccggcagcggcgaggacctgaagaacgtgttcccacctgaggtggccgtgttcgagcctagcgaggccgagatcagccacacccagaaagccaccctcgtgtgcctggctaccggcttctaccccgaccatgtggaactgtcttggtgggtcaacggcaaagaggtgcacagcggcgtgtctaccgacccccagccactgaaagaacagcccgccctgaacgacagccggtactgcctgagcagcagactgagagtgtccgccaccttctggcagaacccccggaaccacttcagatgccaggtgcagttctacggcctgagcgagaacgacgagtggacccaggacagagccaagcccgtgacccagatcgtgtctgccgaagcctggggcagagccgattgcggatcccagagcttcggcctgctggaccccaagctgtgctacctgctggatggcatcctgttcatctacggcgtgatcctgaccgccctgttcctgagagtgaagttcagcagaagcgccgacgcccctgcctaccagcagggacagaaccaactgtacaacgagctgaacctgggcagacgggaagagtacgacgtgctggacaagcggagaggcagggaccctgagatgggcggaaagccccagcggagaaagaacccccaggaaggactgtataacgaactccagaaagacaagatggccgaagcctacagcgagatcggcatgaagggcgagcggagaagaggcaagggccacgatggcctgtaccagggcctgagcaccgccaccaaggacacctatgacgccctgcacatgcaggccctgcctccaagaagggccaagcgatctggatctggagcaacaaacttctcactactcaaacaagcaggtgacgtggaggagaatcccgggcctactagtatggactggatttggcgcatccttttccttgtcggcgctgctaccggcgcgcattccttcgaacaagttcagcttcaacagcctggcgctgagctggtcaaacctggcgcttctgtgaagatgagctgcaaagccagcggctacgccttcagcagctactggatcaactggatgaagcagaaacccggccagggactcgaatggatcggccaaatctatcccggcgacggcgacaccaactacaacggcaagttcaagggcagagccacactgaccgccgatacctctagcagcacagcctacatgcagctgagcagcctgaccagcgaagatagcgccgtgtacttctgtgcccggtccatcacaacagtcgtgggctgcgctatggactattggggccagggaacaagcgtgaccgtgtctagtacgcgtgagcagaaactgatctcggaagaggatgggagcggcatccagaaccctgatcctgccgtgtaccagctgcgggatagcaagagcagcgacaagagcgtgtgtctgttcaccgacttcgacagccagaccaacgtgtcccagagcaaggactccgacgtgtacatcaccgataagaccgtgctggacatgcggagcatggacttcaagagcaactccgccgtggcctggtccaacaagtccgatttcgcctgcgccaacgccttcaacaacagcattatccccgaggacacattcttcccaagccccgagagcagctgcggtacccagagttttgggttgttggaccctaaattgtgctatctgttggacggaatcctgttcatttacggagtgatcctgaccgcattgttcctgaggagcaagcggtcacggctgctccacagcgattacatgaatatgacaccacgaagaccgggtcctactcgcaaacactaccaaccctacgcacctccccgcgactttgcagcgtaccgatctcgggttaagttttccagatccgcagacgcacccgcttaccaacaagggcagaaccaactctacaatgaacttaatttggggcggagggaagagtacgacgttctggacaaaaggaggggacgagatcccgagatgggcggaaagcctcagcgaaggaagaatccgcaagaggggctttataacgaactccagaaagataaaatggcagaagcctatagtgagattgggatgaagggagaaaggaggaggggtaaaggtcacgatgggttgtaccaaggattgagcacagccactaaagatacctatgatgcgctccacatgcaggccctgccgccaaga

SEQ ID NO: 6083 - DNA, 3606 bp, Artificial Sequence
  Synthetic Polynucloetide
atggccttaccagtgaccgccttgctcctgccgctggccttgctgctccacgccgccaggccggaggttcagctgcttgagtctggcggaggactggttcaacctggcggaagcctgagactgtcttgtgccgccagcggcttcacctttagcagctacgccatgagctgggtccgacaggctcctggcaaaggactggaatgggtgtccagcatcagcggcagcggcgactacatctactacgccgatagcgtgaagggcagattcaccatcagccgggacatcagcaagaacaccctgtacctccagatgaacagcctgagagccgaggacaccgccgtgtactactgtgccaaagaaggcaccggcgctaacagcagcctggccgattatagaggccagggcacactggtcaccgtgtctagtggcggaggaagcggcggaggatctgaagtgcaactggtggaatctggaggctctctggtgcagccagggggaagcctgagactgtcttgtgccgcttccggcttcaccttcgacgactacgccatgagctgggtgcgccaggtgccaggcaaaggcctggaatgggtgtccagcatcaactggagcggcacccacaccgattacgccgactccgtgaaaggcagattcacaatcagcagaaacaacgccaacaataccctgtacctgcagatgaactccctgaagtctgaggatacagcagtgtattattgcgccaagaactggcgggacgccggcaccacttggtttgagaaaagcggctctgccggacagggaacccaagtgacagtgtcctccggtaccggcggaggcggatctggcggcggaggtagcggtggcggaggatctgaattcgacatccagatgacacagagccctagcagcctgtctgccagcgtgggagacagagtgaccatcacatgcaaggccagcgaccacatcaacaactggctggcctggtatcagcagaagcctggacaggcccctaagctgctgatctacggcgctaccacactggaaacaggcgtgcccagcagattttctggcagcggctctggcaccgactacaccctgacaatatccagcctccagcctgaggacttcgccacctactactgtcagcagagctggaacaccccttggacattcggccagggcaccaagctggaaatcaagagactcgaggggaaaccaattcccaaccctcttctgggactggattcaaccggcagcggcgaggacctgaagaacgtgttcccacctgaggtggccgtgttcgagcctagcgaggccgagatcagccacacccagaaagccaccctcgtgtgcctggctaccggcttctaccccgaccatgtggaactgtcttggtgggtcaacggcaaagaggtgcacagcggcgtgtctaccgacccccagccactgaaagaacagcccgccctgaacgacagccggtactgcctgagcagcagactgagagtgtccgccaccttctggcagaacccccggaaccacttcagatgccaggtgcagttctacggcctgagcgagaacgacgagtggacccaggacagagccaagcccgtgacccagatcgtgtctgccgaagcctggggcagagccgattgcggatcccagagcttcggcctgctggaccccaagctgtgctacctgctggatggcatcctgttcatctacggcgtgatcctgaccgccctgttcctgaggagtaagaggagcaggctcctgcacagtgactacatgaacatgactccacgccgccccggacccacccgcaagcattaccagccctatgccccaccacgcgacttcgcagcctatcgctccagagtgaagttcagcagaagcgccgacgcccctgcctaccagcagggacagaaccaactgtacaacgagctgaacctgggcagacgggaagagtacgacgtgctggacaagcggagaggcagggaccctgagatgggcggaaagccccagcggagaaagaacccccaggaaggactgtataacgaactccagaaagacaagatggccgaagcctacagcgagatcggcatgaagggcgagcggagaagaggcaagggccacgatggcctgtaccagggcctgagcaccgccaccaaggacacctatgacgccctgcacatgcaggccctgcctccaagaagggccaagcgatctggatctggagcaacaaacttctcactactcaaacaagcaggtgacgtggaggagaatcccgggcctactagtatggactggatttggcgcatccttttccttgtcggcgctgctaccggcgcgcattccttcgaacaagttcagcttcaacagcctggcgctgagctggtcaaacctggcgcttctgtgaagatgagctgcaaagccagcggctacgccttcagcagctactggatcaactggatgaagcagaaacccggccagggactcgaatggatcggccaaatctatcccggcgacggcgacaccaactacaacggcaagttcaagggcagagccacactgaccgccgatacctctagcagcacagcctacatgcagctgagcagcctgaccagcgaagatagcgccgtgtacttctgtgcccggtccatcacaacagtcgtgggctgcgctatggactattggggccagggaacaagcgtgaccgtgtctagtacgcgtgagcagaaactgatctcggaagaggatgggagcggcatccagaaccctgatcctgccgtgtaccagctgcgggatagcaagagcagcgacaagagcgtgtgtctgttcaccgacttcgacagccagaccaacgtgtcccagagcaaggactccgacgtgtacatcaccgataagaccgtgctggacatgcggagcatggacttcaagagcaactccgccgtggcctggtccaacaagtccgatttcgcctgcgccaacgccttcaacaacagcattatccccgaggacacattcttcccaagccccgagagcagctgcggtacccagagttttgggttgttggaccctaaattgtgctatctgttggacggaatcctgttcatttacggagtgatcctgaccgcattgttcctgaggagcaagcggtcacggctgctccacagcgattacatgaatatgacaccacgaagaccgggtcctactcgcaaacactaccaaccctacgcacctccccgcgactttgcagcgtaccgatctcgggttaagttttccagatccgcagacgcacccgcttaccaacaagggcagaaccaactctacaatgaacttaatttggggcggagggaagagtacgacgttctggacaaaaggaggggacgagatcccgagatgggcggaaagcctcagcgaaggaagaatccgcaagaggggctttataacgaactccagaaagataaaatggcagaagcctatagtgagattgggatgaagggagaaaggaggaggggtaaaggtcacgatgggttgtaccaaggattgagcacagccactaaagatacctatgatgcgctccacatgcaggccctgccgccaaga

SEQ ID NO: 6084 - DNA, 3489 bp, Artificial Sequence
  Synthetic Polynucloetide
atggccttaccagtgaccgccttgctcctgccgctggccttgctgctccacgccgccaggccggaggttcagctgcttgagtctggcggaggactggttcaacctggcggaagcctgagactgtcttgtgccgccagcggcttcacctttagcagctacgccatgagctgggtccgacaggctcctggcaaaggactggaatgggtgtccagcatcagcggcagcggcgactacatctactacgccgatagcgtgaagggcagattcaccatcagccgggacatcagcaagaacaccctgtacctccagatgaacagcctgagagccgaggacaccgccgtgtactactgtgccaaagaaggcaccggcgctaacagcagcctggccgattatagaggccagggcacactggtcaccgtgtctagtggcggaggaagcggcggaggatctgaagtgcaactggtggaatctggaggctctctggtgcagccagggggaagcctgagactgtcttgtgccgcttccggcttcaccttcgacgactacgccatgagctgggtgcgccaggtgccaggcaaaggcctggaatgggtgtccagcatcaactggagcggcacccacaccgattacgccgactccgtgaaaggcagattcacaatcagcagaaacaacgccaacaataccctgtacctgcagatgaactccctgaagtctgaggatacagcagtgtattattgcgccaagaactggcgggacgccggcaccacttggtttgagaaaagcggctctgccggacagggaacccaagtgacagtgtcctccggtaccggcggaggcggatctggcggcggaggtagcggtggcggaggatctgaattcgacatccagatgacacagagccctagcagcctgtctgccagcgtgggagacagagtgaccatcacatgcaaggccagcgaccacatcaacaactggctggcctggtatcagcagaagcctggacaggcccctaagctgctgatctacggcgctaccacactggaaacaggcgtgcccagcagattttctggcagcggctctggcaccgactacaccctgacaatatccagcctccagcctgaggacttcgccacctactactgtcagcagagctggaacaccccttggacattcggccagggcaccaagctggaaatcaagagactcgaggggaaaccaattcccaaccctcttctgggactggattcaaccggcagcggcgaggacctgaagaacgtgttcccacctgaggtggccgtgttcgagcctagcgaggccgagatcagccacacccagaaagccaccctcgtgtgcctggctaccggcttctaccccgaccatgtggaactgtcttggtgggtcaacggcaaagaggtgcacagcggcgtgtctaccgacccccagccactgaaagaacagcccgccctgaacgacagccggtactgcctgagcagcagactgagagtgtccgccaccttctggcagaacccccggaaccacttcagatgccaggtgcagttctacggcctgagcgagaacgacgagtggacccaggacagagccaagcccgtgacccagatcgtgtctgccgaagcctggggcagagccgattgcggatcccagagcttcggcctgctggaccccaagctgtgctacctgctggatggcatcctgttcatctacggcgtgatcctgaccgccctgttcctgagagtgaagttcagcagaagcgccgacgcccctgcctaccagcagggacagaaccaactgtacaacgagctgaacctgggcagacgggaagagtacgacgtgctggacaagcggagaggcagggaccctgagatgggcggaaagccccagcggagaaagaacccccaggaaggactgtataacgaactccagaaagacaagatggccgaagcctacagcgagatcggcatgaagggcgagcggagaagaggcaagggccacgatggcctgtaccagggcctgagcaccgccaccaaggacacctatgacgccctgcacatgcaggccctgcctccaagaagggccaagcgatctggatctggagcaacaaacttctcactactcaaacaagcaggtgacgtggaggagaatcccgggcctactagtatggactggatttggcgcatccttttccttgtcggcgctgctaccggcgcgcattccttcgaacaagttcagcttcaacagcctggcgctgagctggtcaaacctggcgcttctgtgaagatgagctgcaaagccagcggctacgccttcagcagctactggatcaactggatgaagcagaaacccggccagggactcgaatggatcggccaaatctatcccggcgacggcgacaccaactacaacggcaagttcaagggcagagccacactgaccgccgatacctctagcagcacagcctacatgcagctgagcagcctgaccagcgaagatagcgccgtgtacttctgtgcccggtccatcacaacagtcgtgggctgcgctatggactattggggccagggaacaagcgtgaccgtgtctagtacgcgtgagcagaaactgatctcggaagaggatctggggagcggcatccagaaccctgatcctgccgtgtaccagctgcgggatagcaagagcagcgacaagagcgtgtgtctgttcaccgacttcgacagccagaccaacgtgtcccagagcaaggactccgacgtgtacatcaccgataagaccgtgctggacatgcggagcatggacttcaagagcaactccgccgtggcctggtccaacaagtccgatttcgcctgcgccaacgccttcaacaacagcattatccccgaggacacattcttcccaagccccgagagcagctgcggtacccagagttttgggttgttggaccctaaattgtgctatctgttggacggaatcctgttcatttacggagtgatcctgaccgcattgttcctgaagagaggccggaagaagctgctgtacatcttcaagcagcctttcatgcggcccgtgcagaccacccaggaagaggacggctgctcctgccggttccccgaggaagaagaaggcggctgcgagctgcgggttaagttttccagatccgcagacgcacccgcttaccaacaagggcagaaccaactctacaatgaacttaatttggggcggagggaagagtacgacgttctggacaaaaggaggggacgagatcccgagatgggcggaaagcctcagcgaaggaagaatccgcaagaggggctttataacgaactccagaaagataaaatggcagaagcctatagtgagattgggatgaagggagaaaggaggaggggtaaaggtcacgatgggttgtaccaaggattgagcacagccactaaagatacctatgatgcgctccacatgcaggccctgccgccaaga

SEQ ID NO: 6085 - DNA, 3615 bp, Artificial Sequence
  Synthetic Polynucloetide
atggccttaccagtgaccgccttgctcctgccgctggccttgctgctccacgccgccaggccggaggttcagctgcttgagtctggcggaggactggttcaacctggcggaagcctgagactgtcttgtgccgccagcggcttcacctttagcagctacgccatgagctgggtccgacaggctcctggcaaaggactggaatgggtgtccagcatcagcggcagcggcgactacatctactacgccgatagcgtgaagggcagattcaccatcagccgggacatcagcaagaacaccctgtacctccagatgaacagcctgagagccgaggacaccgccgtgtactactgtgccaaagaaggcaccggcgctaacagcagcctggccgattatagaggccagggcacactggtcaccgtgtctagtggcggaggaagcggcggaggatctgaagtgcaactggtggaatctggaggctctctggtgcagccagggggaagcctgagactgtcttgtgccgcttccggcttcaccttcgacgactacgccatgagctgggtgcgccaggtgccaggcaaaggcctggaatgggtgtccagcatcaactggagcggcacccacaccgattacgccgactccgtgaaaggcagattcacaatcagcagaaacaacgccaacaataccctgtacctgcagatgaactccctgaagtctgaggatacagcagtgtattattgcgccaagaactggcgggacgccggcaccacttggtttgagaaaagcggctctgccggacagggaacccaagtgacagtgtcctccggtaccggcggaggcggatctggcggcggaggtagcggtggcggaggatctgaattcgacatccagatgacacagagccctagcagcctgtctgccagcgtgggagacagagtgaccatcacatgcaaggccagcgaccacatcaacaactggctggcctggtatcagcagaagcctggacaggcccctaagctgctgatctacggcgctaccacactggaaacaggcgtgcccagcagattttctggcagcggctctggcaccgactacaccctgacaatatccagcctccagcctgaggacttcgccacctactactgtcagcagagctggaacaccccttggacattcggccagggcaccaagctggaaatcaagagactcgaggggaaaccaattcccaaccctcttctgggactggattcaaccggcagcggcgaggacctgaagaacgtgttcccacctgaggtggccgtgttcgagcctagcgaggccgagatcagccacacccagaaagccaccctcgtgtgcctggctaccggcttctaccccgaccatgtggaactgtcttggtgggtcaacggcaaagaggtgcacagcggcgtgtctaccgacccccagccactgaaagaacagcccgccctgaacgacagccggtactgcctgagcagcagactgagagtgtccgccaccttctggcagaacccccggaaccacttcagatgccaggtgcagttctacggcctgagcgagaacgacgagtggacccaggacagagccaagcccgtgacccagatcgtgtctgccgaagcctggggcagagccgattgcggatcccagagcttcggcctgctggaccccaagctgtgctacctgctggatggcatcctgttcatctacggcgtgatcctgaccgccctgttcctgaaacggggcagaaagaaactcctgtatatattcaaacaaccatttatgagaccagtacaaactactcaagaggaagatggctgtagctgccgatttccagaagaagaagaaggaggatgtgaactgagagtgaagttcagcagaagcgccgacgcccctgcctaccagcagggacagaaccaactgtacaacgagctgaacctgggcagacgggaagagtacgacgtgctggacaagcggagaggcagggaccctgagatgggcggaaagccccagcggagaaagaacccccaggaaggactgtataacgaactccagaaagacaagatggccgaagcctacagcgagatcggcatgaagggcgagcggagaagaggcaagggccacgatggcctgtaccagggcctgagcaccgccaccaaggacacctatgacgccctgcacatgcaggccctgcctccaagaagggccaagcgatctggatctggagcaacaaacttctcactactcaaacaagcaggtgacgtggaggagaatcccgggcctactagtatggactggatttggcgcatccttttccttgtcggcgctgctaccggcgcgcattccttcgaacaagttcagcttcaacagcctggcgctgagctggtcaaacctggcgcttctgtgaagatgagctgcaaagccagcggctacgccttcagcagctactggatcaactggatgaagcagaaacccggccagggactcgaatggatcggccaaatctatcccggcgacggcgacaccaactacaacggcaagttcaagggcagagccacactgaccgccgatacctctagcagcacagcctacatgcagctgagcagcctgaccagcgaagatagcgccgtgtacttctgtgcccggtccatcacaacagtcgtgggctgcgctatggactattggggccagggaacaagcgtgaccgtgtctagtacgcgtgagcagaaactgatctcggaagaggatctggggagcggcatccagaaccctgatcctgccgtgtaccagctgcgggatagcaagagcagcgacaagagcgtgtgtctgttcaccgacttcgacagccagaccaacgtgtcccagagcaaggactccgacgtgtacatcaccgataagaccgtgctggacatgcggagcatggacttcaagagcaactccgccgtggcctggtccaacaagtccgatttcgcctgcgccaacgccttcaacaacagcattatccccgaggacacattcttcccaagccccgagagcagctgcggtacccagagttttgggttgttggaccctaaattgtgctatctgttggacggaatcctgttcatttacggagtgatcctgaccgcattgttcctgaagagaggccggaagaagctgctgtacatcttcaagcagcctttcatgcggcccgtgcagaccacccaggaagaggacggctgctcctgccggttccccgaggaagaagaaggcggctgcgagctgcgggttaagttttccagatccgcagacgcacccgcttaccaacaagggcagaaccaactctacaatgaacttaatttggggcggagggaagagtacgacgttctggacaaaaggaggggacgagatcccgagatgggcggaaagcctcagcgaaggaagaatccgcaagaggggctttataacgaactccagaaagataaaatggcagaagcctatagtgagattgggatgaagggagaaaggaggaggggtaaaggtcacgatgggttgtaccaaggattgagcacagccactaaagatacctatgatgcgctccacatgcaggccctgccgccaaga

SEQ ID NO: 6086 - DNA, 3288 bp, Artificial Sequence
  Synthetic Polynucloetide
atggccttaccagtgaccgccttgctcctgccgctggccttgctgctccacgccgccaggccggaggttcagctgcttgagtctggcggaggactggttcaacctggcggaagcctgagactgtcttgtgccgccagcggcttcacctttagcagctacgccatgagctgggtccgacaggctcctggcaaaggactggaatgggtgtccagcatcagcggcagcggcgactacatctactacgccgatagcgtgaagggcagattcaccatcagccgggacatcagcaagaacaccctgtacctccagatgaacagcctgagagccgaggacaccgccgtgtactactgtgccaaagaaggcaccggcgctaacagcagcctggccgattatagaggccagggcacactggtcaccgtgtctagtggcggaggaagcggcggaggatctgaagtgcaactggtggaatctggaggctctctggtgcagccagggggaagcctgagactgtcttgtgccgcttccggcttcaccttcgacgactacgccatgagctgggtgcgccaggtgccaggcaaaggcctggaatgggtgtccagcatcaactggagcggcacccacaccgattacgccgactccgtgaaaggcagattcacaatcagcagaaacaacgccaacaataccctgtacctgcagatgaactccctgaagtctgaggatacagcagtgtattattgcgccaagaactggcgggacgccggcaccacttggtttgagaaaagcggctctgccggacagggaacccaagtgacagtgtcctccggtaccggcggaggcggatctggcggcggaggtagcggtggcggaggatctgaattcgacatccagatgacacagagccctagcagcctgtctgccagcgtgggagacagagtgaccatcacatgcaaggccagcgaccacatcaacaactggctggcctggtatcagcagaagcctggacaggcccctaagctgctgatctacggcgctaccacactggaaacaggcgtgcccagcagattttctggcagcggctctggcaccgactacaccctgacaatatccagcctccagcctgaggacttcgccacctactactgtcagcagagctggaacaccccttggacattcggccagggcaccaagctggaaatcaagagactcgagcagagcttcggcctgctggaccccaagctgtgctacctgctggatggcatcctgttcatctacggcgtgatcctgaccgccctgttcctgagagtgaagttcagcagaagcgccgacgcccctgcctaccagcagggacagaaccaactgtacaacgagctgaacctgggcagacgggaagagtacgacgtgctggacaagcggagaggcagggaccctgagatgggcggaaagccccagcggagaaagaacccccaggaaggactgtataacgaactccagaaagacaagatggccgaagcctacagcgagatcggcatgaagggcgagcggagaagaggcaagggccacgatggcctgtaccagggcctgagcaccgccaccaaggacacctatgacgccctgcacatgcaggccctgcctccaagaagggccaagcgatctggatctggagcaacaaacttctcactactcaaacaagcaggtgacgtggaggagaatcccgggcctactagtatggactggatttggcgcatccttttccttgtcggcgctgctaccggcgcgcattccttcgaacaagttcagcttcaacagcctggcgctgagctggtcaaacctggcgcttctgtgaagatgagctgcaaagccagcggctacgccttcagcagctactggatcaactggatgaagcagaaacccggccagggactcgaatggatcggccaaatctatcccggcgacggcgacaccaactacaacggcaagttcaagggcagagccacactgaccgccgatacctctagcagcacagcctacatgcagctgagcagcctgaccagcgaagatagcgccgtgtacttctgtgcccggtccatcacaacagtcgtgggctgcgctatggactattggggccagggaacaagcgtgaccgtgtctagtacgcgtcagagttttgggttgttggaccctaaattgtgctatctgttggacggaatcctgttcatttacggagtgatcctgaccgcattgttcctgcgggttaagttttccagatccgcagacgcacccgcttaccaacaagggcagaaccaactctacaatgaacttaatttggggcggagggaagagtacgacgttctggacaaaaggaggggacgagatcccgagatgggcggaaagcctcagcgaaggaagaatccgcaagaggggctttataacgaactccagaaagataaaatggcagaagcctatagtgagattgggatgaagggagaaaggaggaggggtaaaggtcacgatgggttgtaccaaggattgagcacagccactaaagatacctatgatgcgctccacatgcaggccctgccgccaagacgcgccaagagaagcggatctggcgtgaagcagaccctgaatttcgacctgctgaagctggctggcgacgtggaatccaacccaggcccttctagaggccatatgaccgagtacaagcccacggtgcgcctcgccacccgcgacgacgtccccagggccgtacgcaccctcgccgccgcgttcgccgactaccccgccacgcgccacaccgtcgatccggaccgccacatcgagcgggtcaccgagctgcaagaactcttcctcacgcgcgtcgggctcgacatcggcaaggtgtgggtcgcggacgacggcgccgcggtggcggtctggaccacgccggagagcgtcgaagcgggggcggtgttcgccgagatcggcccgcgcatggccgagttgagcggttcccggctggccgcgcagcaacagatggaaggcctcctggcgccgcaccggcccaaggagcccgcgtggttcctggccaccgtcggcgtctcgcccgaccaccagggcaagggtctgggcagcgccgtcgtgctccccggagtggaggcggccgagcgcgccggggtgcccgccttcctggagacctccgcgccccgcaacctccccttctacgagcggctcggcttcaccgtcaccgccgacgtcgaggtgcccgaaggaccgcgcacctggtgcatgacccgcaagcccggtgcctga

SEQ ID NO: 6087 - DNA, 2760 bp, Artificial Sequence
  Synthetic Polynucloetide
atggccttaccagtgaccgccttgctcctgccgctggccttgctgctccacgccgccaggccggaggttcagctgcttgagtctggcggaggactggttcaacctggcggaagcctgagactgtcttgtgccgccagcggcttcacctttagcagctacgccatgagctgggtccgacaggctcctggcaaaggactggaatgggtgtccagcatcagcggcagcggcgactacatctactacgccgatagcgtgaagggcagattcaccatcagccgggacatcagcaagaacaccctgtacctccagatgaacagcctgagagccgaggacaccgccgtgtactactgtgccaaagaaggcaccggcgctaacagcagcctggccgattatagaggccagggcacactggtcaccgtgtctagtggcggaggaagcggcggaggatctgaagtgcaactggtggaatctggaggctctctggtgcagccagggggaagcctgagactgtcttgtgccgcttccggcttcaccttcgacgactacgccatgagctgggtgcgccaggtgccaggcaaaggcctggaatgggtgtccagcatcaactggagcggcacccacaccgattacgccgactccgtgaaaggcagattcacaatcagcagaaacaacgccaacaataccctgtacctgcagatgaactccctgaagtctgaggatacagcagtgtattattgcgccaagaactggcgggacgccggcaccacttggtttgagaaaagcggctctgccggacagggaacccaagtgacagtgtcctccggtaccggcggaggcggatctggcggcggaggtagcggtggcggaggatctgaattcgacatccagatgacacagagccctagcagcctgtctgccagcgtgggagacagagtgaccatcacatgcaaggccagcgaccacatcaacaactggctggcctggtatcagcagaagcctggacaggcccctaagctgctgatctacggcgctaccacactggaaacaggcgtgcccagcagattttctggcagcggctctggcaccgactacaccctgacaatatccagcctccagcctgaggacttcgccacctactactgtcagcagagctggaacaccccttggacattcggccagggcaccaagctggaaatcaagagactcgagggacagcctaaggccaatcctaccgtgacactgttccctccaagcagcgaagaactccaggccaacaaggccacacttgtgtgcctgatctccgacttctaccctggggctgtgacagtggcttggaaggccgatggatctcctgtgaaagccggcgtggaaaccaccaagccatccaagcagagcaacaacaaatacgccgccagctcctacctgagcctgacacctgagcagtggaagtcccacagatcctacagctgccaagtgacccacgaaggcagcaccgtggaaaagacagtggcccctacagagtgcagccccatcaagaccgatgtgattacaatggaccccaaggacaactgctccaaggacgccaacgataccctgctgctccagctgaccaacaccagcgcctactacatgtacttgttgctgctgctgaagtccgtggtgtacttcgccatcatcacatgctgcctgctgcggagaaccgccttctgctgcaacggcgagaagtctagggccaagcgatctggatctggagcaacaaacttctcactactcaaacaagcaggtgacgtggaggagaatcccgggcctactagtatggactggatttggcgcatccttttccttgtcggcgctgctaccggcgcgcattccttcgaacaagttcagcttcaacagcctggcgctgagctggtcaaacctggcgcttctgtgaagatgagctgcaaagccagcggctacgccttcagcagctactggatcaactggatgaagcagaaacccggccagggactcgaatggatcggccaaatctatcccggcgacggcgacaccaactacaacggcaagttcaagggcagagccacactgaccgccgatacctctagcagcacagcctacatgcagctgagcagcctgaccagcgaagatagcgccgtgtacttctgtgcccggtccatcacaacagtcgtgggctgcgctatggactattggggccagggaacaagcgtgaccgtgtctagtacgcgtgcctctacaaagggaccctccgtgtttcctctggctcccagcagcaagtctacaagcggaggaacagccgctctgggctgcctggtcaaggattactttcccgagcctgtgaccgtgtcctggaatagcggagcactgacaagcggcgtgcacacctttccagccgtgctgcaaagcagcggcctgtactctctgagcagcgtggtcacagtgcctagctctagcctgggcacccagacctacatctgcaatgtgaaccacaagcctagcaacaccaaggtggacaagagagtggaacccaagagctgtgaagtgaaaaccgactccaccgaccacgtgaagcccaaagagacagagaacaccaagcagcccagcaagagctgccacaagcccaaggccatcgtgcacaccgagaaagtgaacatgatgagcctgaccgtgctgggcctgcggatgctgttcgccaaaaccgtggccgtgaacttcctgctgaccgccaagctgttcttcctc

SEQ ID NO: 6088 - DNA, 2694 bp, Artificial Sequence
  Synthetic Polynucloetide
atggccttaccagtgaccgccttgctcctgccgctggccttgctgctccacgccgccaggccggaggttcagctgcttgagtctggcggaggactggttcaacctggcggaagcctgagactgtcttgtgccgccagcggcttcacctttagcagctacgccatgagctgggtccgacaggctcctggcaaaggactggaatgggtgtccagcatcagcggcagcggcgactacatctactacgccgatagcgtgaagggcagattcaccatcagccgggacatcagcaagaacaccctgtacctccagatgaacagcctgagagccgaggacaccgccgtgtactactgtgccaaagaaggcaccggcgctaacagcagcctggccgattatagaggccagggcacactggtcaccgtgtctagtggcggaggaagcggcggaggatctgaagtgcaactggtggaatctggaggctctctggtgcagccagggggaagcctgagactgtcttgtgccgcttccggcttcaccttcgacgactacgccatgagctgggtgcgccaggtgccaggcaaaggcctggaatgggtgtccagcatcaactggagcggcacccacaccgattacgccgactccgtgaaaggcagattcacaatcagcagaaacaacgccaacaataccctgtacctgcagatgaactccctgaagtctgaggatacagcagtgtattattgcgccaagaactggcgggacgccggcaccacttggtttgagaaaagcggctctgccggacagggaacccaagtgacagtgtcctccggtaccggcggaggcggatctggcggcggaggtagcggtggcggaggatctgaattcgacatccagatgacacagagccctagcagcctgtctgccagcgtgggagacagagtgaccatcacatgcaaggccagcgaccacatcaacaactggctggcctggtatcagcagaagcctggacaggcccctaagctgctgatctacggcgctaccacactggaaacaggcgtgcccagcagattttctggcagcggctctggcaccgactacaccctgacaatatccagcctccagcctgaggacttcgccacctactactgtcagcagagctggaacaccccttggacattcggccagggcaccaagctggaaatcaagagactcgagggacagcctaaggccaatcctaccgtgacactgttccctccaagcagcgaagaactccaggccaacaaggccacacttgtgtgcctgatctccgacttctaccctggggctgtgacagtggcttggaaggccgatggatctcctgtgaaagccggcgtggaaaccaccaagccatccaagcagagcaacaacaaatacgccgccagctcctacctgagcctgacacctgagcagtggaagtcccacagatcctacagctgccaagtgacccacgaaggcagcaccgtggaaaagacagtggcccctacagagtgcagcggcagagccgattgcggcatcaccagcgccagctaccaccagggcgtgctgagcgccaccatcctgtacgagatcctgctgggcaaggccaccctgtacgccgtgctggtgtctgccctggtgctgatggctatggtcaagcggaaggacagccggggaagggccaagcgatctggatctggagcaacaaacttctcactactcaaacaagcaggtgacgtggaggagaatcccgggcctactagtatggactggatttggcgcatccttttccttgtcggcgctgctaccggcgcgcattccttcgaacaagttcagcttcaacagcctggcgctgagctggtcaaacctggcgcttctgtgaagatgagctgcaaagccagcggctacgccttcagcagctactggatcaactggatgaagcagaaacccggccagggactcgaatggatcggccaaatctatcccggcgacggcgacaccaactacaacggcaagttcaagggcagagccacactgaccgccgatacctctagcagcacagcctacatgcagctgagcagcctgaccagcgaagatagcgccgtgtacttctgtgcccggtccatcacaacagtcgtgggctgcgctatggactattggggccagggaacaagcgtgaccgtgtctagtacgcgtgcctctacaaagggaccctccgtgtttcctctggctcccagcagcaagtctacaagcggaggaacagccgctctgggctgcctggtcaaggattactttcccgagcctgtgaccgtgtcctggaatagcggagcactgacaagcggcgtgcacacctttccagccgtgctgcaaagcagcggcctgtactctctgagcagcgtggtcacagtgcctagctctagcctgggcacccagacctacatctgcaatgtgaaccacaagcctagcaacaccaaggtggacaagagagtggaacccaagagctgtatccccgaggacacattcttcccaagcagcgacgtgccctgcgacgtgaagctggtggaaaagagcttcgagacagacaccaacctgaacttccagaacctgagcgtgatcggcttcagaatcctgctgctgaaagtggccggctttaacctgctgatgaccctgcggctgtggtccagc

SEQ ID NO: 6089 - DNA, 2694 bp, Artificial Sequence
  Synthetic Polynucloetide
atggccttaccagtgaccgccttgctcctgccgctggccttgctgctccacgccgccaggccggaggttcagctgcttgagtctggcggaggactggttcaacctggcggaagcctgagactgtcttgtgccgccagcggcttcacctttagcagctacgccatgagctgggtccgacaggctcctggcaaaggactggaatgggtgtccagcatcagcggcagcggcgactacatctactacgccgatagcgtgaagggcagattcaccatcagccgggacatcagcaagaacaccctgtacctccagatgaacagcctgagagccgaggacaccgccgtgtactactgtgccaaagaaggcaccggcgctaacagcagcctggccgattatagaggccagggcacactggtcaccgtgtctagtggcggaggaagcggcggaggatctgaagtgcaactggtggaatctggaggctctctggtgcagccagggggaagcctgagactgtcttgtgccgcttccggcttcaccttcgacgactacgccatgagctgggtgcgccaggtgccaggcaaaggcctggaatgggtgtccagcatcaactggagcggcacccacaccgattacgccgactccgtgaaaggcagattcacaatcagcagaaacaacgccaacaataccctgtacctgcagatgaactccctgaagtctgaggatacagcagtgtattattgcgccaagaactggcgggacgccggcaccacttggtttgagaaaagcggctctgccggacagggaacccaagtgacagtgtcctccggtaccggcggaggcggatctggcggcggaggtagcggtggcggaggatctgaattcgacatccagatgacacagagccctagcagcctgtctgccagcgtgggagacagagtgaccatcacatgcaaggccagcgaccacatcaacaactggctggcctggtatcagcagaagcctggacaggcccctaagctgctgatctacggcgctaccacactggaaacaggcgtgcccagcagattttctggcagcggctctggcaccgactacaccctgacaatatccagcctccagcctgaggacttcgccacctactactgtcagcagagctggaacaccccttggacattcggccagggcaccaagctggaaatcaagagactcgagggacagcctaaggccaatcctaccgtgacactgttccctccaagcagcgaagaactccaggccaacaaggccacacttgtgtgcctgatctccgacttctaccctggggctgtgacagtggcttggaaggccgatggatctcctgtgaaagccggcgtggaaaccaccaagccatccaagcagagcaacaacaaatacgccgccagctcctacctgagcctgacacctgagcagtggaagtcccacagatcctacagctgccaagtgacccacgaaggcagcaccgtggaaaagacagtggcccctacagagtgcagcggcagagccgattgcggctttaccagcgagagctaccagcagggcgtgctgagcgccaccatcctgtacgagatcctgctgggcaaggccaccctgtacgccgtgctggtgtctgccctggtgctgatggctatggtcaagcggaaggacagccggggaagggccaagcgatctggatctggagcaacaaacttctcactactcaaacaagcaggtgacgtggaggagaatcccgggcctactagtatggactggatttggcgcatccttttccttgtcggcgctgctaccggcgcgcattccttcgaacaagttcagcttcaacagcctggcgctgagctggtcaaacctggcgcttctgtgaagatgagctgcaaagccagcggctacgccttcagcagctactggatcaactggatgaagcagaaacccggccagggactcgaatggatcggccaaatctatcccggcgacggcgacaccaactacaacggcaagttcaagggcagagccacactgaccgccgatacctctagcagcacagcctacatgcagctgagcagcctgaccagcgaagatagcgccgtgtacttctgtgcccggtccatcacaacagtcgtgggctgcgctatggactattggggccagggaacaagcgtgaccgtgtctagtacgcgtgcctctacaaagggaccctccgtgtttcctctggctcccagcagcaagtctacaagcggaggaacagccgctctgggctgcctggtcaaggattactttcccgagcctgtgaccgtgtcctggaatagcggagcactgacaagcggcgtgcacacctttccagccgtgctgcaaagcagcggcctgtactctctgagcagcgtggtcacagtgcctagctctagcctgggcacccagacctacatctgcaatgtgaaccacaagcctagcaacaccaaggtggacaagagagtggaacccaagagctgtatccccgaggacacattcttcccaagccccgagagcagctgcgacgtgaagctggtggaaaagagcttcgagacagacaccaacctgaacttccagaacctgagcgtgatcggcttcagaatcctgctgctgaaagtggccggctttaacctgctgatgaccctgcggctgtggtccagc

SEQ ID NO: 6090 - DNA, 2172 bp, Artificial Sequence
  Synthetic Polynucloetide
atggccttaccagtgaccgccttgctcctgccgctggccttgctgctccacgccgccaggccggaggttcagctgcttgagtctggcggaggactggttcaacctggcggaagcctgagactgtcttgtgccgccagcggcttcacctttagcagctacgccatgagctgggtccgacaggctcctggcaaaggactggaatgggtgtccagcatcagcggcagcggcgactacatctactacgccgatagcgtgaagggcagattcaccatcagccgggacatcagcaagaacaccctgtacctccagatgaacagcctgagagccgaggacaccgccgtgtactactgtgccaaagaaggcaccggcgctaacagcagcctggccgattatagaggccagggcacactggtcaccgtgtctagtggcggaggaagcggcggaggatctgaagtgcaactggtggaatctggaggctctctggtgcagccagggggaagcctgagactgtcttgtgccgcttccggcttcaccttcgacgactacgccatgagctgggtgcgccaggtgccaggcaaaggcctggaatgggtgtccagcatcaactggagcggcacccacaccgattacgccgactccgtgaaaggcagattcacaatcagcagaaacaacgccaacaataccctgtacctgcagatgaactccctgaagtctgaggatacagcagtgtattattgcgccaagaactggcgggacgccggcaccacttggtttgagaaaagcggctctgccggacagggaacccaagtgacagtgtcctccggtaccggcggaggcggatctggcggcggaggtagcggtggcggaggatctgaattcgacatccagatgacacagagccctagcagcctgtctgccagcgtgggagacagagtgaccatcacatgcaaggccagcgaccacatcaacaactggctggcctggtatcagcagaagcctggacaggcccctaagctgctgatctacggcgctaccacactggaaacaggcgtgcccagcagattttctggcagcggctctggcaccgactacaccctgacaatatccagcctccagcctgaggacttcgccacctactactgtcagcagagctggaacaccccttggacattcggccagggcaccaagctggaaatcaagagaggcggaggcggaagtggaggcggaggatctggcggcggaggctctcaagttcagcttcaacagcctggcgctgagctggtcaaacctggcgcttctgtgaagatgagctgcaaagccagcggctacgccttcagcagctactggatcaactggatgaagcagaaacccggccagggactcgaatggatcggccaaatctatcccggcgacggcgacaccaactacaacggcaagttcaagggcagagccacactgaccgccgatacctctagcagcacagcctacatgcagctgagcagcctgaccagcgaagatagcgccgtgtacttctgtgcccggtccatcacaacagtcgtgggctgcgctatggactattggggccagggaacaagcgtgaccgtgtctagtacgcgtgacggtaacgaggagatgggaggaatcactcaaaccccttacaaagtctcaatttcaggaacaactgttatccttacatgtccccagtatcctggcagcgagatcctttggcagcataacgacaagaatatagggggagatgaagacgataagaatatcggatctgacgaggatcacttgagcctgaaagagttctccgagcttgaacaaagcggatattatgtgtgctatccgcgcgggtcaaagccggaagacgctaacttttacctttatctccgagccagagtgtgcgaaaattgcatggaaatggacgttatgtccgttgctacaatagttatcgtagatatatgcatcacgggtggactgcttctgctggtttattattggtccaagaatagaaaggccaaagctaaacccgtgaccagaggcgctggcgcaggcggaaggcaaaggggacaaaacaaagaacggccaccaccagtgccaaatccagattatgagcctattcggaaaggacagagggacctgtactctggcctgaatcagagaagaatc

SEQ ID NO: 6091 - DNA, 2067 bp, Artificial Sequence
  Synthetic Polynucloetide
atggccttaccagtgaccgccttgctcctgccgctggccttgctgctccacgccgccaggccggaggttcagctgcttgagtctggcggaggactggttcaacctggcggaagcctgagactgtcttgtgccgccagcggcttcacctttagcagctacgccatgagctgggtccgacaggctcctggcaaaggactggaatgggtgtccagcatcagcggcagcggcgactacatctactacgccgatagcgtgaagggcagattcaccatcagccgggacatcagcaagaacaccctgtacctccagatgaacagcctgagagccgaggacaccgccgtgtactactgtgccaaagaaggcaccggcgctaacagcagcctggccgattatagaggccagggcacactggtcaccgtgtctagtggcggaggaagcggcggaggatctgaagtgcaactggtggaatctggaggctctctggtgcagccagggggaagcctgagactgtcttgtgccgcttccggcttcaccttcgacgactacgccatgagctgggtgcgccaggtgccaggcaaaggcctggaatgggtgtccagcatcaactggagcggcacccacaccgattacgccgactccgtgaaaggcagattcacaatcagcagaaacaacgccaacaataccctgtacctgcagatgaactccctgaagtctgaggatacagcagtgtattattgcgccaagaactggcgggacgccggcaccacttggtttgagaaaagcggctctgccggacagggaacccaagtgacagtgtcctccggtaccggcggaggcggatctggcggcggaggtagcggtggcggaggatctgaattcgacatccagatgacacagagccctagcagcctgtctgccagcgtgggagacagagtgaccatcacatgcaaggccagcgaccacatcaacaactggctggcctggtatcagcagaagcctggacaggcccctaagctgctgatctacggcgctaccacactggaaacaggcgtgcccagcagattttctggcagcggctctggcaccgactacaccctgacaatatccagcctccagcctgaggacttcgccacctactactgtcagcagagctggaacaccccttggacattcggccagggcaccaagctggaaatcaagagaggcggaggcggaagtggaggcggaggatctggcggcggaggctctcaagttcagcttcaacagcctggcgctgagctggtcaaacctggcgcttctgtgaagatgagctgcaaagccagcggctacgccttcagcagctactggatcaactggatgaagcagaaacccggccagggactcgaatggatcggccaaatctatcccggcgacggcgacaccaactacaacggcaagttcaagggcagagccacactgaccgccgatacctctagcagcacagcctacatgcagctgagcagcctgaccagcgaagatagcgccgtgtacttctgtgcccggtccatcacaacagtcgtgggctgcgctatggactattggggccagggaacaagcgtgaccgtgtctagtacgcgtttcaagatccccatcgaggaactggaagatcgggtgttcgtgaactgcaacacctctatcacctgggtggaaggcaccgtgggaacactgctgagcgacatcaccagactggacctcggcaagcggattctggaccctcggggcatctacagatgcaacggcaccgacatctacaaggacaaagaaagcaccgtgcaggtccactacagaatgtgccagtcctgcgtggaactggaccctgctacagtggccggcatcatcgtgaccgatgtgatcgctactctgctgctggctctgggagtgttctgcttcgccggacacgaaacaggcagactgtctggcgctgccgatacacaggccctgctgagaaacgaccaagtgtatcagcccctgcgcgacagagatgatgcccagtattctcacctcggcggcaactgggctagaaacaag

SEQ ID NO: 6092 - DNA, 2097 bp, Artificial Sequence
  Synthetic Polynucloetide
atggccttaccagtgaccgccttgctcctgccgctggccttgctgctccacgccgccaggccggaggttcagctgcttgagtctggcggaggactggttcaacctggcggaagcctgagactgtcttgtgccgccagcggcttcacctttagcagctacgccatgagctgggtccgacaggctcctggcaaaggactggaatgggtgtccagcatcagcggcagcggcgactacatctactacgccgatagcgtgaagggcagattcaccatcagccgggacatcagcaagaacaccctgtacctccagatgaacagcctgagagccgaggacaccgccgtgtactactgtgccaaagaaggcaccggcgctaacagcagcctggccgattatagaggccagggcacactggtcaccgtgtctagtggcggaggaagcggcggaggatctgaagtgcaactggtggaatctggaggctctctggtgcagccagggggaagcctgagactgtcttgtgccgcttccggcttcaccttcgacgactacgccatgagctgggtgcgccaggtgccaggcaaaggcctggaatgggtgtccagcatcaactggagcggcacccacaccgattacgccgactccgtgaaaggcagattcacaatcagcagaaacaacgccaacaataccctgtacctgcagatgaactccctgaagtctgaggatacagcagtgtattattgcgccaagaactggcgggacgccggcaccacttggtttgagaaaagcggctctgccggacagggaacccaagtgacagtgtcctccggtaccggcggaggcggatctggcggcggaggtagcggtggcggaggatctgaattcgacatccagatgacacagagccctagcagcctgtctgccagcgtgggagacagagtgaccatcacatgcaaggccagcgaccacatcaacaactggctggcctggtatcagcagaagcctggacaggcccctaagctgctgatctacggcgctaccacactggaaacaggcgtgcccagcagattttctggcagcggctctggcaccgactacaccctgacaatatccagcctccagcctgaggacttcgccacctactactgtcagcagagctggaacaccccttggacattcggccagggcaccaagctggaaatcaagagaggcggaggcggaagtggaggcggaggatctggcggcggaggctctcaagttcagcttcaacagcctggcgctgagctggtcaaacctggcgcttctgtgaagatgagctgcaaagccagcggctacgccttcagcagctactggatcaactggatgaagcagaaacccggccagggactcgaatggatcggccaaatctatcccggcgacggcgacaccaactacaacggcaagttcaagggcagagccacactgaccgccgatacctctagcagcacagcctacatgcagctgagcagcctgaccagcgaagatagcgccgtgtacttctgtgcccggtccatcacaacagtcgtgggctgcgctatggactattggggccagggaacaagcgtgaccgtgtctagtacgcgtcagagcatcaagggcaaccacctggtcaaggtgtacgactaccaagaggacggcagcgtgctgctgacatgtgatgccgaggccaagaacatcacctggtttaaggacggcaagatgatcggcttcctgaccgaggacaagaagaagtggaacctgggcagcaacgctaaggaccccagaggcatgtatcagtgcaagggcagccagaacaagagcaagcccctccaggtgtactaccggatgtgccagaactgcatcgagctgaacgccgctaccatcagcggctttctgttcgccgagatcgtgtccatcttcgtgctggccgtgggcgtgtactttatcgctggacaggatggcgtgcggcagagcagagcttccgataagcaaaccctgctgcctaacgaccagctgtaccagcctctgaaggacagagaggacgaccagtacagccacctccagggcaatcagctgagaagaaac

SEQ ID NO: 6093 - DNA, 2046 bp, Artificial Sequence
  Synthetic Polynucloetide
atggccttaccagtgaccgccttgctcctgccgctggccttgctgctccacgccgccaggccggaggttcagctgcttgagtctggcggaggactggttcaacctggcggaagcctgagactgtcttgtgccgccagcggcttcacctttagcagctacgccatgagctgggtccgacaggctcctggcaaaggactggaatgggtgtccagcatcagcggcagcggcgactacatctactacgccgatagcgtgaagggcagattcaccatcagccgggacatcagcaagaacaccctgtacctccagatgaacagcctgagagccgaggacaccgccgtgtactactgtgccaaagaaggcaccggcgctaacagcagcctggccgattatagaggccagggcacactggtcaccgtgtctagtggcggaggaagcggcggaggatctgaagtgcaactggtggaatctggaggctctctggtgcagccagggggaagcctgagactgtcttgtgccgcttccggcttcaccttcgacgactacgccatgagctgggtgcgccaggtgccaggcaaaggcctggaatgggtgtccagcatcaactggagcggcacccacaccgattacgccgactccgtgaaaggcagattcacaatcagcagaaacaacgccaacaataccctgtacctgcagatgaactccctgaagtctgaggatacagcagtgtattattgcgccaagaactggcgggacgccggcaccacttggtttgagaaaagcggctctgccggacagggaacccaagtgacagtgtcctccggtaccggcggaggcggatctggcggcggaggtagcggtggcggaggatctgaattcgacatccagatgacacagagccctagcagcctgtctgccagcgtgggagacagagtgaccatcacatgcaaggccagcgaccacatcaacaactggctggcctggtatcagcagaagcctggacaggcccctaagctgctgatctacggcgctaccacactggaaacaggcgtgcccagcagattttctggcagcggctctggcaccgactacaccctgacaatatccagcctccagcctgaggacttcgccacctactactgtcagcagagctggaacaccccttggacattcggccagggcaccaagctggaaatcaagagaggcggaggcggaagtggaggcggaggatctggcggcggaggctctcaagttcagcttcaacagcctggcgctgagctggtcaaacctggcgcttctgtgaagatgagctgcaaagccagcggctacgccttcagcagctactggatcaactggatgaagcagaaacccggccagggactcgaatggatcggccaaatctatcccggcgacggcgacaccaactacaacggcaagttcaagggcagagccacactgaccgccgatacctctagcagcacagcctacatgcagctgagcagcctgaccagcgaagatagcgccgtgtacttctgtgcccggtccatcacaacagtcgtgggctgcgctatggactattggggccagggaacaagcgtgaccgtgtctagtacgcgtcagagttttgggttgttggaccctaaattgtgctatctgttggacggaatcctgttcatttacggagtgatcctgaccgcattgttcctgcgggttaagttttccagatccgcagacgcacccgcttaccaacaagggcagaaccaactctacaatgaacttaatttggggcggagggaagagtacgacgttctggacaaaaggaggggacgagatcccgagatgggcggaaagcctcagcgaaggaagaatccgcaagaggggctttataacgaactccagaaagataaaatggcagaagcctatagtgagattgggatgaagggagaaaggaggaggggtaaaggtcacgatgggttgtaccaaggattgagcacagccactaaagatacctatgatgcgctccacatgcaggccctgccgccaaga

SEQ ID NO: 6094 - DNA, 2748 bp, Artificial Sequence
  Synthetic Polynucloetide
atggccttaccagtgaccgccttgctcctgccgctggccttgctgctccacgccgccaggccggaggttcagctgcttgagtctggcggaggactggttcaacctggcggaagcctgagactgtcttgtgccgccagcggcttcacctttagcagctacgccatgagctgggtccgacaggctcctggcaaaggactggaatgggtgtccagcatcagcggcagcggcgactacatctactacgccgatagcgtgaagggcagattcaccatcagccgggacatcagcaagaacaccctgtacctccagatgaacagcctgagagccgaggacaccgccgtgtactactgtgccaaagaaggcaccggcgctaacagcagcctggccgattatagaggccagggcacactggtcaccgtgtctagtggcggaggaagcggcggaggatctgaagtgcaactggtggaatctggaggctctctggtgcagccagggggaagcctgagactgtcttgtgccgcttccggcttcaccttcgacgactacgccatgagctgggtgcgccaggtgccaggcaaaggcctggaatgggtgtccagcatcaactggagcggcacccacaccgattacgccgactccgtgaaaggcagattcacaatcagcagaaacaacgccaacaataccctgtacctgcagatgaactccctgaagtctgaggatacagcagtgtattattgcgccaagaactggcgggacgccggcaccacttggtttgagaaaagcggctctgccggacagggaacccaagtgacagtgtcctccggtaccggcggaggcggatctggcggcggaggtagcggtggcggaggatctgaattcgacatccagatgacacagagccctagcagcctgtctgccagcgtgggagacagagtgaccatcacatgcaaggccagcgaccacatcaacaactggctggcctggtatcagcagaagcctggacaggcccctaagctgctgatctacggcgctaccacactggaaacaggcgtgcccagcagattttctggcagcggctctggcaccgactacaccctgacaatatccagcctccagcctgaggacttcgccacctactactgtcagcagagctggaacaccccttggacattcggccagggcaccaagctggaaatcaagagaggcggaggcggaagtggaggcggaggatctggcggcggaggctctcaagttcagcttcaacagcctggcgctgagctggtcaaacctggcgcttctgtgaagatgagctgcaaagccagcggctacgccttcagcagctactggatcaactggatgaagcagaaacccggccagggactcgaatggatcggccaaatctatcccggcgacggcgacaccaactacaacggcaagttcaagggcagagccacactgaccgccgatacctctagcagcacagcctacatgcagctgagcagcctgaccagcgaagatagcgccgtgtacttctgtgcccggtccatcacaacagtcgtgggctgcgctatggactattggggccagggaacaagcgtgaccgtgtctagtacgcgtgggagcggcatccagaaccctgatcctgccgtgtaccagctgcgggatagcaagagcagcgacaagagcgtgtgtctgttcaccgacttcgacagccagaccaacgtgtcccagagcaaggactccgacgtgtacatcaccgataagaccgtgctggacatgcggagcatggacttcaagagcaactccgccgtggcctggtccaacaagtccgatttcgcctgcgccaacgccttcaacaacagcattatccccgaggacacattcttcccaagccccgagagcagctgcgacgtgaagctggtggaaaagagcttcgagacagacaccaacctgaacttccagaacctgagcgtgatcggcttcagaatcctgctgctgaaagtggccggctttaacctgctgatgaccctgcggctgtggtccagccgcgccaagagaagcggatctggcgtgaagcagaccctgaatttcgacctgctgaagctggctggcgacgtggaatccaacccaggcccttctagaggccatatgaccgagtacaagcccacggtgcgcctcgccacccgcgacgacgtccccagggccgtacgcaccctcgccgccgcgttcgccgactaccccgccacgcgccacaccgtcgatccggaccgccacatcgagcgggtcaccgagctgcaagaactcttcctcacgcgcgtcgggctcgacatcggcaaggtgtgggtcgcggacgacggcgccgcggtggcggtctggaccacgccggagagcgtcgaagcgggggcggtgttcgccgagatcggcccgcgcatggccgagttgagcggttcccggctggccgcgcagcaacagatggaaggcctcctggcgccgcaccggcccaaggagcccgcgtggttcctggccaccgtcggcgtctcgcccgaccaccagggcaagggtctgggcagcgccgtcgtgctccccggagtggaggcggccgagcgcgccggggtgcccgccttcctggagacctccgcgccccgcaacctccccttctacgagcggctcggcttcaccgtcaccgccgacgtcgaggtgcccgaaggaccgcgcacctggtgcatgacccgcaagcccggtgcctga

SEQ ID NO: 6095 - DNA, 2844 bp, Artificial Sequence
  Synthetic Polynucloetide
atggccttaccagtgaccgccttgctcctgccgctggccttgctgctccacgccgccaggccggaggttcagctgcttgagtctggcggaggactggttcaacctggcggaagcctgagactgtcttgtgccgccagcggcttcacctttagcagctacgccatgagctgggtccgacaggctcctggcaaaggactggaatgggtgtccagcatcagcggcagcggcgactacatctactacgccgatagcgtgaagggcagattcaccatcagccgggacatcagcaagaacaccctgtacctccagatgaacagcctgagagccgaggacaccgccgtgtactactgtgccaaagaaggcaccggcgctaacagcagcctggccgattatagaggccagggcacactggtcaccgtgtctagtggcggaggaagcggcggaggatctgaagtgcaactggtggaatctggaggctctctggtgcagccagggggaagcctgagactgtcttgtgccgcttccggcttcaccttcgacgactacgccatgagctgggtgcgccaggtgccaggcaaaggcctggaatgggtgtccagcatcaactggagcggcacccacaccgattacgccgactccgtgaaaggcagattcacaatcagcagaaacaacgccaacaataccctgtacctgcagatgaactccctgaagtctgaggatacagcagtgtattattgcgccaagaactggcgggacgccggcaccacttggtttgagaaaagcggctctgccggacagggaacccaagtgacagtgtcctccggtaccggcggaggcggatctggcggcggaggtagcggtggcggaggatctgaattcgacatccagatgacacagagccctagcagcctgtctgccagcgtgggagacagagtgaccatcacatgcaaggccagcgaccacatcaacaactggctggcctggtatcagcagaagcctggacaggcccctaagctgctgatctacggcgctaccacactggaaacaggcgtgcccagcagattttctggcagcggctctggcaccgactacaccctgacaatatccagcctccagcctgaggacttcgccacctactactgtcagcagagctggaacaccccttggacattcggccagggcaccaagctggaaatcaagagaggcggaggcggaagtggaggcggaggatctggcggcggaggctctcaagttcagcttcaacagcctggcgctgagctggtcaaacctggcgcttctgtgaagatgagctgcaaagccagcggctacgccttcagcagctactggatcaactggatgaagcagaaacccggccagggactcgaatggatcggccaaatctatcccggcgacggcgacaccaactacaacggcaagttcaagggcagagccacactgaccgccgatacctctagcagcacagcctacatgcagctgagcagcctgaccagcgaagatagcgccgtgtacttctgtgcccggtccatcacaacagtcgtgggctgcgctatggactattggggccagggaacaagcgtgaccgtgtctagtctcgaggacctgaagaacgtgttcccacctgaggtggccgtgttcgagcctagcgaggccgagatcagccacacccagaaagccaccctcgtgtgcctggctaccggcttctaccccgaccatgtggaactgtcttggtgggtcaacggcaaagaggtgcacagcggcgtgtctaccgacccccagccactgaaagaacagcccgccctgaacgacagccggtactgcctgagcagcagactgagagtgtccgccaccttctggcagaacccccggaaccacttcagatgccaggtgcagttctacggcctgagcgagaacgacgagtggacccaggacagagccaagcccgtgacccagatcgtgtctgccgaagcctggggcagagccgattgcggctttaccagcgagagctaccagcagggcgtgctgagcgccaccatcctgtacgagatcctgctgggcaaggccaccctgtacgccgtgctggtgtctgccctggtgctgatggctatggtcaagcggaaggacagccggggaagggccaagcgatctggatctggagcaacaaacttctcactactcaaacaagcaggtgacgtggaggagaatcccgggcctactagaggccatatgaccgagtacaagcccacggtgcgcctcgccacccgcgacgacgtccccagggccgtacgcaccctcgccgccgcgttcgccgactaccccgccacgcgccacaccgtcgatccggaccgccacatcgagcgggtcaccgagctgcaagaactcttcctcacgcgcgtcgggctcgacatcggcaaggtgtgggtcgcggacgacggcgccgcggtggcggtctggaccacgccggagagcgtcgaagcgggggcggtgttcgccgagatcggcccgcgcatggccgagttgagcggttcccggctggccgcgcagcaacagatggaaggcctcctggcgccgcaccggcccaaggagcccgcgtggttcctggccaccgtcggcgtctcgcccgaccaccagggcaagggtctgggcagcgccgtcgtgctccccggagtggaggcggccgagcgcgccggggtgcccgccttcctggagacctccgcgccccgcaacctccccttctacgagcggctcggcttcaccgtcaccgccgacgtcgaggtgcccgaaggaccgcgcacctggtgcatgacccgcaagcccggtgcctga

SEQ ID NO: 6096 - DNA, 2994 bp, Artificial Sequence
  Synthetic Polynucloetide
atggccttaccagtgaccgccttgctcctgccgctggccttgctgctccacgccgccaggccggaggttcagctgcttgagtctggcggaggactggttcaacctggcggaagcctgagactgtcttgtgccgccagcggcttcacctttagcagctacgccatgagctgggtccgacaggctcctggcaaaggactggaatgggtgtccagcatcagcggcagcggcgactacatctactacgccgatagcgtgaagggcagattcaccatcagccgggacatcagcaagaacaccctgtacctccagatgaacagcctgagagccgaggacaccgccgtgtactactgtgccaaagaaggcaccggcgctaacagcagcctggccgattatagaggccagggcacactggtcaccgtgtctagtggcggaggaagcggcggaggatctgaagtgcaactggtggaatctggaggctctctggtgcagccagggggaagcctgagactgtcttgtgccgcttccggcttcaccttcgacgactacgccatgagctgggtgcgccaggtgccaggcaaaggcctggaatgggtgtccagcatcaactggagcggcacccacaccgattacgccgactccgtgaaaggcagattcacaatcagcagaaacaacgccaacaataccctgtacctgcagatgaactccctgaagtctgaggatacagcagtgtattattgcgccaagaactggcgggacgccggcaccacttggtttgagaaaagcggctctgccggacagggaacccaagtgacagtgtcctccggtaccggcggaggcggatctggcggcggaggtagcggtggcggaggatctgaattcgacatccagatgacacagagccctagcagcctgtctgccagcgtgggagacagagtgaccatcacatgcaaggccagcgaccacatcaacaactggctggcctggtatcagcagaagcctggacaggcccctaagctgctgatctacggcgctaccacactggaaacaggcgtgcccagcagattttctggcagcggctctggcaccgactacaccctgacaatatccagcctccagcctgaggacttcgccacctactactgtcagcagagctggaacaccccttggacattcggccagggcaccaagctggaaatcaagagaggcggaggcggaagtggaggcggaggatctggcggcggaggctctcaagttcagcttcaacagcctggcgctgagctggtcaaacctggcgcttctgtgaagatgagctgcaaagccagcggctacgccttcagcagctactggatcaactggatgaagcagaaacccggccagggactcgaatggatcggccaaatctatcccggcgacggcgacaccaactacaacggcaagttcaagggcagagccacactgaccgccgatacctctagcagcacagcctacatgcagctgagcagcctgaccagcgaagatagcgccgtgtacttctgtgcccggtccatcacaacagtcgtgggctgcgctatggactattggggccagggaacaagcgtgaccgtgtctagtacgcgtgagcagaaactgatctcggaagaggatctggggagcggcaccccattcccttctctggcccctcccatcatgctgctggtggacggcaagcagcagatggtggtcgtgtgcctggtgctggatgtggccccacctggactggacagccccatctggtttagcgccggcaatggctctgccctggacgcctttacctacggcccaagccctgccaccgatggcacctggacaaatctggcccacctgagcctgcccagcgaggaactggcttcttgggagcctctcgtgtgccacacaggacctggcgctgagggacacagcagatccacccagcctatgcacctgtctggcgaggccagcaccgccagaacctgtcctcaggaacctctgagaggcacccctggcggagcactgtggctgggagtgctgagactgctgctgttcaagctgctgctgtttgacctgctgctgacctgctcctgtctgtgcgatcctgccggccctctgccttctcctgccaccaccacaagactgagagccctgggcagccacagactgcaccctgccacagagacaggcggcagagaggccacaagcagccctagaccccagcccagagacagaagatggggcgataccccccctggcagaaagcctggatctccagtccgcgccaagagaagcggatctggcgtgaagcagaccctgaatttcgacctgctgaagctggctggcgacgtggaatccaacccaggcccttctagatctagaggccatatgaccgagtacaagcccacggtgcgcctcgccacccgcgacgacgtccccagggccgtacgcaccctcgccgccgcgttcgccgactaccccgccacgcgccacaccgtcgatccggaccgccacatcgagcgggtcaccgagctgcaagaactcttcctcacgcgcgtcgggctcgacatcggcaaggtgtgggtcgcggacgacggcgccgcggtggcggtctggaccacgccggagagcgtcgaagcgggggcggtgttcgccgagatcggcccgcgcatggccgagttgagcggttcccggctggccgcgcagcaacagatggaaggcctcctggcgccgcaccggcccaaggagcccgcgtggttcctggccaccgtcggcgtctcgcccgaccaccagggcaagggtctgggcagcgccgtcgtgctccccggagtggaggcggccgagcgcgccggggtgcccgccttcctggagacctccgcgccccgcaacctccccttctacgagcggctcggcttcaccgtcaccgccgacgtcgaggtgcccgaaggaccgcgcacctggtgcatgacccgcaagcccggtgcctga

SEQ ID NO: 6097 - DNA, 2436 bp, Artificial Sequence
  Synthetic Polynucloetide
atggccttaccagtgaccgccttgctcctgccgctggccttgctgctccacgccgccaggccggaggttcagctgcttgagtctggcggaggactggttcaacctggcggaagcctgagactgtcttgtgccgccagcggcttcacctttagcagctacgccatgagctgggtccgacaggctcctggcaaaggactggaatgggtgtccagcatcagcggcagcggcgactacatctactacgccgatagcgtgaagggcagattcaccatcagccgggacatcagcaagaacaccctgtacctccagatgaacagcctgagagccgaggacaccgccgtgtactactgtgccaaagaaggcaccggcgctaacagcagcctggccgattatagaggccagggcacactggtcaccgtgtctagtggcggaggaagcggcggaggatctgaagtgcaactggtggaatctggaggctctctggtgcagccagggggaagcctgagactgtcttgtgccgcttccggcttcaccttcgacgactacgccatgagctgggtgcgccaggtgccaggcaaaggcctggaatgggtgtccagcatcaactggagcggcacccacaccgattacgccgactccgtgaaaggcagattcacaatcagcagaaacaacgccaacaataccctgtacctgcagatgaactccctgaagtctgaggatacagcagtgtattattgcgccaagaactggcgggacgccggcaccacttggtttgagaaaagcggctctgccggacagggaacccaagtgacagtgtcctccggtaccggcggaggcggatctggcggcggaggtagcggtggcggaggatctgaattcgacatccagatgacacagagccctagcagcctgtctgccagcgtgggagacagagtgaccatcacatgcaaggccagcgaccacatcaacaactggctggcctggtatcagcagaagcctggacaggcccctaagctgctgatctacggcgctaccacactggaaacaggcgtgcccagcagattttctggcagcggctctggcaccgactacaccctgacaatatccagcctccagcctgaggacttcgccacctactactgtcagcagagctggaacaccccttggacattcggccagggcaccaagctggaaatcaagagactcgaggacctgaagaacgtgttcccacctgaggtggccgtgttcgagcctagcgaggccgagatcagccacacccagaaagccaccctcgtgtgcctggctaccggcttctaccccgaccatgtggaactgtcttggtgggtcaacggcaaagaggtgcacagcggcgtgtctaccgacccccagccactgaaagaacagcccgccctgaacgacagccggtactgcctgagcagcagactgagagtgtccgccaccttctggcagaacccccggaaccacttcagatgccaggtgcagttctacggcctgagcgagaacgacgagtggacccaggacagagccaagcccgtgacccagatcgtgtctgccgaagcctggggcagagccgattgcggctttaccagcgagagctaccagcagggcgtgctgagcgccaccatcctgtacgagatcctgctgggcaaggccaccctgtacgccgtgctggtgtctgccctggtgctgatggctatggtcaagcggaaggacagccggggaagggccaagcgatctggatctggagcaacaaacttctcactactcaaacaagcaggtgacgtggaggagaatcccgggcctactagaggccatatgaccgagtacaagcccacggtgcgcctcgccacccgcgacgacgtccccagggccgtacgcaccctcgccgccgcgttcgccgactaccccgccacgcgccacaccgtcgatccggaccgccacatcgagcgggtcaccgagctgcaagaactcttcctcacgcgcgtcgggctcgacatcggcaaggtgtgggtcgcggacgacggcgccgcggtggcggtctggaccacgccggagagcgtcgaagcgggggcggtgttcgccgagatcggcccgcgcatggccgagttgagcggttcccggctggccgcgcagcaacagatggaaggcctcctggcgccgcaccggcccaaggagcccgcgtggttcctggccaccgtcggcgtctcgcccgaccaccagggcaagggtctgggcagcgccgtcgtgctccccggagtggaggcggccgagcgcgccggggtgcccgccttcctggagacctccgcgccccgcaacctccccttctacgagcggctcggcttcaccgtcaccgccgacgtcgaggtgcccgaaggaccgcgcacctggtgcatgacccgcaagcccggtgcctga

SEQ ID NO: 6098 - DNA, 1743 bp, Artificial Sequence
  Synthetic Polynucloetide
atggccttaccagtgaccgccttgctcctgccgctggccttgctgctccacgccgccaggccggaggttcagctgcttgagtctggcggaggactggttcaacctggcggaagcctgagactgtcttgtgccgccagcggcttcacctttagcagctacgccatgagctgggtccgacaggctcctggcaaaggactggaatgggtgtccagcatcagcggcagcggcgactacatctactacgccgatagcgtgaagggcagattcaccatcagccgggacatcagcaagaacaccctgtacctccagatgaacagcctgagagccgaggacaccgccgtgtactactgtgccaaagaaggcaccggcgctaacagcagcctggccgattatagaggccagggcacactggtcaccgtgtctagtggcggaggaagcggcggaggatctgaagtgcaactggtggaatctggaggctctctggtgcagccagggggaagcctgagactgtcttgtgccgcttccggcttcaccttcgacgactacgccatgagctgggtgcgccaggtgccaggcaaaggcctggaatgggtgtccagcatcaactggagcggcacccacaccgattacgccgactccgtgaaaggcagattcacaatcagcagaaacaacgccaacaataccctgtacctgcagatgaactccctgaagtctgaggatacagcagtgtattattgcgccaagaactggcgggacgccggcaccacttggtttgagaaaagcggctctgccggacagggaacccaagtgacagtgtcctccggtaccggcggaggcggatctggcggcggaggtagcggtggcggaggatctgaattcgacatccagatgacacagagccctagcagcctgtctgccagcgtgggagacagagtgaccatcacatgcaaggccagcgaccacatcaacaactggctggcctggtatcagcagaagcctggacaggcccctaagctgctgatctacggcgctaccacactggaaacaggcgtgcccagcagattttctggcagcggctctggcaccgactacaccctgacaatatccagcctccagcctgaggacttcgccacctactactgtcagcagagctggaacaccccttggacattcggccagggcaccaagctggaaatcaagagactcgaggacctgaagaacgtgttcccacctgaggtggccgtgttcgagcctagcgaggccgagatcagccacacccagaaagccaccctcgtgtgcctggctaccggcttctaccccgaccatgtggaactgtcttggtgggtcaacggcaaagaggtgcacagcggcgtgtctaccgacccccagccactgaaagaacagcccgccctgaacgacagccggtactgcctgagcagcagactgagagtgtccgccaccttctggcagaacccccggaaccacttcagatgccaggtgcagttctacggcctgagcgagaacgacgagtggacccaggacagagccaagcccgtgacccagatcgtgtctgccgaagcctggggcagagccgattgcggctttaccagcgagagctaccagcagggcgtgctgagcgccaccatcctgtacgagatcctgctgggcaaggccaccctgtacgccgtgctggtgtctgccctggtgctgatggctatggtcaagcggaaggacagccgggga

SEQ ID NO: 6099 - DNA, 2490 bp, Artificial Sequence
  Synthetic Polynucloetide
atggccttaccagtgaccgccttgctcctgccgctggccttgctgctccacgccgccaggccggaggttcagctgcttgagtctggcggaggactggttcaacctggcggaagcctgagactgtcttgtgccgccagcggcttcacctttagcagctacgccatgagctgggtccgacaggctcctggcaaaggactggaatgggtgtccagcatcagcggcagcggcgactacatctactacgccgatagcgtgaagggcagattcaccatcagccgggacatcagcaagaacaccctgtacctccagatgaacagcctgagagccgaggacaccgccgtgtactactgtgccaaagaaggcaccggcgctaacagcagcctggccgattatagaggccagggcacactggtcaccgtgtctagtggcggaggaagcggcggaggatctgaagtgcaactggtggaatctggaggctctctggtgcagccagggggaagcctgagactgtcttgtgccgcttccggcttcaccttcgacgactacgccatgagctgggtgcgccaggtgccaggcaaaggcctggaatgggtgtccagcatcaactggagcggcacccacaccgattacgccgactccgtgaaaggcagattcacaatcagcagaaacaacgccaacaataccctgtacctgcagatgaactccctgaagtctgaggatacagcagtgtattattgcgccaagaactggcgggacgccggcaccacttggtttgagaaaagcggctctgccggacagggaacccaagtgacagtgtcctccggtaccggcggaggcggatctggcggcggaggtagcggtggcggaggatctgaattcgacatccagatgacacagagccctagcagcctgtctgccagcgtgggagacagagtgaccatcacatgcaaggccagcgaccacatcaacaactggctggcctggtatcagcagaagcctggacaggcccctaagctgctgatctacggcgctaccacactggaaacaggcgtgcccagcagattttctggcagcggctctggcaccgactacaccctgacaatatccagcctccagcctgaggacttcgccacctactactgtcagcagagctggaacaccccttggacattcggccagggcaccaagctggaaatcaagagactcgaggggaaaccaattcccaaccctcttctgggactggattcaaccggcagcggcgaggacctgaagaacgtgttcccacctgaggtggccgtgttcgagcctagcgaggccgagatcagccacacccagaaagccaccctcgtgtgcctggctaccggcttctaccccgaccatgtggaactgtcttggtgggtcaacggcaaagaggtgcacagcggcgtgtgtaccgacccccagccactgaaagaacagcccgccctgaacgacagccggtactgcctgagcagcagactgagagtgtccgccaccttctggcagaacccccggaaccacttcagatgccaggtgcagttctacggcctgagcgagaacgacgagtggacccaggacagagccaagcccgtgacccagatcgtgtctgccgaagcctggggcagagccgattgcggctttaccagcgagagctaccagcagggcgtgctgagcgccaccatcctgtacgagatcctgctgggcaaggccaccctgtacgccgtgctggtgtctgccctggtgctgatggctatggtcaagcggaaggacagccggggaagggccaagcgatctggatctggagcaacaaacttctcactactcaaacaagcaggtgacgtggaggagaatcccgggcctactagaggccatatgaccgagtacaagcccacggtgcgcctcgccacccgcgacgacgtccccagggccgtacgcaccctcgccgccgcgttcgccgactaccccgccacgcgccacaccgtcgatccggaccgccacatcgagcgggtcaccgagctgcaagaactcttcctcacgcgcgtcgggctcgacatcggcaaggtgtgggtcgcggacgacggcgccgcggtggcggtctggaccacgccggagagcgtcgaagcgggggcggtgttcgccgagatcggcccgcgcatggccgagttgagcggttcccggctggccgcgcagcaacagatggaaggcctcctggcgccgcaccggcccaaggagcccgcgtggttcctggccaccgtcggcgtctcgcccgaccaccagggcaagggtctgggcagcgccgtcgtgctccccggagtggaggcggccgagcgcgccggggtgcccgccttcctggagacctccgcgccccgcaacctccccttctacgagcggctcggcttcaccgtcaccgccgacgtcgaggtgcccgaaggaccgcgcacctggtgcatgacccgcaagcccggtgcctga

SEQ ID NO: 6100 - DNA, 1800 bp, Artificial Sequence
  Synthetic Polynucloetide
atggccttaccagtgaccgccttgctcctgccgctggccttgctgctccacgccgccaggccggaggttcagctgcttgagtctggcggaggactggttcaacctggcggaagcctgagactgtcttgtgccgccagcggcttcacctttagcagctacgccatgagctgggtccgacaggctcctggcaaaggactggaatgggtgtccagcatcagcggcagcggcgactacatctactacgccgatagcgtgaagggcagattcaccatcagccgggacatcagcaagaacaccctgtacctccagatgaacagcctgagagccgaggacaccgccgtgtactactgtgccaaagaaggcaccggcgctaacagcagcctggccgattatagaggccagggcacactggtcaccgtgtctagtggcggaggaagcggcggaggatctgaagtgcaactggtggaatctggaggctctctggtgcagccagggggaagcctgagactgtcttgtgccgcttccggcttcaccttcgacgactacgccatgagctgggtgcgccaggtgccaggcaaaggcctggaatgggtgtccagcatcaactggagcggcacccacaccgattacgccgactccgtgaaaggcagattcacaatcagcagaaacaacgccaacaataccctgtacctgcagatgaactccctgaagtctgaggatacagcagtgtattattgcgccaagaactggcgggacgccggcaccacttggtttgagaaaagcggctctgccggacagggaacccaagtgacagtgtcctccggtaccggcggaggcggatctggcggcggaggtagcggtggcggaggatctgaattcgacatccagatgacacagagccctagcagcctgtctgccagcgtgggagacagagtgaccatcacatgcaaggccagcgaccacatcaacaactggctggcctggtatcagcagaagcctggacaggcccctaagctgctgatctacggcgctaccacactggaaacaggcgtgcccagcagattttctggcagcggctctggcaccgactacaccctgacaatatccagcctccagcctgaggacttcgccacctactactgtcagcagagctggaacaccccttggacattcggccagggcaccaagctggaaatcaagagactcgaggggaaaccaattcccaaccctcttctgggactggattcaaccggcagcggcgaggacctgaagaacgtgttcccacctgaggtggccgtgttcgagcctagcgaggccgagatcagccacacccagaaagccaccctcgtgtgcctggctaccggcttctaccccgaccatgtggaactgtcttggtgggtcaacggcaaagaggtgcacagcggcgtgtgtaccgacccccagccactgaaagaacagcccgccctgaacgacagccggtactgcctgagcagcagactgagagtgtccgccaccttctggcagaacccccggaaccacttcagatgccaggtgcagttctacggcctgagcgagaacgacgagtggacccaggacagagccaagcccgtgacccagatcgtgtctgccgaagcctggggcagagccgattgcggctttaccagcgagagctaccagcagggcgtgctgagcgccaccatcctgtacgagatcctgctgggcaaggccaccctgtacgccgtgctggtgtctgccctggtgctgatggctatggtcaagcggaaggacagccggggatga

SEQ ID NO: 6101 - DNA, 2748 bp, Artificial Sequence
  Synthetic Polynucloetide
atggccttaccagtgaccgccttgctcctgccgctggccttgctgctccacgccgccaggccggaggttcagctgcttgagtctggcggaggactggttcaacctggcggaagcctgagactgtcttgtgccgccagcggcttcacctttagcagctacgccatgagctgggtccgacaggctcctggcaaaggactggaatgggtgtccagcatcagcggcagcggcgactacatctactacgccgatagcgtgaagggcagattcaccatcagccgggacatcagcaagaacaccctgtacctccagatgaacagcctgagagccgaggacaccgccgtgtactactgtgccaaagaaggcaccggcgctaacagcagcctggccgattatagaggccagggcacactggtcaccgtgtctagtggcggaggaagcggcggaggatctgaagtgcaactggtggaatctggaggctctctggtgcagccagggggaagcctgagactgtcttgtgccgcttccggcttcaccttcgacgactacgccatgagctgggtgcgccaggtgccaggcaaaggcctggaatgggtgtccagcatcaactggagcggcacccacaccgattacgccgactccgtgaaaggcagattcacaatcagcagaaacaacgccaacaataccctgtacctgcagatgaactccctgaagtctgaggatacagcagtgtattattgcgccaagaactggcgggacgccggcaccacttggtttgagaaaagcggctctgccggacagggaacccaagtgacagtgtcctccggtaccggcggaggcggatctggcggcggaggtagcggtggcggaggatctgaattcgacatccagatgacacagagccctagcagcctgtctgccagcgtgggagacagagtgaccatcacatgcaaggccagcgaccacatcaacaactggctggcctggtatcagcagaagcctggacaggcccctaagctgctgatctacggcgctaccacactggaaacaggcgtgcccagcagattttctggcagcggctctggcaccgactacaccctgacaatatccagcctccagcctgaggacttcgccacctactactgtcagcagagctggaacaccccttggacattcggccagggcaccaagctggaaatcaagagaggcggaggcggaagtggaggcggaggatctggcggcggaggctctcaagttcagcttcaacagcctggcgctgagctggtcaaacctggcgcttctgtgaagatgagctgcaaagccagcggctacgccttcagcagctactggatcaactggatgaagcagaaacccggccagggactcgaatggatcggccaaatctatcccggcgacggcgacaccaactacaacggcaagttcaagggcagagccacactgaccgccgatacctctagcagcacagcctacatgcagctgagcagcctgaccagcgaagatagcgccgtgtacttctgtgcccggtccatcacaacagtcgtgggctgcgctatggactattggggccagggaacaagcgtgaccgtgtctagtacgcgtgggagcggcatccagaaccctgatcctgccgtgtaccagctgcgggatagcaagagcagcgacaagagcgtgtgtctgttcaccgacttcgacagccagaccaacgtgtcccagagcaaggactccgacgtgtacatcaccgataagaccgtgctggacatgcggagcatggacttcaagagcaactccgccgtggcctggtccaacaagtccgatttcgcctgcgccaacgccttcaacaacagcattatccccgaggacacattcttcccaagcagcgacgtgccctgcgacgtgaagctggtggaaaagagcttcgagacagacaccaacctgaacttccagaacctgagcgtgatcggcttcagaatcctgctgctgaaagtggccggctttaacctgctgatgaccctgcggctgtggtccagccgcgccaagagaagcggatctggcgtgaagcagaccctgaatttcgacctgctgaagctggctggcgacgtggaatccaacccaggcccttctagaggccatatgaccgagtacaagcccacggtgcgcctcgccacccgcgacgacgtccccagggccgtacgcaccctcgccgccgcgttcgccgactaccccgccacgcgccacaccgtcgatccggaccgccacatcgagcgggtcaccgagctgcaagaactcttcctcacgcgcgtcgggctcgacatcggcaaggtgtgggtcgcggacgacggcgccgcggtggcggtctggaccacgccggagagcgtcgaagcgggggcggtgttcgccgagatcggcccgcgcatggccgagttgagcggttcccggctggccgcgcagcaacagatggaaggcctcctggcgccgcaccggcccaaggagcccgcgtggttcctggccaccgtcggcgtctcgcccgaccaccagggcaagggtctgggcagcgccgtcgtgctccccggagtggaggcggccgagcgcgccggggtgcccgccttcctggagacctccgcgccccgcaacctccccttctacgagcggctcggcttcaccgtcaccgccgacgtcgaggtgcccgaaggaccgcgcacctggtgcatgacccgcaagcccggtgcctga

SEQ ID NO: 6102 - DNA, 2844 bp, Artificial Sequence
  Synthetic Polynucloetide
atggccttaccagtgaccgccttgctcctgccgctggccttgctgctccacgccgccaggccggaggttcagctgcttgagtctggcggaggactggttcaacctggcggaagcctgagactgtcttgtgccgccagcggcttcacctttagcagctacgccatgagctgggtccgacaggctcctggcaaaggactggaatgggtgtccagcatcagcggcagcggcgactacatctactacgccgatagcgtgaagggcagattcaccatcagccgggacatcagcaagaacaccctgtacctccagatgaacagcctgagagccgaggacaccgccgtgtactactgtgccaaagaaggcaccggcgctaacagcagcctggccgattatagaggccagggcacactggtcaccgtgtctagtggcggaggaagcggcggaggatctgaagtgcaactggtggaatctggaggctctctggtgcagccagggggaagcctgagactgtcttgtgccgcttccggcttcaccttcgacgactacgccatgagctgggtgcgccaggtgccaggcaaaggcctggaatgggtgtccagcatcaactggagcggcacccacaccgattacgccgactccgtgaaaggcagattcacaatcagcagaaacaacgccaacaataccctgtacctgcagatgaactccctgaagtctgaggatacagcagtgtattattgcgccaagaactggcgggacgccggcaccacttggtttgagaaaagcggctctgccggacagggaacccaagtgacagtgtcctccggtaccggcggaggcggatctggcggcggaggtagcggtggcggaggatctgaattcgacatccagatgacacagagccctagcagcctgtctgccagcgtgggagacagagtgaccatcacatgcaaggccagcgaccacatcaacaactggctggcctggtatcagcagaagcctggacaggcccctaagctgctgatctacggcgctaccacactggaaacaggcgtgcccagcagattttctggcagcggctctggcaccgactacaccctgacaatatccagcctccagcctgaggacttcgccacctactactgtcagcagagctggaacaccccttggacattcggccagggcaccaagctggaaatcaagagaggcggaggcggaagtggaggcggaggatctggcggcggaggctctcaagttcagcttcaacagcctggcgctgagctggtcaaacctggcgcttctgtgaagatgagctgcaaagccagcggctacgccttcagcagctactggatcaactggatgaagcagaaacccggccagggactcgaatggatcggccaaatctatcccggcgacggcgacaccaactacaacggcaagttcaagggcagagccacactgaccgccgatacctctagcagcacagcctacatgcagctgagcagcctgaccagcgaagatagcgccgtgtacttctgtgcccggtccatcacaacagtcgtgggctgcgctatggactattggggccagggaacaagcgtgaccgtgtctagtctcgaggacctgaagaacgtgttcccacctgaggtggccgtgttcgagcctagcaaggccgagatcgcccacacccagaaagccaccctcgtgtgcctggctaccggcttctaccccgaccatgtggaactgtcttggtgggtcaacggcaaagaggtgcacagcggcgtgtctaccgacccccagccactgaaagaacagcccgccctgaacgacagccggtactgcctgagcagcagactgagagtgtccgccaccttctggcagaacccccggaaccacttcagatgccaggtgcagttctacggcctgagcgagaacgacgagtggacccaggacagagccaagcccgtgacccagatcgtgtctgccgaagcctggggcagagccgattgcggcatcaccagcgccagctaccaccagggcgtgctgagcgccaccatcctgtacgagatcctgctgggcaaggccaccctgtacgccgtgctggtgtctgccctggtgctgatggctatggtcaagcggaaggacagccggggaagggccaagcgatctggatctggagcaacaaacttctcactactcaaacaagcaggtgacgtggaggagaatcccgggcctactagaggccatatgaccgagtacaagcccacggtgcgcctcgccacccgcgacgacgtccccagggccgtacgcaccctcgccgccgcgttcgccgactaccccgccacgcgccacaccgtcgatccggaccgccacatcgagcgggtcaccgagctgcaagaactcttcctcacgcgcgtcgggctcgacatcggcaaggtgtgggtcgcggacgacggcgccgcggtggcggtctggaccacgccggagagcgtcgaagcgggggcggtgttcgccgagatcggcccgcgcatggccgagttgagcggttcccggctggccgcgcagcaacagatggaaggcctcctggcgccgcaccggcccaaggagcccgcgtggttcctggccaccgtcggcgtctcgcccgaccaccagggcaagggtctgggcagcgccgtcgtgctccccggagtggaggcggccgagcgcgccggggtgcccgccttcctggagacctccgcgccccgcaacctccccttctacgagcggctcggcttcaccgtcaccgccgacgtcgaggtgcccgaaggaccgcgcacctggtgcatgacccgcaagcccggtgcctga

SEQ ID NO: 6103 - DNA, 3828 bp, Artificial Sequence
  Synthetic Polynucloetide
atggccttaccagtgaccgccttgctcctgccgctggccttgctgctccacgccgccaggccggaggttcagctgcttgagtctggcggaggactggttcaacctggcggaagcctgagactgtcttgtgccgccagcggcttcacctttagcagctacgccatgagctgggtccgacaggctcctggcaaaggactggaatgggtgtccagcatcagcggcagcggcgactacatctactacgccgatagcgtgaagggcagattcaccatcagccgggacatcagcaagaacaccctgtacctccagatgaacagcctgagagccgaggacaccgccgtgtactactgtgccaaagaaggcaccggcgctaacagcagcctggccgattatagaggccagggcacactggtcaccgtgtctagtggcggaggaagcggcggaggatctgaagtgcaactggtggaatctggaggctctctggtgcagccagggggaagcctgagactgtcttgtgccgcttccggcttcaccttcgacgactacgccatgagctgggtgcgccaggtgccaggcaaaggcctggaatgggtgtccagcatcaactggagcggcacccacaccgattacgccgactccgtgaaaggcagattcacaatcagcagaaacaacgccaacaataccctgtacctgcagatgaactccctgaagtctgaggatacagcagtgtattattgcgccaagaactggcgggacgccggcaccacttggtttgagaaaagcggctctgccggacagggaacccaagtgacagtgtcctccggtaccggcggaggcggatctggcggcggaggtagcggtggcggaggatctgaattcgacatccagatgacacagagccctagcagcctgtctgccagcgtgggagacagagtgaccatcacatgcaaggccagcgaccacatcaacaactggctggcctggtatcagcagaagcctggacaggcccctaagctgctgatctacggcgctaccacactggaaacaggcgtgcccagcagattttctggcagcggctctggcaccgactacaccctgacaatatccagcctccagcctgaggacttcgccacctactactgtcagcagagctggaacaccccttggacattcggccagggcaccaagctggaaatcaagagactcgagatccagaaccctgatcctgccgtgtaccagctgcgggatagcaagagcagcgacaagagcgtgtgtctgttcaccgacttcgacagccagaccaacgtgtcccagagcaaggactccgacgtgtacatcaccgataagtgcgtgctggacatgcggagcatggacttcaagagcaactccgccgtggcctggtccaacaagtccgatttcgcctgcgccaacgccttcaacaacagcattatccccgaggacacattcttcccaagcagcgacgtgccctgcgacgtgaagctggtggaaaagagcttcgagacagacaccaacctgaacttccagaacctgagcgtgatcggcttcagaatcctgctgctgaaagtggccggctttaacctgctgatgaccctgcggctgtggtccagccgcgccaagagaagcggatctggcgtgaagcagaccctgaatttcgacctgctgaagctggctggcgacgtggaatccaacccaggccctactagtatggactggatttggcgcatccttttccttgtcggcgctgctaccggcgcccattccgggcccgaagtgcagctggttgaatctggcggaggactggttcagcctggcggatctctgagactgtcttgtgccgcctctggcttcgccagcgactactatatcatcggctggttcagacaggcccctggcaaagagagagagggcgtcagctgtatcagcagcagatacgccaacaccaactacgccgacagcgtgaagggcagattcaccatcagccgggacaacgccaagaacaccgtgtacctccagatgaacagcctgaagcctgaggacaccgccgtgtactactgtgccgccgacaccagaagatacacctgtcctgacattgccaccatgcaccggaacttcgattcttggggccagggcacactggtcaccgtttcttctggatccggcggcggaggatctggcggaggcggatctgggggcggaggctctttcgaacaagttcagcttcaacagcctggcgctgagctggtcaaacctggcgcttctgtgaagatgagctgcaaagccagcggctacgccttcagcagctactggatcaactggatgaagcagaaacccggccagggactcgaatggatcggccaaatctatcccggcgacggcgacaccaactacaacggcaagttcaagggcagagccacactgaccgccgatacctctagcagcacagcctacatgcagctgagcagcctgaccagcgaagatagcgccgtgtacttctgtgcccggtccatcacaacagtcgtgggctgcgctatggactattggggccagggaacaagcgtgaccgtgtctagtacgcgtgaggacctgaagaacgtgttcccacctgaggtggccgtgttcgagcctagcaaggccgagatcgcccacacccagaaagccaccctcgtgtgcctggctaccggcttctaccccgaccatgtggaactgtcttggtgggtcaacggcaaagaggtgcacagcggcgtgtgtaccgacccccagccactgaaagaacagcccgccctgaacgacagccggtactgcctgagcagcagactgagagtgtccgccaccttctggcagaacccccggaaccacttcagatgccaggtgcagttctacggcctgagcgagaacgacgagtggacccaggacagagccaagcccgtgacccagatcgtgtctgccgaagcctggggcagagccgattgcggcatcaccagcgccagctaccaccagggcgtgctgagcgccaccatcctgtacgagatcctgctgggcaaggccaccctgtacgccgtgctggtgtctgccctggtgctgatggctatggtcaagcggaaggacagccggggaagggccaagcgatctggatctggagcaacaaacttctcactactcaaacaagcaggtgacgtggaggagaatcccgggccttctagaggccatatgaccgagtacaagcccacggtgcgcctcgccacccgcgacgacgtccccagggccgtacgcaccctcgccgccgcgttcgccgactaccccgccacgcgccacaccgtcgatccggaccgccacatcgagcgggtcaccgagctgcaagaactcttcctcacgcgcgtcgggctcgacatcggcaaggtgtgggtcgcggacgacggcgccgcggtggcggtctggaccacgccggagagcgtcgaagcgggggcggtgttcgccgagatcggcccgcgcatggccgagttgagcggttcccggctggccgcgcagcaacagatggaaggcctcctggcgccgcaccggcccaaggagcccgcgtggttcctggccaccgtcggcgtctcgcccgaccaccagggcaagggtctgggcagcgccgtcgtgctccccggagtggaggcggccgagcgcgccggggtgcccgccttcctggagacctccgcgccccgcaacctccccttctacgagcggctcggcttcaccgtcaccgccgacgtcgaggtgcccgaaggaccgcgcacctggtgcatgacccgcaagcccggtgcctga

SEQ ID NO: 6104 - DNA, 3825 bp, Artificial Sequence
  Synthetic Polynucloetide
atggccttaccagtgaccgccttgctcctgccgctggccttgctgctccacgccgccaggccggaggttcagctgcttgagtctggcggaggactggttcaacctggcggaagcctgagactgtcttgtgccgccagcggcttcacctttagcagctacgccatgagctgggtccgacaggctcctggcaaaggactggaatgggtgtccagcatcagcggcagcggcgactacatctactacgccgatagcgtgaagggcagattcaccatcagccgggacatcagcaagaacaccctgtacctccagatgaacagcctgagagccgaggacaccgccgtgtactactgtgccaaagaaggcaccggcgctaacagcagcctggccgattatagaggccagggcacactggtcaccgtgtctagtggcggaggaagcggcggaggatctgaagtgcaactggtggaatctggaggctctctggtgcagccagggggaagcctgagactgtcttgtgccgcttccggcttcaccttcgacgactacgccatgagctgggtgcgccaggtgccaggcaaaggcctggaatgggtgtccagcatcaactggagcggcacccacaccgattacgccgactccgtgaaaggcagattcacaatcagcagaaacaacgccaacaataccctgtacctgcagatgaactccctgaagtctgaggatacagcagtgtattattgcgccaagaactggcgggacgccggcaccacttggtttgagaaaagcggctctgccggacagggaacccaagtgacagtgtcctccggtaccggcggaggcggatctggcggcggaggtagcggtggcggaggatctgaattcgacatccagatgacacagagccctagcagcctgtctgccagcgtgggagacagagtgaccatcacatgcaaggccagcgaccacatcaacaactggctggcctggtatcagcagaagcctggacaggcccctaagctgctgatctacggcgctaccacactggaaacaggcgtgcccagcagattttctggcagcggctctggcaccgactacaccctgacaatatccagcctccagcctgaggacttcgccacctactactgtcagcagagctggaacaccccttggacattcggccagggcaccaagctggaaatcaagagactcgaggacctgaagaacgtgttcccacctgaggtggccgtgttcgagcctagcaaggccgagatcgcccacacccagaaagccaccctcgtgtgcctggctaccggcttctaccccgaccatgtggaactgtcttggtgggtcaacggcaaagaggtgcacagcggcgtgtgtaccgacccccagccactgaaagaacagcccgccctgaacgacagccggtactgcctgagcagcagactgagagtgtccgccaccttctggcagaacccccggaaccacttcagatgccaggtgcagttctacggcctgagcgagaacgacgagtggacccaggacagagccaagcccgtgacccagatcgtgtctgccgaagcctggggcagagccgattgcggcatcaccagcgccagctaccaccagggcgtgctgagcgccaccatcctgtacgagatcctgctgggcaaggccaccctgtacgccgtgctggtgtctgccctggtgctgatggctatggtcaagcggaaggacagccggggaagggccaagcgatctggatctggagcaacaaacttctcactactcaaacaagcaggtgacgtggaggagaatcccgggcctactagtatggactggatttggcgcatccttttccttgtcggcgctgctaccggcgcccattccgggcccgaagtgcagctggttgaatctggcggaggactggttcagcctggcggatctctgagactgtcttgtgccgcctctggcttcgccagcgactactatatcatcggctggttcagacaggcccctggcaaagagagagagggcgtcagctgtatcagcagcagatacgccaacaccaactacgccgacagcgtgaagggcagattcaccatcagccgggacaacgccaagaacaccgtgtacctccagatgaacagcctgaagcctgaggacaccgccgtgtactactgtgccgccgacaccagaagatacacctgtcctgacattgccaccatgcaccggaacttcgattcttggggccagggcacactggtcaccgtttcttctggatccggcggcggaggatctggcggaggcggatctgggggcggaggctctttcgaacaagttcagcttcaacagcctggcgctgagctggtcaaacctggcgcttctgtgaagatgagctgcaaagccagcggctacgccttcagcagctactggatcaactggatgaagcagaaacccggccagggactcgaatggatcggccaaatctatcccggcgacggcgacaccaactacaacggcaagttcaagggcagagccacactgaccgccgatacctctagcagcacagcctacatgcagctgagcagcctgaccagcgaagatagcgccgtgtacttctgtgcccggtccatcacaacagtcgtgggctgcgctatggactattggggccagggaacaagcgtgaccgtgtctagtacgcgtatccagaaccctgatcctgccgtgtaccagctgcgggatagcaagagcagcgacaagagcgtgtgtctgttcaccgacttcgacagccagaccaacgtgtcccagagcaaggactccgacgtgtacatcaccgataagtgcgtgctggacatgcggagcatggacttcaagagcaactccgccgtggcctggtccaacaagtccgatttcgcctgcgccaacgccttcaacaacagcattatccccgaggacacattcttcccaagcagcgacgtgccctgcgacgtgaagctggtggaaaagagcttcgagacagacaccaacctgaacttccagaacctgagcgtgatcggcttcagaatcctgctgctgaaagtggccggctttaacctgctgatgaccctgcggctgtggtccagccgcgccaagagaagcggatctggcgtgaagcagaccctgaatttcgacctgctgaagctggctggcgacgtggaatccaacccaggcccttctagaggccatatgaccgagtacaagcccacggtgcgcctcgccacccgcgacgacgtccccagggccgtacgcaccctcgccgccgcgttcgccgactaccccgccacgcgccacaccgtcgatccggaccgccacatcgagcgggtcaccgagctgcaagaactcttcctcacgcgcgtcgggctcgacatcggcaaggtgtgggtcgcggacgacggcgccgcggtggcggtctggaccacgccggagagcgtcgaagcgggggcggtgttcgccgagatcggcccgcgcatggccgagttgagcggttcccggctggccgcgcagcaacagatggaaggcctcctggcgccgcaccggcccaaggagcccgcgtggttcctggccaccgtcggcgtctcgcccgaccaccagggcaagggtctgggcagcgccgtcgtgctccccggagtggaggcggccgagcgcgccggggtgcccgccttcctggagacctccgcgccccgcaacctccccttctacgagcggctcggcttcaccgtcaccgccgacgtcgaggtgcccgaaggaccgcgcacctggtgcatgacccgcaagcccggtgcctga

SEQ ID NO: 6105 - DNA, 3825 bp, Artificial Sequence
  Synthetic Polynucloetide
atggccttaccagtgaccgccttgctcctgccgctggccttgctgctccacgccgccaggccggaggttcagctgcttgagtctggcggaggactggttcaacctggcggaagcctgagactgtcttgtgccgccagcggcttcacctttagcagctacgccatgagctgggtccgacaggctcctggcaaaggactggaatgggtgtccagcatcagcggcagcggcgactacatctactacgccgatagcgtgaagggcagattcaccatcagccgggacatcagcaagaacaccctgtacctccagatgaacagcctgagagccgaggacaccgccgtgtactactgtgccaaagaaggcaccggcgctaacagcagcctggccgattatagaggccagggcacactggtcaccgtgtctagtggcggaggaagcggcggaggatctgaagtgcaactggtggaatctggaggctctctggtgcagccagggggaagcctgagactgtcttgtgccgcttccggcttcaccttcgacgactacgccatgagctgggtgcgccaggtgccaggcaaaggcctggaatgggtgtccagcatcaactggagcggcacccacaccgattacgccgactccgtgaaaggcagattcacaatcagcagaaacaacgccaacaataccctgtacctgcagatgaactccctgaagtctgaggatacagcagtgtattattgcgccaagaactggcgggacgccggcaccacttggtttgagaaaagcggctctgccggacagggaacccaagtgacagtgtcctccggtaccggcggaggcggatctggcggcggaggtagcggtggcggaggatctgaattcgacatccagatgacacagagccctagcagcctgtctgccagcgtgggagacagagtgaccatcacatgcaaggccagcgaccacatcaacaactggctggcctggtatcagcagaagcctggacaggcccctaagctgctgatctacggcgctaccacactggaaacaggcgtgcccagcagattttctggcagcggctctggcaccgactacaccctgacaatatccagcctccagcctgaggacttcgccacctactactgtcagcagagctggaacaccccttggacattcggccagggcaccaagctggaaatcaagagactcgaggacctgaagaacgtgttcccacctgaggtggccgtgttcgagcctagcgaggccgagatcagccacacccagaaagccaccctcgtgtgcctggctaccggcttctaccccgaccatgtggaactgtcttggtgggtcaacggcaaagaggtgcacagcggcgtgtgtaccgacccccagccactgaaagaacagcccgccctgaacgacagccggtactgcctgagcagcagactgagagtgtccgccaccttctggcagaacccccggaaccacttcagatgccaggtgcagttctacggcctgagcgagaacgacgagtggacccaggacagagccaagcccgtgacccagatcgtgtctgccgaagcctggggcagagccgattgcggctttaccagcgagagctaccagcagggcgtgctgagcgccaccatcctgtacgagatcctgctgggcaaggccaccctgtacgccgtgctggtgtctgccctggtgctgatggctatggtcaagcggaaggacagccggggaagggccaagcgatctggatctggagcaacaaacttctcactactcaaacaagcaggtgacgtggaggagaatcccgggcctactagtatggactggatttggcgcatccttttccttgtcggcgctgctaccggcgcccattccgggcccgaagtgcagctggttgaatctggcggaggactggttcagcctggcggatctctgagactgtcttgtgccgcctctggcttcgccagcgactactatatcatcggctggttcagacaggcccctggcaaagagagagagggcgtcagctgtatcagcagcagatacgccaacaccaactacgccgacagcgtgaagggcagattcaccatcagccgggacaacgccaagaacaccgtgtacctccagatgaacagcctgaagcctgaggacaccgccgtgtactactgtgccgccgacaccagaagatacacctgtcctgacattgccaccatgcaccggaacttcgattcttggggccagggcacactggtcaccgtttcttctggatccggcggcggaggatctggcggaggcggatctgggggcggaggctctttcgaacaagttcagcttcaacagcctggcgctgagctggtcaaacctggcgcttctgtgaagatgagctgcaaagccagcggctacgccttcagcagctactggatcaactggatgaagcagaaacccggccagggactcgaatggatcggccaaatctatcccggcgacggcgacaccaactacaacggcaagttcaagggcagagccacactgaccgccgatacctctagcagcacagcctacatgcagctgagcagcctgaccagcgaagatagcgccgtgtacttctgtgcccggtccatcacaacagtcgtgggctgcgctatggactattggggccagggaacaagcgtgaccgtgtctagtacgcgtatccagaaccctgatcctgccgtgtaccagctgcgggatagcaagagcagcgacaagagcgtgtgtctgttcaccgacttcgacagccagaccaacgtgtcccagagcaaggactccgacgtgtacatcaccgataagtgcgtgctggacatgcggagcatggacttcaagagcaactccgccgtggcctggtccaacaagtccgatttcgcctgcgccaacgccttcaacaacagcattatccccgaggacacattcttcccaagccccgagagcagctgcgacgtgaagctggtggaaaagagcttcgagacagacaccaacctgaacttccagaacctgagcgtgatcggcttcagaatcctgctgctgaaagtggccggctttaacctgctgatgaccctgcggctgtggtccagccgcgccaagagaagcggatctggcgtgaagcagaccctgaatttcgacctgctgaagctggctggcgacgtggaatccaacccaggcccttctagaggccatatgaccgagtacaagcccacggtgcgcctcgccacccgcgacgacgtccccagggccgtacgcaccctcgccgccgcgttcgccgactaccccgccacgcgccacaccgtcgatccggaccgccacatcgagcgggtcaccgagctgcaagaactcttcctcacgcgcgtcgggctcgacatcggcaaggtgtgggtcgcggacgacggcgccgcggtggcggtctggaccacgccggagagcgtcgaagcgggggcggtgttcgccgagatcggcccgcgcatggccgagttgagcggttcccggctggccgcgcagcaacagatggaaggcctcctggcgccgcaccggcccaaggagcccgcgtggttcctggccaccgtcggcgtctcgcccgaccaccagggcaagggtctgggcagcgccgtcgtgctccccggagtggaggcggccgagcgcgccggggtgcccgccttcctggagacctccgcgccccgcaacctccccttctacgagcggctcggcttcaccgtcaccgccgacgtcgaggtgcccgaaggaccgcgcacctggtgcatgacccgcaagcccggtgcctga

SEQ ID NO: 6106 - DNA, 3123 bp, Artificial Sequence
  Synthetic Polynucloetide
atggccttaccagtgaccgccttgctcctgccgctggccttgctgctccacgccgccaggccggaggttcagctgcttgagtctggcggaggactggttcaacctggcggaagcctgagactgtcttgtgccgccagcggcttcacctttagcagctacgccatgagctgggtccgacaggctcctggcaaaggactggaatgggtgtccagcatcagcggcagcggcgactacatctactacgccgatagcgtgaagggcagattcaccatcagccgggacatcagcaagaacaccctgtacctccagatgaacagcctgagagccgaggacaccgccgtgtactactgtgccaaagaaggcaccggcgctaacagcagcctggccgattatagaggccagggcacactggtcaccgtgtctagtggcggaggaagcggcggaggatctgaagtgcaactggtggaatctggaggctctctggtgcagccagggggaagcctgagactgtcttgtgccgcttccggcttcaccttcgacgactacgccatgagctgggtgcgccaggtgccaggcaaaggcctggaatgggtgtccagcatcaactggagcggcacccacaccgattacgccgactccgtgaaaggcagattcacaatcagcagaaacaacgccaacaataccctgtacctgcagatgaactccctgaagtctgaggatacagcagtgtattattgcgccaagaactggcgggacgccggcaccacttggtttgagaaaagcggctctgccggacagggaacccaagtgacagtgtcctccggtaccggcggaggcggatctggcggcggaggtagcggtggcggaggatctgaattcgacatccagatgacacagagccctagcagcctgtctgccagcgtgggagacagagtgaccatcacatgcaaggccagcgaccacatcaacaactggctggcctggtatcagcagaagcctggacaggcccctaagctgctgatctacggcgctaccacactggaaacaggcgtgcccagcagattttctggcagcggctctggcaccgactacaccctgacaatatccagcctccagcctgaggacttcgccacctactactgtcagcagagctggaacaccccttggacattcggccagggcaccaagctggaaatcaagagactcgaggacctgaagaacgtgttcccacctgaggtggccgtgttcgagcctagcgaggccgagatcagccacacccagaaagccaccctcgtgtgcctggctaccggcttctaccccgaccatgtggaactgtcttggtgggtcaacggcaaagaggtgcacagcggcgtgtgtaccgacccccagccactgaaagaacagcccgccctgaacgacagccggtactgcctgagcagcagactgagagtgtccgccaccttctggcagaacccccggaaccacttcagatgccaggtgcagttctacggcctgagcgagaacgacgagtggacccaggacagagccaagcccgtgacccagatcgtgtctgccgaagcctggggcagagccgattgcggctttaccagcgagagctaccagcagggcgtgctgagcgccaccatcctgtacgagatcctgctgggcaaggccaccctgtacgccgtgctggtgtctgccctggtgctgatggctatggtcaagcggaaggacagccggggaagggccaagcgatctggatctggagcaacaaacttctcactactcaaacaagcaggtgacgtggaggagaatcccgggcctactagtatggactggatttggcgcatccttttccttgtcggcgctgctaccggcgcccattccgggcccgaagtgcagctggttgaatctggcggaggactggttcagcctggcggatctctgagactgtcttgtgccgcctctggcttcgccagcgactactatatcatcggctggttcagacaggcccctggcaaagagagagagggcgtcagctgtatcagcagcagatacgccaacaccaactacgccgacagcgtgaagggcagattcaccatcagccgggacaacgccaagaacaccgtgtacctccagatgaacagcctgaagcctgaggacaccgccgtgtactactgtgccgccgacaccagaagatacacctgtcctgacattgccaccatgcaccggaacttcgattcttggggccagggcacactggtcaccgtttcttctggatccggcggcggaggatctggcggaggcggatctgggggcggaggctctttcgaacaagttcagcttcaacagcctggcgctgagctggtcaaacctggcgcttctgtgaagatgagctgcaaagccagcggctacgccttcagcagctactggatcaactggatgaagcagaaacccggccagggactcgaatggatcggccaaatctatcccggcgacggcgacaccaactacaacggcaagttcaagggcagagccacactgaccgccgatacctctagcagcacagcctacatgcagctgagcagcctgaccagcgaagatagcgccgtgtacttctgtgcccggtccatcacaacagtcgtgggctgcgctatggactattggggccagggaacaagcgtgaccgtgtctagtacgcgtatccagaaccctgatcctgccgtgtaccagctgcgggatagcaagagcagcgacaagagcgtgtgtctgttcaccgacttcgacagccagaccaacgtgtcccagagcaaggactccgacgtgtacatcaccgataagtgcgtgctggacatgcggagcatggacttcaagagcaactccgccgtggcctggtccaacaagtccgatttcgcctgcgccaacgccttcaacaacagcattatccccgaggacacattcttcccaagccccgagagcagctgcgacgtgaagctggtggaaaagagcttcgagacagacaccaacctgaacttccagaacctgagcgtgatcggcttcagaatcctgctgctgaaagtggccggctttaacctgctgatgaccctgcggctgtggtccagc

SEQ ID NO: 6107 - DNA, 3798 bp, Artificial Sequence
  Synthetic Polynucloetide
atggccttaccagtgaccgccttgctcctgccgctggccttgctgctccacgccgccaggccggaggttcagctgcttgagtctggcggaggactggttcaacctggcggaagcctgagactgtcttgtgccgccagcggcttcacctttagcagctacgccatgagctgggtccgacaggctcctggcaaaggactggaatgggtgtccagcatcagcggcagcggcgactacatctactacgccgatagcgtgaagggcagattcaccatcagccgggacatcagcaagaacaccctgtacctccagatgaacagcctgagagccgaggacaccgccgtgtactactgtgccaaagaaggcaccggcgctaacagcagcctggccgattatagaggccagggcacactggtcaccgtgtctagtggcggaggaagcggcggaggatctgaagtgcaactggtggaatctggaggctctctggtgcagccagggggaagcctgagactgtcttgtgccgcttccggcttcaccttcgacgactacgccatgagctgggtgcgccaggtgccaggcaaaggcctggaatgggtgtccagcatcaactggagcggcacccacaccgattacgccgactccgtgaaaggcagattcacaatcagcagaaacaacgccaacaataccctgtacctgcagatgaactccctgaagtctgaggatacagcagtgtattattgcgccaagaactggcgggacgccggcaccacttggtttgagaaaagcggctctgccggacagggaacccaagtgacagtgtcctccggtaccggcggaggcggatctggcggcggaggtagcggtggcggaggatctgaattcgacatccagatgacacagagccctagcagcctgtctgccagcgtgggagacagagtgaccatcacatgcaaggccagcgaccacatcaacaactggctggcctggtatcagcagaagcctggacaggcccctaagctgctgatctacggcgctaccacactggaaacaggcgtgcccagcagattttctggcagcggctctggcaccgactacaccctgacaatatccagcctccagcctgaggacttcgccacctactactgtcagcagagctggaacaccccttggacattcggccagggcaccaagctggaaatcaagagactcgaggacctgaagaacgtgttcccacctgaggtggccgtgttcgagcctagcgaggccgagatcagccacacccagaaagccaccctcgtgtgcctggctaccggcttctaccccgaccatgtggaactgtcttggtgggtcaacggcaaagaggtgcacagcggcgtgtgtaccgacccccagccactgaaagaacagcccgccctgaacgacagccggtactgcctgagcagcagactgagagtgtccgccaccttctggcagaacccccggaaccacttcagatgccaggtgcagttctacggcctgagcgagaacgacgagtggacccaggacagagccaagcccgtgacccagatcgtgtctgccgaagcctggggcagagccgattgcggctttaccagcgagagctaccagcagggcgtgctgagcgccaccatcctgtacgagatcctgctgggcaaggccaccctgtacgccgtgctggtgtctgccctggtgctgatggctatggtcaagcggaaggacagccggggaagggccaagcgatctggatctggagcaacaaacttctcactactcaaacaagcaggtgacgtggaggagaatcccgggcctactagtatggactggatttggcgcatccttttccttgtcggcgctgctaccggcgcccattccgggcccgaagtgcagctggttgaatctggcggaggactggttcagcctggcggatctctgagactgtcttgtgccgcctctggcttcgccagcgactactatatcatcggctggttcagacaggcccctggcaaagagagagagggcgtcagctgtatcagcagcagatacgccaacaccaactacgccgacagcgtgaagggcagattcaccatcagccgggacaacgccaagaacaccgtgtacctccagatgaacagcctgaagcctgaggacaccgccgtgtactactgtgccgccgacaccagaagatacacctgtcctgacattgccaccatgcaccggaacttcgattcttggggccagggcacactggtcaccgtttcttctggatccggcggcggaggatctggcggaggcggatctgggggcggaggctctttcgaacaagttcagcttcaacagcctggcgctgagctggtcaaacctggcgcttctgtgaagatgagctgcaaagccagcggctacgccttcagcagctactggatcaactggatgaagcagaaacccggccagggactcgaatggatcggccaaatctatcccggcgacggcgacaccaactacaacggcaagttcaagggcagagccacactgaccgccgatacctctagcagcacagcctacatgcagctgagcagcctgaccagcgaagatagcgccgtgtacttctgtgcccggtccatcacaacagtcgtgggctgcgctatggactattggggccagggaacaagcgtgaccgtgtctagtacgcgtatccagaaccctgatcctgccgtgtaccagctgcgggatagcaagagcagcgacaagagcgtgtgtctgttcaccgacttcgacagccagaccaacgtgtcccagagcaaggactccgacgtgtacatcaccgataagtgcgtgctggacatgcggagcatggacttcaagagcaactccgccgtggcctggtccaacaagtccgatttcgcctgcgccaacgccttcaacaacagcattatccccgaggacacattcttcccaagccccgagagcagctgcgacgtgaagctggtggaaaagagcttcgagacagacaccaacctgaacttccagaacctgagcgtgatcggcttcagaatcctgctgctgaaagtggccggctttaacctgctgatgaccctgcggctgtggtccagccgcgccaagagaagcggatctggcgtgaagcagaccctgaatttcgacctgctgaagctggctggcgacgtggaatccaacccaggcccttctagaggcgggatccacaccatggctacctacgaggtgctgtgcgaggtggcaagaaagctgggcaccgacgacagagaagtggtgctgttcctgctgaacgtgttcatccctcagcctacactggcccagctgatcggtgcactgagagccctgaaagaggaaggccggctgacctttcctctgctggccgaatgcctgttcagagccggaagaagggatctgctgcgggacctgctgcatctggaccccagatttctggaaagacacctggccggcaccatgagctacttcagcccttaccagctgaccgtgctgcacgttgacggcgaactgtgcgccagagatattcggagcctgatcttcctgagcaaggacaccatcggcagccggtctacccctcagacatttctgcactgggtgtactgcatggaaaacctggacctgctcggccccacagatgtggatgccctgatgtccatgctgagaagcctgagcagagtggacctccagagacaggtgcagacactgatgggactgcacctgagcggacctagccacagccagcactacagacacacccct

SEQ ID NO: 6108 - DNA, 3135 bp, Artificial Sequence
  Synthetic Polynucloetide
atggccttaccagtgaccgccttgctcctgccgctggccttgctgctccacgccgccaggccggaggttcagctgcttgagtctggcggaggactggttcaacctggcggaagcctgagactgtcttgtgccgccagcggcttcacctttagcagctacgccatgagctgggtccgacaggctcctggcaaaggactggaatgggtgtccagcatcagcggcagcggcgactacatctactacgccgatagcgtgaagggcagattcaccatcagccgggacatcagcaagaacaccctgtacctccagatgaacagcctgagagccgaggacaccgccgtgtactactgtgccaaagaaggcaccggcgctaacagcagcctggccgattatagaggccagggcacactggtcaccgtgtctagtggcggaggaagcggcggaggatctgaagtgcaactggtggaatctggaggctctctggtgcagccagggggaagcctgagactgtcttgtgccgcttccggcttcaccttcgacgactacgccatgagctgggtgcgccaggtgccaggcaaaggcctggaatgggtgtccagcatcaactggagcggcacccacaccgattacgccgactccgtgaaaggcagattcacaatcagcagaaacaacgccaacaataccctgtacctgcagatgaactccctgaagtctgaggatacagcagtgtattattgcgccaagaactggcgggacgccggcaccacttggtttgagaaaagcggctctgccggacagggaacccaagtgacagtgtcctccggtaccggcggaggcggatctggcggcggaggtagcggtggcggaggatctgaattcgacatccagatgacacagagccctagcagcctgtctgccagcgtgggagacagagtgaccatcacatgcaaggccagcgaccacatcaacaactggctggcctggtatcagcagaagcctggacaggcccctaagctgctgatctacggcgctaccacactggaaacaggcgtgcccagcagattttctggcagcggctctggcaccgactacaccctgacaatatccagcctccagcctgaggacttcgccacctactactgtcagcagagctggaacaccccttggacattcggccagggcaccaagctggaaatcaagagactcgagatccagaaccctgatcctgccgtgtaccagctgcgggatagcaagagcagcgacaagagcgtgtgtctgttcaccgacttcgacagccagaccaacgtgtcccagagcaaggactccgacgtgtacatcaccgataagtgcgtgctggacatgcggagcatggacttcaagagcaactccgccgtggcctggtccaacaagtccgatttcgcctgcgccaacgccttcaacaacagcattatccccgaggacacattcttcccaagccccgagagcagctgcgacgtgaagctggtggaaaagagcttcgagacagacaccaacctgaacttccagaacctgagcgtgatcggcttcagaatcctgctgctgaaagtggccggctttaacctgctgatgaccctgcggctgtggtccagccgcgccaagagaagcggatctggcgtgaagcagaccctgaatttcgacctgctgaagctggctggcgacgtggaatccaacccaggccctactagtatggactggatttggcgcatccttttccttgtcggcgctgctaccggcgcccattccgggcccgaagtgcagctggttgaatctggcggaggactggttcagcctggcggatctctgagactgtcttgtgccgcctctggcttcgccagcgactactatatcatcggctggttcagacaggcccctggcaaagagagagagggcgtcagctgtatcagcagcagatacgccaacaccaactacgccgacagcgtgaagggcagattcaccatcagccgggacaacgccaagaacaccgtgtacctccagatgaacagcctgaagcctgaggacaccgccgtgtactactgtgccgccgacaccagaagatacacctgtcctgacattgccaccatgcaccggaacttcgattcttggggccagggcacactggtcaccgtttcttctggatccggcggcggaggatctggcggaggcggatctgggggcggaggctctttcgaacaagttcagcttcaacagcctggcgctgagctggtcaaacctggcgcttctgtgaagatgagctgcaaagccagcggctacgccttcagcagctactggatcaactggatgaagcagaaacccggccagggactcgaatggatcggccaaatctatcccggcgacggcgacaccaactacaacggcaagttcaagggcagagccacactgaccgccgatacctctagcagcacagcctacatgcagctgagcagcctgaccagcgaagatagcgccgtgtacttctgtgcccggtccatcacaacagtcgtgggctgcgctatggactattggggccagggaacaagcgtgaccgtgtctagtacgcgtgaggacctgaagaacgtgttcccacctgaggtggccgtgttcgagcctagcgaggccgagatcagccacacccagaaagccaccctcgtgtgcctggctaccggcttctaccccgaccatgtggaactgtcttggtgggtcaacggcaaagaggtgcacagcggcgtgtgtaccgacccccagccactgaaagaacagcccgccctgaacgacagccggtactgcctgagcagcagactgagagtgtccgccaccttctggcagaacccccggaaccacttcagatgccaggtgcagttctacggcctgagcgagaacgacgagtggacccaggacagagccaagcccgtgacccagatcgtgtctgccgaagcctggggcagagccgattgcggctttaccagcgagagctaccagcagggcgtgctgagcgccaccatcctgtacgagatcctgctgggcaaggccaccctgtacgccgtgctggtgtctgccctggtgctgatggctatggtcaagcggaaggacagccgggga

SEQ ID NO: 6109 - DNA, 3801 bp, Artificial Sequence
  Synthetic Polynucloetide
atggccttaccagtgaccgccttgctcctgccgctggccttgctgctccacgccgccaggccggaggttcagctgcttgagtctggcggaggactggttcaacctggcggaagcctgagactgtcttgtgccgccagcggcttcacctttagcagctacgccatgagctgggtccgacaggctcctggcaaaggactggaatgggtgtccagcatcagcggcagcggcgactacatctactacgccgatagcgtgaagggcagattcaccatcagccgggacatcagcaagaacaccctgtacctccagatgaacagcctgagagccgaggacaccgccgtgtactactgtgccaaagaaggcaccggcgctaacagcagcctggccgattatagaggccagggcacactggtcaccgtgtctagtggcggaggaagcggcggaggatctgaagtgcaactggtggaatctggaggctctctggtgcagccagggggaagcctgagactgtcttgtgccgcttccggcttcaccttcgacgactacgccatgagctgggtgcgccaggtgccaggcaaaggcctggaatgggtgtccagcatcaactggagcggcacccacaccgattacgccgactccgtgaaaggcagattcacaatcagcagaaacaacgccaacaataccctgtacctgcagatgaactccctgaagtctgaggatacagcagtgtattattgcgccaagaactggcgggacgccggcaccacttggtttgagaaaagcggctctgccggacagggaacccaagtgacagtgtcctccggtaccggcggaggcggatctggcggcggaggtagcggtggcggaggatctgaattcgacatccagatgacacagagccctagcagcctgtctgccagcgtgggagacagagtgaccatcacatgcaaggccagcgaccacatcaacaactggctggcctggtatcagcagaagcctggacaggcccctaagctgctgatctacggcgctaccacactggaaacaggcgtgcccagcagattttctggcagcggctctggcaccgactacaccctgacaatatccagcctccagcctgaggacttcgccacctactactgtcagcagagctggaacaccccttggacattcggccagggcaccaagctggaaatcaagagactcgagatccagaaccctgatcctgccgtgtaccagctgcgggatagcaagagcagcgacaagagcgtgtgtctgttcaccgacttcgacagccagaccaacgtgtcccagagcaaggactccgacgtgtacatcaccgataagtgcgtgctggacatgcggagcatggacttcaagagcaactccgccgtggcctggtccaacaagtccgatttcgcctgcgccaacgccttcaacaacagcattatccccgaggacacattcttcccaagccccgagagcagctgcgacgtgaagctggtggaaaagagcttcgagacagacaccaacctgaacttccagaacctgagcgtgatcggcttcagaatcctgctgctgaaagtggccggctttaacctgctgatgaccctgcggctgtggtccagccgcgccaagagaagcggatctggcgtgaagcagaccctgaatttcgacctgctgaagctggctggcgacgtggaatccaacccaggccctactagtatggactggatttggcgcatccttttccttgtcggcgctgctaccggcgcccattccgggcccgaagtgcagctggttgaatctggcggaggactggttcagcctggcggatctctgagactgtcttgtgccgcctctggcttcgccagcgactactatatcatcggctggttcagacaggcccctggcaaagagagagagggcgtcagctgtatcagcagcagatacgccaacaccaactacgccgacagcgtgaagggcagattcaccatcagccgggacaacgccaagaacaccgtgtacctccagatgaacagcctgaagcctgaggacaccgccgtgtactactgtgccgccgacaccagaagatacacctgtcctgacattgccaccatgcaccggaacttcgattcttggggccagggcacactggtcaccgtttcttctggatccggcggcggaggatctggcggaggcggatctgggggcggaggctctttcgaacaagttcagcttcaacagcctggcgctgagctggtcaaacctggcgcttctgtgaagatgagctgcaaagccagcggctacgccttcagcagctactggatcaactggatgaagcagaaacccggccagggactcgaatggatcggccaaatctatcccggcgacggcgacaccaactacaacggcaagttcaagggcagagccacactgaccgccgatacctctagcagcacagcctacatgcagctgagcagcctgaccagcgaagatagcgccgtgtacttctgtgcccggtccatcacaacagtcgtgggctgcgctatggactattggggccagggaacaagcgtgaccgtgtctagtacgcgtgaggacctgaagaacgtgttcccacctgaggtggccgtgttcgagcctagcgaggccgagatcagccacacccagaaagccaccctcgtgtgcctggctaccggcttctaccccgaccatgtggaactgtcttggtgggtcaacggcaaagaggtgcacagcggcgtgtgtaccgacccccagccactgaaagaacagcccgccctgaacgacagccggtactgcctgagcagcagactgagagtgtccgccaccttctggcagaacccccggaaccacttcagatgccaggtgcagttctacggcctgagcgagaacgacgagtggacccaggacagagccaagcccgtgacccagatcgtgtctgccgaagcctggggcagagccgattgcggctttaccagcgagagctaccagcagggcgtgctgagcgccaccatcctgtacgagatcctgctgggcaaggccaccctgtacgccgtgctggtgtctgccctggtgctgatggctatggtcaagcggaaggacagccggggaagggccaagcgatctggatctggagcaacaaacttctcactactcaaacaagcaggtgacgtggaggagaatcccgggccttctagaggcgggatccacaccatggctacctacgaggtgctgtgcgaggtggcaagaaagctgggcaccgacgacagagaagtggtgctgttcctgctgaacgtgttcatccctcagcctacactggcccagctgatcggtgcactgagagccctgaaagaggaaggccggctgacctttcctctgctggccgaatgcctgttcagagccggaagaagggatctgctgcgggacctgctgcatctggaccccagatttctggaaagacacctggccggcaccatgagctacttcagcccttaccagctgaccgtgctgcacgttgacggcgaactgtgcgccagagatattcggagcctgatcttcctgagcaaggacaccatcggcagccggtctacccctcagacatttctgcactgggtgtactgcatggaaaacctggacctgctcggccccacagatgtggatgccctgatgtccatgctgagaagcctgagcagagtggacctccagagacaggtgcagacactgatgggactgcacctgagcggacctagccacagccagcactacagacacacccct

SEQ ID NO: 6110 - DNA, 3825 bp, Artificial Sequence
  Synthetic Polynucloetide
atggccttaccagtgaccgccttgctcctgccgctggccttgctgctccacgccgccaggccggaggttcagctgcttgagtctggcggaggactggttcaacctggcggaagcctgagactgtcttgtgccgccagcggcttcacctttagcagctacgccatgagctgggtccgacaggctcctggcaaaggactggaatgggtgtccagcatcagcggcagcggcgactacatctactacgccgatagcgtgaagggcagattcaccatcagccgggacatcagcaagaacaccctgtacctccagatgaacagcctgagagccgaggacaccgccgtgtactactgtgccaaagaaggcaccggcgctaacagcagcctggccgattatagaggccagggcacactggtcaccgtgtctagtggcggaggaagcggcggaggatctgaagtgcaactggtggaatctggaggctctctggtgcagccagggggaagcctgagactgtcttgtgccgcttccggcttcaccttcgacgactacgccatgagctgggtgcgccaggtgccaggcaaaggcctggaatgggtgtccagcatcaactggagcggcacccacaccgattacgccgactccgtgaaaggcagattcacaatcagcagaaacaacgccaacaataccctgtacctgcagatgaactccctgaagtctgaggatacagcagtgtattattgcgccaagaactggcgggacgccggcaccacttggtttgagaaaagcggctctgccggacagggaacccaagtgacagtgtcctccggtaccggcggaggcggatctggcggcggaggtagcggtggcggaggatctgaattcgacatccagatgacacagagccctagcagcctgtctgccagcgtgggagacagagtgaccatcacatgcaaggccagcgaccacatcaacaactggctggcctggtatcagcagaagcctggacaggcccctaagctgctgatctacggcgctaccacactggaaacaggcgtgcccagcagattttctggcagcggctctggcaccgactacaccctgacaatatccagcctccagcctgaggacttcgccacctactactgtcagcagagctggaacaccccttggacattcggccagggcaccaagctggaaatcaagagactcgaggacctgaagaacgtgttcccacctgaggtggccgtgttcgagcctagcgaggccgagatcagccacacccagaaagccaccctcgtgtgcctggctaccggcttctaccccgaccatgtggaactgtcttggtgggtcaacggcaaagaggtgcacagcggcgtgtctaccgacccccagccactgaaagaacagcccgccctgaacgacagccggtactgcctgagcagcagactgagagtgtccgccaccttctggcagaacccccggaaccacttcagatgccaggtgcagttctacggcctgagcgagaacgacgagtggacccaggacagagccaagcccgtgacccagatcgtgtctgccgaagcctggggcagagccgattgcggctttaccagcgagagctaccagcagggcgtgctgagcgccaccatcctgtacgagatcctgctgggcaaggccaccctgtacgccgtgctggtgtctgccctggtgctgatggctatggtcaagcggaaggacagccggggaagggccaagcgatctggatctggagcaacaaacttctcactactcaaacaagcaggtgacgtggaggagaatcccgggcctactagtatggactggatttggcgcatccttttccttgtcggcgctgctaccggcgcccattccgggcccgaagtgcagctggttgaatctggcggaggactggttcagcctggcggatctctgagactgtcttgtgccgcctctggcttcgccagcgactactatatcatcggctggttcagacaggcccctggcaaagagagagagggcgtcagctgtatcagcagcagatacgccaacaccaactacgccgacagcgtgaagggcagattcaccatcagccgggacaacgccaagaacaccgtgtacctccagatgaacagcctgaagcctgaggacaccgccgtgtactactgtgccgccgacaccagaagatacacctgtcctgacattgccaccatgcaccggaacttcgattcttggggccagggcacactggtcaccgtttcttctggatccggcggcggaggatctggcggaggcggatctgggggcggaggctctttcgaacaagttcagcttcaacagcctggcgctgagctggtcaaacctggcgcttctgtgaagatgagctgcaaagccagcggctacgccttcagcagctactggatcaactggatgaagcagaaacccggccagggactcgaatggatcggccaaatctatcccggcgacggcgacaccaactacaacggcaagttcaagggcagagccacactgaccgccgatacctctagcagcacagcctacatgcagctgagcagcctgaccagcgaagatagcgccgtgtacttctgtgcccggtccatcacaacagtcgtgggctgcgctatggactattggggccagggaacaagcgtgaccgtgtctagtacgcgtatccagaaccctgatcctgccgtgtaccagctgcgggatagcaagagcagcgacaagagcgtgtgtctgttcaccgacttcgacagccagaccaacgtgtcccagagcaaggactccgacgtgtacatcaccgataagaccgtgctggacatgcggagcatggacttcaagagcaactccgccgtggcctggtccaacaagtccgatttcgcctgcgccaacgccttcaacaacagcattatccccgaggacacattcttcccaagccccgagagcagctgcgacgtgaagctggtggaaaagagcttcgagacagacaccaacctgaacttccagaacctgagcgtgatcggcttcagaatcctgctgctgaaagtggccggctttaacctgctgatgaccctgcggctgtggtccagccgcgccaagagaagcggatctggcgtgaagcagaccctgaatttcgacctgctgaagctggctggcgacgtggaatccaacccaggcccttctagaggccatatgaccgagtacaagcccacggtgcgcctcgccacccgcgacgacgtccccagggccgtacgcaccctcgccgccgcgttcgccgactaccccgccacgcgccacaccgtcgatccggaccgccacatcgagcgggtcaccgagctgcaagaactcttcctcacgcgcgtcgggctcgacatcggcaaggtgtgggtcgcggacgacggcgccgcggtggcggtctggaccacgccggagagcgtcgaagcgggggcggtgttcgccgagatcggcccgcgcatggccgagttgagcggttcccggctggccgcgcagcaacagatggaaggcctcctggcgccgcaccggcccaaggagcccgcgtggttcctggccaccgtcggcgtctcgcccgaccaccagggcaagggtctgggcagcgccgtcgtgctccccggagtggaggcggccgagcgcgccggggtgcccgccttcctggagacctccgcgccccgcaacctccccttctacgagcggctcggcttcaccgtcaccgccgacgtcgaggtgcccgaaggaccgcgcacctggtgcatgacccgcaagcccggtgcctga

SEQ ID NO: 6111 - DNA, 4071 bp, Artificial Sequence
  Synthetic Polynucloetide
atggccttaccagtgaccgccttgctcctgccgctggccttgctgctccacgccgccaggccggaggttcagctgcttgagtctggcggaggactggttcaacctggcggaagcctgagactgtcttgtgccgccagcggcttcacctttagcagctacgccatgagctgggtccgacaggctcctggcaaaggactggaatgggtgtccagcatcagcggcagcggcgactacatctactacgccgatagcgtgaagggcagattcaccatcagccgggacatcagcaagaacaccctgtacctccagatgaacagcctgagagccgaggacaccgccgtgtactactgtgccaaagaaggcaccggcgctaacagcagcctggccgattatagaggccagggcacactggtcaccgtgtctagtggcggaggaagcggcggaggatctgaagtgcaactggtggaatctggaggctctctggtgcagccagggggaagcctgagactgtcttgtgccgcttccggcttcaccttcgacgactacgccatgagctgggtgcgccaggtgccaggcaaaggcctggaatgggtgtccagcatcaactggagcggcacccacaccgattacgccgactccgtgaaaggcagattcacaatcagcagaaacaacgccaacaataccctgtacctgcagatgaactccctgaagtctgaggatacagcagtgtattattgcgccaagaactggcgggacgccggcaccacttggtttgagaaaagcggctctgccggacagggaacccaagtgacagtgtcctccggtaccggcggaggcggatctggcggcggaggtagcggtggcggaggatctgaattcgacatccagatgacacagagccctagcagcctgtctgccagcgtgggagacagagtgaccatcacatgcaaggccagcgaccacatcaacaactggctggcctggtatcagcagaagcctggacaggcccctaagctgctgatctacggcgctaccacactggaaacaggcgtgcccagcagattttctggcagcggctctggcaccgactacaccctgacaatatccagcctccagcctgaggacttcgccacctactactgtcagcagagctggaacaccccttggacattcggccagggcaccaagctggaaatcaagagactcgaggacctgaagaacgtgttcccacctgaggtggccgtgttcgagcctagcgaggccgagatcagccacacccagaaagccaccctcgtgtgcctggctaccggcttctaccccgaccatgtggaactgtcttggtgggtcaacggcaaagaggtgcacagcggcgtgtctaccgacccccagccactgaaagaacagcccgccctgaacgacagccggtactgcctgagcagcagactgagagtgtccgccaccttctggcagaacccccggaaccacttcagatgccaggtgcagttctacggcctgagcgagaacgacgagtggacccaggacagagccaagcccgtgacccagatcgtgtctgccgaagcctggggcagagccgattgcggctttaccagcgagagctaccagcagggcgtgctgagcgccaccatcctgtacgagatcctgctgggcaaggccaccctgtacgccgtgctggtgtctgccctggtgctgatggctatggtcaagcggaaggacagccggggaagggccaagcgatctggatctggagcaacaaacttctcactactcaaacaagcaggtgacgtggaggagaatcccgggcctactagtatggactggatttggcgcatccttttccttgtcggcgctgctaccggcgcccattccgggcccgaagtgcagctggttgaatctggcggaggactggttcagcctggcggatctctgagactgtcttgtgccgcctctggcttcgccagcgactactatatcatcggctggttcagacaggcccctggcaaagagagagagggcgtcagctgtatcagcagcagatacgccaacaccaactacgccgacagcgtgaagggcagattcaccatcagccgggacaacgccaagaacaccgtgtacctccagatgaacagcctgaagcctgaggacaccgccgtgtactactgtgccgccgacaccagaagatacacctgtcctgacattgccaccatgcaccggaacttcgattcttggggccagggcacactggtcaccgtttcttctggatccggcggcggaggatctggcggaggcggatctgggggcggaggctctttcgaacaagttcagcttcaacagcctggcgctgagctggtcaaacctggcgcttctgtgaagatgagctgcaaagccagcggctacgccttcagcagctactggatcaactggatgaagcagaaacccggccagggactcgaatggatcggccaaatctatcccggcgacggcgacaccaactacaacggcaagttcaagggcagagccacactgaccgccgatacctctagcagcacagcctacatgcagctgagcagcctgaccagcgaagatagcgccgtgtacttctgtgcccggtccatcacaacagtcgtgggctgcgctatggactattggggccagggaacaagcgtgaccgtgtctagtacgcgtgagcagaaactgatctcggaagaggatgggagcggcaccccattcccttctctggcccctcccatcatgctgctggtggacggcaagcagcagatggtggtcgtgtgcctggtgctggatgtggccccacctggactggacagccccatctggtttagcgccggcaatggctctgccctggacgcctttacctacggcccaagccctgccaccgatggcacctggacaaatctggcccacctgagcctgcccagcgaggaactggcttcttgggagcctctcgtgtgccacacaggacctggcgctgagggacacagcagatccacccagcctatgcacctgtctggcgaggccagcaccgccagaacctgtcctcaggaacctctgagaggcacccctggcggagcactgtggctgggagtgctgagactgctgctgttcaagctgctgctgtttgacctgctgctgacctgctcctgtctgtgcgatcctgccggccctctgccttctcctgccaccaccacaagactgagagccctgggcagccacagactgcaccctgccacagagacaggcggcagagaggccacaagcagccctagaccccagcccagagacagaagatggggcgataccccccctggcagaaagcctggatctccagtccgcgccaagagaagcggatctggcgtgaagcagaccctgaatttcgacctgctgaagctggctggcgacgtggaatccaacccaggcccttctagaggccatatgaccgagtacaagcccacggtgcgcctcgccacccgcgacgacgtccccagggccgtacgcaccctcgccgccgcgttcgccgactaccccgccacgcgccacaccgtcgatccggaccgccacatcgagcgggtcaccgagctgcaagaactcttcctcacgcgcgtcgggctcgacatcggcaaggtgtgggtcgcggacgacggcgccgcggtggcggtctggaccacgccggagagcgtcgaagcgggggcggtgttcgccgagatcggcccgcgcatggccgagttgagcggttcccggctggccgcgcagcaacagatggaaggcctcctggcgccgcaccggcccaaggagcccgcgtggttcctggccaccgtcggcgtctcgcccgaccaccagggcaagggtctgggcagcgccgtcgtgctccccggagtggaggcggccgagcgcgccggggtgcccgccttcctggagacctccgcgccccgcaacctccccttctacgagcggctcggcttcaccgtcaccgccgacgtcgaggtgcccgaaggaccgcgcacctggtgcatgacccgcaagcccggtgcctga

SEQ ID NO: 6112 - DNA, 3936 bp, Artificial Sequence
  Synthetic Polynucloetide
atggccttaccagtgaccgccttgctcctgccgctggccttgctgctccacgccgccaggccggaggttcagctgcttgagtctggcggaggactggttcaacctggcggaagcctgagactgtcttgtgccgccagcggcttcacctttagcagctacgccatgagctgggtccgacaggctcctggcaaaggactggaatgggtgtccagcatcagcggcagcggcgactacatctactacgccgatagcgtgaagggcagattcaccatcagccgggacatcagcaagaacaccctgtacctccagatgaacagcctgagagccgaggacaccgccgtgtactactgtgccaaagaaggcaccggcgctaacagcagcctggccgattatagaggccagggcacactggtcaccgtgtctagtggcggaggaagcggcggaggatctgaagtgcaactggtggaatctggaggctctctggtgcagccagggggaagcctgagactgtcttgtgccgcttccggcttcaccttcgacgactacgccatgagctgggtgcgccaggtgccaggcaaaggcctggaatgggtgtccagcatcaactggagcggcacccacaccgattacgccgactccgtgaaaggcagattcacaatcagcagaaacaacgccaacaataccctgtacctgcagatgaactccctgaagtctgaggatacagcagtgtattattgcgccaagaactggcgggacgccggcaccacttggtttgagaaaagcggctctgccggacagggaacccaagtgacagtgtcctccggtaccggcggaggcggatctggcggcggaggtagcggtggcggaggatctgaattcgacatccagatgacacagagccctagcagcctgtctgccagcgtgggagacagagtgaccatcacatgcaaggccagcgaccacatcaacaactggctggcctggtatcagcagaagcctggacaggcccctaagctgctgatctacggcgctaccacactggaaacaggcgtgcccagcagattttctggcagcggctctggcaccgactacaccctgacaatatccagcctccagcctgaggacttcgccacctactactgtcagcagagctggaacaccccttggacattcggccagggcaccaagctggaaatcaagagactcgaggggaaaccaattcccaaccctcttctgggactggattcaaccggcagcggcgacaagcagctggacgccgacgtgtcccccaagcctaccatcttcctgccctctatcgccgagacaaagctccagaaggccggcacctacctgtgcctgctggaaaagttcttcccagatgtgattaagatccactggcaggaaaagaagtccaacaccatcctgggcagccaggaaggcaacaccatgaagaccaacgacacctacatgaagttcagctggctgaccgtgcccgagaagtccctggacaaagaacacagatgcatcgtgcggcacgaaaacaacaagaacggcgtggaccaggaaatcatcttcccacccatcaagaccgatgtgattacaatggaccccaaggacaactgctccaaggacgccaacgataccctgctgctccagctgaccaacaccagcgcctactacatgtacttgttgctgctgctgaagtccgtggtgtacttcgccatcatcacatgctgcctgctgcggagaaccgccttctgctgcaacggcgagaagtctagggccaagcgatctggatctggagcaacaaacttctcactactcaaacaagcaggtgacgtggaggagaatcccgggcctactagtatggactggatttggcgcatccttttccttgtcggcgctgctaccggcgcccattccgggcccgaagtgcagctggttgaatctggcggaggactggttcagcctggcggatctctgagactgtcttgtgccgcctctggcttcgccagcgactactatatcatcggctggttcagacaggcccctggcaaagagagagagggcgtcagctgtatcagcagcagatacgccaacaccaactacgccgacagcgtgaagggcagattcaccatcagccgggacaacgccaagaacaccgtgtacctccagatgaacagcctgaagcctgaggacaccgccgtgtactactgtgccgccgacaccagaagatacacctgtcctgacattgccaccatgcaccggaacttcgattcttggggccagggcacactggtcaccgtttcttctggatccggcggcggaggatctggcggaggcggatctgggggcggaggctctttcgaacaagttcagcttcaacagcctggcgctgagctggtcaaacctggcgcttctgtgaagatgagctgcaaagccagcggctacgccttcagcagctactggatcaactggatgaagcagaaacccggccagggactcgaatggatcggccaaatctatcccggcgacggcgacaccaactacaacggcaagttcaagggcagagccacactgaccgccgatacctctagcagcacagcctacatgcagctgagcagcctgaccagcgaagatagcgccgtgtacttctgtgcccggtccatcacaacagtcgtgggctgcgctatggactattggggccagggaacaagcgtgaccgtgtctagtacgcgtgagcagaaactgatctcggaagaggatgggagcggcagccagcctcacaccaagcccagcgtgttcgtgatgaagaacggcaccaacgtggcctgcctcgtgaaagagttctaccccaaggacatcaggatcaacctggtgtccagcaagaagatcaccgagttcgaccccgccatcgtgatctcccccagcggcaagtacaacgccgtgaagctggggaagtacgaggacagcaacagcgtgacctgctccgtgcagcacgacaacaagaccgtgcacagcaccgactttgaagtgaaaaccgactccaccgaccacgtgaagcccaaagagacagagaacaccaagcagcccagcaagagctgccacaagcccaaggccatcgtgcacaccgagaaagtgaacatgatgagcctgaccgtgctgggcctgcggatgctgttcgccaaaaccgtggccgtgaacttcctgctgaccgccaagctgttcttcctccgcgccaagagaagcggatctggcgtgaagcagaccctgaatttcgacctgctgaagctggctggcgacgtggaatccaacccaggcccttctagaggccatatgaccgagtacaagcccacggtgcgcctcgccacccgcgacgacgtccccagggccgtacgcaccctcgccgccgcgttcgccgactaccccgccacgcgccacaccgtcgatccggaccgccacatcgagcgggtcaccgagctgcaagaactcttcctcacgcgcgtcgggctcgacatcggcaaggtgtgggtcgcggacgacggcgccgcggtggcggtctggaccacgccggagagcgtcgaagcgggggcggtgttcgccgagatcggcccgcgcatggccgagttgagcggttcccggctggccgcgcagcaacagatggaaggcctcctggcgccgcaccggcccaaggagcccgcgtggttcctggccaccgtcggcgtctcgcccgaccaccagggcaagggtctgggcagcgccgtcgtgctccccggagtggaggcggccgagcgcgccggggtgcccgccttcctggagacctccgcgccccgcaacctccccttctacgagcggctcggcttcaccgtcaccgccgacgtcgaggtgcccgaaggaccgcgcacctggtgcatgacccgcaagcccggtgcctga

SEQ ID NO: 6113 - DNA, 3147 bp, Artificial Sequence
  Synthetic Polynucloetide
atggccttaccagtgaccgccttgctcctgccgctggccttgctgctccacgccgccaggccggaggttcagctgcttgagtctggcggaggactggttcaacctggcggaagcctgagactgtcttgtgccgccagcggcttcacctttagcagctacgccatgagctgggtccgacaggctcctggcaaaggactggaatgggtgtccagcatcagcggcagcggcgactacatctactacgccgatagcgtgaagggcagattcaccatcagccgggacatcagcaagaacaccctgtacctccagatgaacagcctgagagccgaggacaccgccgtgtactactgtgccaaagaaggcaccggcgctaacagcagcctggccgattatagaggccagggcacactggtcaccgtgtctagtggcggaggaagcggcggaggatctgaagtgcaactggtggaatctggaggctctctggtgcagccagggggaagcctgagactgtcttgtgccgcttccggcttcaccttcgacgactacgccatgagctgggtgcgccaggtgccaggcaaaggcctggaatgggtgtccagcatcaactggagcggcacccacaccgattacgccgactccgtgaaaggcagattcacaatcagcagaaacaacgccaacaataccctgtacctgcagatgaactccctgaagtctgaggatacagcagtgtattattgcgccaagaactggcgggacgccggcaccacttggtttgagaaaagcggctctgccggacagggaacccaagtgacagtgtcctccggtaccggcggaggcggatctggcggcggaggtagcggtggcggaggatctgaattcgacatccagatgacacagagccctagcagcctgtctgccagcgtgggagacagagtgaccatcacatgcaaggccagcgaccacatcaacaactggctggcctggtatcagcagaagcctggacaggcccctaagctgctgatctacggcgctaccacactggaaacaggcgtgcccagcagattttctggcagcggctctggcaccgactacaccctgacaatatccagcctccagcctgaggacttcgccacctactactgtcagcagagctggaacaccccttggacattcggccagggcaccaagctggaaatcaagagactcgagagccagcctcacaccaagcccagcgtgttcgtgatgaagaacggcaccaacgtggcctgcctcgtgaaagagttctaccccaaggacatcaggatcaacctggtgtccagcaagaagatcaccgagttcgaccccgccatcgtgatctcccccagcggcaagtacaacgccgtgaagctggggaagtacgaggacagcaacagcgtgacctgctccgtgcagcacgacaacaagaccgtgcacagcaccgactttgaagtgaaaaccgactccaccgaccacgtgaagcccaaagagacagagaacaccaagcagcccagcaagagctgccacaagcccaaggccatcgtgcacaccgagaaagtgaacatgatgagcctgaccgtgctgggcctgcggatgctgttcgccaaaaccgtggccgtgaacttcctgctgaccgccaagctgttcttcctcagggccaagcgatctggatctggagcaacaaacttctcactactcaaacaagcaggtgacgtggaggagaatcccgggcctactagtatggactggatttggcgcatccttttccttgtcggcgctgctaccggcgcccattccgggcccgaagtgcagctggttgaatctggcggaggactggttcagcctggcggatctctgagactgtcttgtgccgcctctggcttcgccagcgactactatatcatcggctggttcagacaggcccctggcaaagagagagagggcgtcagctgtatcagcagcagatacgccaacaccaactacgccgacagcgtgaagggcagattcaccatcagccgggacaacgccaagaacaccgtgtacctccagatgaacagcctgaagcctgaggacaccgccgtgtactactgtgccgccgacaccagaagatacacctgtcctgacattgccaccatgcaccggaacttcgattcttggggccagggcacactggtcaccgtttcttctggatccggcggcggaggatctggcggaggcggatctgggggcggaggctctttcgaacaagttcagcttcaacagcctggcgctgagctggtcaaacctggcgcttctgtgaagatgagctgcaaagccagcggctacgccttcagcagctactggatcaactggatgaagcagaaacccggccagggactcgaatggatcggccaaatctatcccggcgacggcgacaccaactacaacggcaagttcaagggcagagccacactgaccgccgatacctctagcagcacagcctacatgcagctgagcagcctgaccagcgaagatagcgccgtgtacttctgtgcccggtccatcacaacagtcgtgggctgcgctatggactattggggccagggaacaagcgtgaccgtgtctagtacgcgtgacaagcagctggacgccgacgtgtcccccaagcctaccatcttcctgccctctatcgccgagacaaagctccagaaggccggcacctacctgtgcctgctggaaaagttcttcccagatgtgattaagatccactggcaggaaaagaagtccaacaccatcctgggcagccaggaaggcaacaccatgaagaccaacgacacctacatgaagttcagctggctgaccgtgcccgagaagtccctggacaaagaacacagatgcatcgtgcggcacgaaaacaacaagaacggcgtggaccaggaaatcatcttcccacccatcaagaccgatgtgattacaatggaccccaaggacaactgctccaaggacgccaacgataccctgctgctccagctgaccaacaccagcgcctactacatgtacttgttgctgctgctgaagtccgtggtgtacttcgccatcatcacatgctgcctgctgcggagaaccgccttctgctgcaacggcgagaagtct

SEQ ID NO: 6114 - DNA, 4356 bp, Artificial Sequence
  Synthetic Polynucloetide
atggccttaccagtgaccgccttgctcctgccgctggccttgctgctccacgccgccaggccggaggttcagctgcttgagtctggcggaggactggttcaacctggcggaagcctgagactgtcttgtgccgccagcggcttcacctttagcagctacgccatgagctgggtccgacaggctcctggcaaaggactggaatgggtgtccagcatcagcggcagcggcgactacatctactacgccgatagcgtgaagggcagattcaccatcagccgggacatcagcaagaacaccctgtacctccagatgaacagcctgagagccgaggacaccgccgtgtactactgtgccaaagaaggcaccggcgctaacagcagcctggccgattatagaggccagggcacactggtcaccgtgtctagtggcggaggaagcggcggaggatctgaagtgcaactggtggaatctggaggctctctggtgcagccagggggaagcctgagactgtcttgtgccgcttccggcttcaccttcgacgactacgccatgagctgggtgcgccaggtgccaggcaaaggcctggaatgggtgtccagcatcaactggagcggcacccacaccgattacgccgactccgtgaaaggcagattcacaatcagcagaaacaacgccaacaataccctgtacctgcagatgaactccctgaagtctgaggatacagcagtgtattattgcgccaagaactggcgggacgccggcaccacttggtttgagaaaagcggctctgccggacagggaacccaagtgacagtgtcctccggtaccggcggaggcggatctggcggcggaggtagcggtggcggaggatctgaattcgacatccagatgacacagagccctagcagcctgtctgccagcgtgggagacagagtgaccatcacatgcaaggccagcgaccacatcaacaactggctggcctggtatcagcagaagcctggacaggcccctaagctgctgatctacggcgctaccacactggaaacaggcgtgcccagcagattttctggcagcggctctggcaccgactacaccctgacaatatccagcctccagcctgaggacttcgccacctactactgtcagcagagctggaacaccccttggacattcggccagggcaccaagctggaaatcaagagaggacagcctaaggccaatcctaccgtgacactgttccctccaagcagcgaagaactccaggccaacaaggccacacttgtgtgcctgatctccgacttctaccctggggctgtgacagtggcttggaaggccgatggatctcctgtgaaagccggcgtggaaaccaccaagccatccaagcagagcaacaacaaatacgccgccagctcctacctgagcctgacacctgagcagtggaagtcccacagatcctacagctgccaagtgacccacgaaggcagcaccgtggaaaagacagtggcccctacagagtgcagcggatcccagagcttcggcctgctggaccccaagctgtgctacctgctggatggcatcctgttcatctacggcgtgatcctgaccgccctgttcctgagagtgaagttcagcagaagcgccgacgcccctgcctaccagcagggacagaaccaactgtacaacgagctgaacctgggcagacgggaagagtacgacgtgctggacaagcggagaggcagggaccctgagatgggcggaaagccccagcggagaaagaacccccaggaaggactgtataacgaactccagaaagacaagatggccgaagcctacagcgagatcggcatgaagggcgagcggagaagaggcaagggccacgatggcctgtaccagggcctgagcaccgccaccaaggacacctatgacgccctgcacatgcaggccctgcctccaagaagggccaagcgatctggatctggagcaacaaacttctcactactcaaacaagcaggtgacgtggaggagaatcccgggcctactagtatggactggatttggcgcatccttttccttgtcggcgctgctaccggcgcccattccgggcccgaagtgcagctggttgaatctggcggaggactggttcagcctggcggatctctgagactgtcttgtgccgcctctggcttcgccagcgactactatatcatcggctggttcagacaggcccctggcaaagagagagagggcgtcagctgtatcagcagcagatacgccaacaccaactacgccgacagcgtgaagggcagattcaccatcagccgggacaacgccaagaacaccgtgtacctccagatgaacagcctgaagcctgaggacaccgccgtgtactactgtgccgccgacaccagaagatacacctgtcctgacattgccaccatgcaccggaacttcgattcttggggccagggcacactggtcaccgtttcttctggatccggcggcggaggatctggcggaggcggatctgggggcggaggctctttcgaacaagttcagcttcaacagcctggcgctgagctggtcaaacctggcgcttctgtgaagatgagctgcaaagccagcggctacgccttcagcagctactggatcaactggatgaagcagaaacccggccagggactcgaatggatcggccaaatctatcccggcgacggcgacaccaactacaacggcaagttcaagggcagagccacactgaccgccgatacctctagcagcacagcctacatgcagctgagcagcctgaccagcgaagatagcgccgtgtacttctgtgcccggtccatcacaacagtcgtgggctgcgctatggactattggggccagggaacaagcgtgaccgtgtctagtgcctctacaaagggaccctccgtgtttcctctggctcccagcagcaagtctacaagcggaggaacagccgctctgggctgcctggtcaaggattactttcccgagcctgtgaccgtgtcctggaatagcggagcactgacaagcggcgtgcacacctttccagccgtgctgcaaagcagcggcctgtactctctgagcagcgtggtcacagtgcctagctctagcctgggcacccagacctacatctgcaatgtgaaccacaagcctagcaacaccaaggtggacaagagagtggaacccaagagctgtggtacccagagttttgggttgttggaccctaaattgtgctatctgttggacggaatcctgttcatttacggagtgatcctgaccgcattgttcctgcgggttaagttttccagatccgcagacgcacccgcttaccaacaagggcagaaccaactctacaatgaacttaatttggggcggagggaagagtacgacgttctggacaaaaggaggggacgagatcccgagatgggcggaaagcctcagcgaaggaagaatccgcaagaggggctttataacgaactccagaaagataaaatggcagaagcctatagtgagattgggatgaagggagaaaggaggaggggtaaaggtcacgatgggttgtaccaaggattgagcacagccactaaagatacctatgatgcgctccacatgcaggccctgccgccaagacgcgccaagagaagcggatctggcgtgaagcagaccctgaatttcgacctgctgaagctggctggcgacgtggaatccaacccaggcccttctagaggccatatgaccgagtacaagcccacggtgcgcctcgccacccgcgacgacgtccccagggccgtacgcaccctcgccgccgcgttcgccgactaccccgccacgcgccacaccgtcgatccggaccgccacatcgagcgggtcaccgagctgcaagaactcttcctcacgcgcgtcgggctcgacatcggcaaggtgtgggtcgcggacgacggcgccgcggtggcggtctggaccacgccggagagcgtcgaagcgggggcggtgttcgccgagatcggcccgcgcatggccgagttgagcggttcccggctggccgcgcagcaacagatggaaggcctcctggcgccgcaccggcccaaggagcccgcgtggttcctggccaccgtcggcgtctcgcccgaccaccagggcaagggtctgggcagcgccgtcgtgctccccggagtggaggcggccgagcgcgccggggtgcccgccttcctggagacctccgcgccccgcaacctccccttctacgagcggctcggcttcaccgtcaccgccgacgtcgaggtgcccgaaggaccgcgcacctggtgcatgacccgcaagcccggtgcctga

SEQ ID NO: 6115 - DNA, 3711 bp, Artificial Sequence
  Synthetic Polynucloetide
atggccttaccagtgaccgccttgctcctgccgctggccttgctgctccacgccgccaggccggaggttcagctgcttgagtctggcggaggactggttcaacctggcggaagcctgagactgtcttgtgccgccagcggcttcacctttagcagctacgccatgagctgggtccgacaggctcctggcaaaggactggaatgggtgtccagcatcagcggcagcggcgactacatctactacgccgatagcgtgaagggcagattcaccatcagccgggacatcagcaagaacaccctgtacctccagatgaacagcctgagagccgaggacaccgccgtgtactactgtgccaaagaaggcaccggcgctaacagcagcctggccgattatagaggccagggcacactggtcaccgtgtctagtggcggaggaagcggcggaggatctgaagtgcaactggtggaatctggaggctctctggtgcagccagggggaagcctgagactgtcttgtgccgcttccggcttcaccttcgacgactacgccatgagctgggtgcgccaggtgccaggcaaaggcctggaatgggtgtccagcatcaactggagcggcacccacaccgattacgccgactccgtgaaaggcagattcacaatcagcagaaacaacgccaacaataccctgtacctgcagatgaactccctgaagtctgaggatacagcagtgtattattgcgccaagaactggcgggacgccggcaccacttggtttgagaaaagcggctctgccggacagggaacccaagtgacagtgtcctccggtaccggcggaggcggatctggcggcggaggtagcggtggcggaggatctgaattcgacatccagatgacacagagccctagcagcctgtctgccagcgtgggagacagagtgaccatcacatgcaaggccagcgaccacatcaacaactggctggcctggtatcagcagaagcctggacaggcccctaagctgctgatctacggcgctaccacactggaaacaggcgtgcccagcagattttctggcagcggctctggcaccgactacaccctgacaatatccagcctccagcctgaggacttcgccacctactactgtcagcagagctggaacaccccttggacattcggccagggcaccaagctggaaatcaagagactcgaggacctgaagaacgtgttcccacctgaggtggccgtgttcgagcctagcgaggccgagatcagccacacccagaaagccaccctcgtgtgcctggctaccggcttctaccccgaccatgtggaactgtcttggtgggtcaacggcaaagaggtgcacagcggcgtgtctaccgacccccagccactgaaagaacagcccgccctgaacgacagccggtactgcctgagcagcagactgagagtgtccgccaccttctggcagaacccccggaaccacttcagatgccaggtgcagttctacggcctgagcgagaacgacgagtggacccaggacagagccaagcccgtgacccagatcgtgtctgccgaagcctggggcagagccgattgcggatcccagagcttcggcctgctggaccccaagctgtgctacctgctggatggcatcctgttcatctacggcgtgatcctgaccgccctgttcctgagagtgaagttcagcagaagcgccgacgcccctgcctaccagcagggacagaaccaactgtacaacgagctgaacctgggcagacgggaagagtacgacgtgctggacaagcggagaggcagggaccctgagatgggcggaaagccccagcggagaaagaacccccaggaaggactgtataacgaactccagaaagacaagatggccgaagcctacagcgagatcggcatgaagggcgagcggagaagaggcaagggccacgatggcctgtaccagggcctgagcaccgccaccaaggacacctatgacgccctgcacatgcaggccctgcctccaagaagggccaagcgatctggatctggagcaacaaacttctcactactcaaacaagcaggtgacgtggaggagaatcccgggcctactagtatggactggatttggcgcatccttttccttgtcggcgctgctaccggcgcccattccgggcccgaagtgcagctggttgaatctggcggaggactggttcagcctggcggatctctgagactgtcttgtgccgcctctggcttcgccagcgactactatatcatcggctggttcagacaggcccctggcaaagagagagagggcgtcagctgtatcagcagcagatacgccaacaccaactacgccgacagcgtgaagggcagattcaccatcagccgggacaacgccaagaacaccgtgtacctccagatgaacagcctgaagcctgaggacaccgccgtgtactactgtgccgccgacaccagaagatacacctgtcctgacattgccaccatgcaccggaacttcgattcttggggccagggcacactggtcaccgtttcttctggatccggcggcggaggatctggcggaggcggatctgggggcggaggctctttcgaacaagttcagcttcaacagcctggcgctgagctggtcaaacctggcgcttctgtgaagatgagctgcaaagccagcggctacgccttcagcagctactggatcaactggatgaagcagaaacccggccagggactcgaatggatcggccaaatctatcccggcgacggcgacaccaactacaacggcaagttcaagggcagagccacactgaccgccgatacctctagcagcacagcctacatgcagctgagcagcctgaccagcgaagatagcgccgtgtacttctgtgcccggtccatcacaacagtcgtgggctgcgctatggactattggggccagggaacaagcgtgaccgtgtctagtacgcgtatccagaaccctgatcctgccgtgtaccagctgcgggatagcaagagcagcgacaagagcgtgtgtctgttcaccgacttcgacagccagaccaacgtgtcccagagcaaggactccgacgtgtacatcaccgataagaccgtgctggacatgcggagcatggacttcaagagcaactccgccgtggcctggtccaacaagtccgatttcgcctgcgccaacgccttcaacaacagcattatccccgaggacacattcttcccaagccccgagagcagctgcggtacccagagttttgggttgttggaccctaaattgtgctatctgttggacggaatcctgttcatttacggagtgatcctgaccgcattgttcctgcgggttaagttttccagatccgcagacgcacccgcttaccaacaagggcagaaccaactctacaatgaacttaatttggggcggagggaagagtacgacgttctggacaaaaggaggggacgagatcccgagatgggcggaaagcctcagcgaaggaagaatccgcaagaggggctttataacgaactccagaaagataaaatggcagaagcctatagtgagattgggatgaagggagaaaggaggaggggtaaaggtcacgatgggttgtaccaaggattgagcacagccactaaagatacctatgatgcgctccacatgcaggccctgccgccaaga

SEQ ID NO: 6116 - DNA, 3711 bp, Artificial Sequence
  Synthetic Polynucloetide
atggccttaccagtgaccgccttgctcctgccgctggccttgctgctccacgccgccaggccggaggttcagctgcttgagtctggcggaggactggttcaacctggcggaagcctgagactgtcttgtgccgccagcggcttcacctttagcagctacgccatgagctgggtccgacaggctcctggcaaaggactggaatgggtgtccagcatcagcggcagcggcgactacatctactacgccgatagcgtgaagggcagattcaccatcagccgggacatcagcaagaacaccctgtacctccagatgaacagcctgagagccgaggacaccgccgtgtactactgtgccaaagaaggcaccggcgctaacagcagcctggccgattatagaggccagggcacactggtcaccgtgtctagtggcggaggaagcggcggaggatctgaagtgcaactggtggaatctggaggctctctggtgcagccagggggaagcctgagactgtcttgtgccgcttccggcttcaccttcgacgactacgccatgagctgggtgcgccaggtgccaggcaaaggcctggaatgggtgtccagcatcaactggagcggcacccacaccgattacgccgactccgtgaaaggcagattcacaatcagcagaaacaacgccaacaataccctgtacctgcagatgaactccctgaagtctgaggatacagcagtgtattattgcgccaagaactggcgggacgccggcaccacttggtttgagaaaagcggctctgccggacagggaacccaagtgacagtgtcctccggtaccggcggaggcggatctggcggcggaggtagcggtggcggaggatctgaattcgacatccagatgacacagagccctagcagcctgtctgccagcgtgggagacagagtgaccatcacatgcaaggccagcgaccacatcaacaactggctggcctggtatcagcagaagcctggacaggcccctaagctgctgatctacggcgctaccacactggaaacaggcgtgcccagcagattttctggcagcggctctggcaccgactacaccctgacaatatccagcctccagcctgaggacttcgccacctactactgtcagcagagctggaacaccccttggacattcggccagggcaccaagctggaaatcaagagactcgaggacctgaagaacgtgttcccacctgaggtggccgtgttcgagcctagcaaggccgagatcgcccacacccagaaagccaccctcgtgtgcctggctaccggcttctaccccgaccatgtggaactgtcttggtgggtcaacggcaaagaggtgcacagcggcgtgtgtaccgacccccagccactgaaagaacagcccgccctgaacgacagccggtactgcctgagcagcagactgagagtgtccgccaccttctggcagaacccccggaaccacttcagatgccaggtgcagttctacggcctgagcgagaacgacgagtggacccaggacagagccaagcccgtgacccagatcgtgtctgccgaagcctggggcagagccgattgcggatcccagagcttcggcctgctggaccccaagctgtgctacctgctggatggcatcctgttcatctacggcgtgatcctgaccgccctgttcctgagagtgaagttcagcagaagcgccgacgcccctgcctaccagcagggacagaaccaactgtacaacgagctgaacctgggcagacgggaagagtacgacgtgctggacaagcggagaggcagggaccctgagatgggcggaaagccccagcggagaaagaacccccaggaaggactgtataacgaactccagaaagacaagatggccgaagcctacagcgagatcggcatgaagggcgagcggagaagaggcaagggccacgatggcctgtaccagggcctgagcaccgccaccaaggacacctatgacgccctgcacatgcaggccctgcctccaagaagggccaagcgatctggatctggagcaacaaacttctcactactcaaacaagcaggtgacgtggaggagaatcccgggcctactagtatggactggatttggcgcatccttttccttgtcggcgctgctaccggcgcccattccgggcccgaagtgcagctggttgaatctggcggaggactggttcagcctggcggatctctgagactgtcttgtgccgcctctggcttcgccagcgactactatatcatcggctggttcagacaggcccctggcaaagagagagagggcgtcagctgtatcagcagcagatacgccaacaccaactacgccgacagcgtgaagggcagattcaccatcagccgggacaacgccaagaacaccgtgtacctccagatgaacagcctgaagcctgaggacaccgccgtgtactactgtgccgccgacaccagaagatacacctgtcctgacattgccaccatgcaccggaacttcgattcttggggccagggcacactggtcaccgtttcttctggatccggcggcggaggatctggcggaggcggatctgggggcggaggctctttcgaacaagttcagcttcaacagcctggcgctgagctggtcaaacctggcgcttctgtgaagatgagctgcaaagccagcggctacgccttcagcagctactggatcaactggatgaagcagaaacccggccagggactcgaatggatcggccaaatctatcccggcgacggcgacaccaactacaacggcaagttcaagggcagagccacactgaccgccgatacctctagcagcacagcctacatgcagctgagcagcctgaccagcgaagatagcgccgtgtacttctgtgcccggtccatcacaacagtcgtgggctgcgctatggactattggggccagggaacaagcgtgaccgtgtctagtacgcgtatccagaaccctgatcctgccgtgtaccagctgcgggatagcaagagcagcgacaagagcgtgtgtctgttcaccgacttcgacagccagaccaacgtgtcccagagcaaggactccgacgtgtacatcaccgataagtgcgtgctggacatgcggagcatggacttcaagagcaactccgccgtggcctggtccaacaagtccgatttcgcctgcgccaacgccttcaacaacagcattatccccgaggacacattcttcccaagcagcgacgtgccctgcggtacccagagttttgggttgttggaccctaaattgtgctatctgttggacggaatcctgttcatttacggagtgatcctgaccgcattgttcctgcgggttaagttttccagatccgcagacgcacccgcttaccaacaagggcagaaccaactctacaatgaacttaatttggggcggagggaagagtacgacgttctggacaaaaggaggggacgagatcccgagatgggcggaaagcctcagcgaaggaagaatccgcaagaggggctttataacgaactccagaaagataaaatggcagaagcctatagtgagattgggatgaagggagaaaggaggaggggtaaaggtcacgatgggttgtaccaaggattgagcacagccactaaagatacctatgatgcgctccacatgcaggccctgccgccaaga

SEQ ID NO: 6117 - DNA, 3924 bp, Artificial Sequence
  Synthetic Polynucloetide
atggccttaccagtgaccgccttgctcctgccgctggccttgctgctccacgccgccaggccggaggttcagctgcttgagtctggcggaggactggttcaacctggcggaagcctgagactgtcttgtgccgccagcggcttcacctttagcagctacgccatgagctgggtccgacaggctcctggcaaaggactggaatgggtgtccagcatcagcggcagcggcgactacatctactacgccgatagcgtgaagggcagattcaccatcagccgggacatcagcaagaacaccctgtacctccagatgaacagcctgagagccgaggacaccgccgtgtactactgtgccaaagaaggcaccggcgctaacagcagcctggccgattatagaggccagggcacactggtcaccgtgtctagtggcggaggaagcggcggaggatctgaagtgcaactggtggaatctggaggctctctggtgcagccagggggaagcctgagactgtcttgtgccgcttccggcttcaccttcgacgactacgccatgagctgggtgcgccaggtgccaggcaaaggcctggaatgggtgtccagcatcaactggagcggcacccacaccgattacgccgactccgtgaaaggcagattcacaatcagcagaaacaacgccaacaataccctgtacctgcagatgaactccctgaagtctgaggatacagcagtgtattattgcgccaagaactggcgggacgccggcaccacttggtttgagaaaagcggctctgccggacagggaacccaagtgacagtgtcctccggtaccggcggaggcggatctggcggcggaggtagcggtggcggaggatctgaattcgacatccagatgacacagagccctagcagcctgtctgccagcgtgggagacagagtgaccatcacatgcaaggccagcgaccacatcaacaactggctggcctggtatcagcagaagcctggacaggcccctaagctgctgatctacggcgctaccacactggaaacaggcgtgcccagcagattttctggcagcggctctggcaccgactacaccctgacaatatccagcctccagcctgaggacttcgccacctactactgtcagcagagctggaacaccccttggacattcggccagggcaccaagctggaaatcaagagactcgaggggaaaccaattcccaaccctcttctgggactggattcaaccggcagcggcgaggacctgaagaacgtgttcccacctgaggtggccgtgttcgagcctagcgaggccgagatcagccacacccagaaagccaccctcgtgtgcctggctaccggcttctaccccgaccatgtggaactgtcttggtgggtcaacggcaaagaggtgcacagcggcgtgtctaccgacccccagccactgaaagaacagcccgccctgaacgacagccggtactgcctgagcagcagactgagagtgtccgccaccttctggcagaacccccggaaccacttcagatgccaggtgcagttctacggcctgagcgagaacgacgagtggacccaggacagagccaagcccgtgacccagatcgtgtctgccgaagcctggggcagagccgattgcggatcccagagcttcggcctgctggaccccaagctgtgctacctgctggatggcatcctgttcatctacggcgtgatcctgaccgccctgttcctgagagtgaagttcagcagaagcgccgacgcccctgcctaccagcagggacagaaccaactgtacaacgagctgaacctgggcagacgggaagagtacgacgtgctggacaagcggagaggcagggaccctgagatgggcggaaagccccagcggagaaagaacccccaggaaggactgtataacgaactccagaaagacaagatggccgaagcctacagcgagatcggcatgaagggcgagcggagaagaggcaagggccacgatggcctgtaccagggcctgagcaccgccaccaaggacacctatgacgccctgcacatgcaggccctgcctccaagaagggccaagcgatctggatctggagcaacaaacttctcactactcaaacaagcaggtgacgtggaggagaatcccgggcctactagtatggactggatttggcgcatccttttccttgtcggcgctgctaccggcgcccattccgggcccgaagtgcagctggttgaatctggcggaggactggttcagcctggcggatctctgagactgtcttgtgccgcctctggcttcgccagcgactactatatcatcggctggttcagacaggcccctggcaaagagagagagggcgtcagctgtatcagcagcagatacgccaacaccaactacgccgacagcgtgaagggcagattcaccatcagccgggacaacgccaagaacaccgtgtacctccagatgaacagcctgaagcctgaggacaccgccgtgtactactgtgccgccgacaccagaagatacacctgtcctgacattgccaccatgcaccggaacttcgattcttggggccagggcacactggtcaccgtttcttctggatccggcggcggaggatctggcggaggcggatctgggggcggaggctctttcgaacaagttcagcttcaacagcctggcgctgagctggtcaaacctggcgcttctgtgaagatgagctgcaaagccagcggctacgccttcagcagctactggatcaactggatgaagcagaaacccggccagggactcgaatggatcggccaaatctatcccggcgacggcgacaccaactacaacggcaagttcaagggcagagccacactgaccgccgatacctctagcagcacagcctacatgcagctgagcagcctgaccagcgaagatagcgccgtgtacttctgtgcccggtccatcacaacagtcgtgggctgcgctatggactattggggccagggaacaagcgtgaccgtgtctagtacgcgtgagcagaaactgatctcggaagaggatgggagcggcatccagaaccctgatcctgccgtgtaccagctgcgggatagcaagagcagcgacaagagcgtgtgtctgttcaccgacttcgacagccagaccaacgtgtcccagagcaaggactccgacgtgtacatcaccgataagaccgtgctggacatgcggagcatggacttcaagagcaactccgccgtggcctggtccaacaagtccgatttcgcctgcgccaacgccttcaacaacagcattatccccgaggacacattcttcccaagccccgagagcagctgcggtacccagagttttgggttgttggaccctaaattgtgctatctgttggacggaatcctgttcatttacggagtgatcctgaccgcattgttcctgaggagcaagcggtcacggctgctccacagcgattacatgaatatgacaccacgaagaccgggtcctactcgcaaacactaccaaccctacgcacctccccgcgactttgcagcgtaccgatctcgggttaagttttccagatccgcagacgcacccgcttaccaacaagggcagaaccaactctacaatgaacttaatttggggcggagggaagagtacgacgttctggacaaaaggaggggacgagatcccgagatgggcggaaagcctcagcgaaggaagaatccgcaagaggggctttataacgaactccagaaagataaaatggcagaagcctatagtgagattgggatgaagggagaaaggaggaggggtaaaggtcacgatgggttgtaccaaggattgagcacagccactaaagatacctatgatgcgctccacatgcaggccctgccgccaaga

SEQ ID NO: 6118 - DNA, 4047 bp, Artificial Sequence
  Synthetic Polynucloetide
atggccttaccagtgaccgccttgctcctgccgctggccttgctgctccacgccgccaggccggaggttcagctgcttgagtctggcggaggactggttcaacctggcggaagcctgagactgtcttgtgccgccagcggcttcacctttagcagctacgccatgagctgggtccgacaggctcctggcaaaggactggaatgggtgtccagcatcagcggcagcggcgactacatctactacgccgatagcgtgaagggcagattcaccatcagccgggacatcagcaagaacaccctgtacctccagatgaacagcctgagagccgaggacaccgccgtgtactactgtgccaaagaaggcaccggcgctaacagcagcctggccgattatagaggccagggcacactggtcaccgtgtctagtggcggaggaagcggcggaggatctgaagtgcaactggtggaatctggaggctctctggtgcagccagggggaagcctgagactgtcttgtgccgcttccggcttcaccttcgacgactacgccatgagctgggtgcgccaggtgccaggcaaaggcctggaatgggtgtccagcatcaactggagcggcacccacaccgattacgccgactccgtgaaaggcagattcacaatcagcagaaacaacgccaacaataccctgtacctgcagatgaactccctgaagtctgaggatacagcagtgtattattgcgccaagaactggcgggacgccggcaccacttggtttgagaaaagcggctctgccggacagggaacccaagtgacagtgtcctccggtaccggcggaggcggatctggcggcggaggtagcggtggcggaggatctgaattcgacatccagatgacacagagccctagcagcctgtctgccagcgtgggagacagagtgaccatcacatgcaaggccagcgaccacatcaacaactggctggcctggtatcagcagaagcctggacaggcccctaagctgctgatctacggcgctaccacactggaaacaggcgtgcccagcagattttctggcagcggctctggcaccgactacaccctgacaatatccagcctccagcctgaggacttcgccacctactactgtcagcagagctggaacaccccttggacattcggccagggcaccaagctggaaatcaagagactcgaggggaaaccaattcccaaccctcttctgggactggattcaaccggcagcggcgaggacctgaagaacgtgttcccacctgaggtggccgtgttcgagcctagcgaggccgagatcagccacacccagaaagccaccctcgtgtgcctggctaccggcttctaccccgaccatgtggaactgtcttggtgggtcaacggcaaagaggtgcacagcggcgtgtctaccgacccccagccactgaaagaacagcccgccctgaacgacagccggtactgcctgagcagcagactgagagtgtccgccaccttctggcagaacccccggaaccacttcagatgccaggtgcagttctacggcctgagcgagaacgacgagtggacccaggacagagccaagcccgtgacccagatcgtgtctgccgaagcctggggcagagccgattgcggatcccagagcttcggcctgctggaccccaagctgtgctacctgctggatggcatcctgttcatctacggcgtgatcctgaccgccctgttcctgaggagtaagaggagcaggctcctgcacagtgactacatgaacatgactccacgccgccccggacccacccgcaagcattaccagccctatgccccaccacgcgacttcgcagcctatcgctccagagtgaagttcagcagaagcgccgacgcccctgcctaccagcagggacagaaccaactgtacaacgagctgaacctgggcagacgggaagagtacgacgtgctggacaagcggagaggcagggaccctgagatgggcggaaagccccagcggagaaagaacccccaggaaggactgtataacgaactccagaaagacaagatggccgaagcctacagcgagatcggcatgaagggcgagcggagaagaggcaagggccacgatggcctgtaccagggcctgagcaccgccaccaaggacacctatgacgccctgcacatgcaggccctgcctccaagaagggccaagcgatctggatctggagcaacaaacttctcactactcaaacaagcaggtgacgtggaggagaatcccgggcctactagtatggactggatttggcgcatccttttccttgtcggcgctgctaccggcgcccattccgggcccgaagtgcagctggttgaatctggcggaggactggttcagcctggcggatctctgagactgtcttgtgccgcctctggcttcgccagcgactactatatcatcggctggttcagacaggcccctggcaaagagagagagggcgtcagctgtatcagcagcagatacgccaacaccaactacgccgacagcgtgaagggcagattcaccatcagccgggacaacgccaagaacaccgtgtacctccagatgaacagcctgaagcctgaggacaccgccgtgtactactgtgccgccgacaccagaagatacacctgtcctgacattgccaccatgcaccggaacttcgattcttggggccagggcacactggtcaccgtttcttctggatccggcggcggaggatctggcggaggcggatctgggggcggaggctctttcgaacaagttcagcttcaacagcctggcgctgagctggtcaaacctggcgcttctgtgaagatgagctgcaaagccagcggctacgccttcagcagctactggatcaactggatgaagcagaaacccggccagggactcgaatggatcggccaaatctatcccggcgacggcgacaccaactacaacggcaagttcaagggcagagccacactgaccgccgatacctctagcagcacagcctacatgcagctgagcagcctgaccagcgaagatagcgccgtgtacttctgtgcccggtccatcacaacagtcgtgggctgcgctatggactattggggccagggaacaagcgtgaccgtgtctagtacgcgtgagcagaaactgatctcggaagaggatgggagcggcatccagaaccctgatcctgccgtgtaccagctgcgggatagcaagagcagcgacaagagcgtgtgtctgttcaccgacttcgacagccagaccaacgtgtcccagagcaaggactccgacgtgtacatcaccgataagaccgtgctggacatgcggagcatggacttcaagagcaactccgccgtggcctggtccaacaagtccgatttcgcctgcgccaacgccttcaacaacagcattatccccgaggacacattcttcccaagccccgagagcagctgcggtacccagagttttgggttgttggaccctaaattgtgctatctgttggacggaatcctgttcatttacggagtgatcctgaccgcattgttcctgaggagcaagcggtcacggctgctccacagcgattacatgaatatgacaccacgaagaccgggtcctactcgcaaacactaccaaccctacgcacctccccgcgactttgcagcgtaccgatctcgggttaagttttccagatccgcagacgcacccgcttaccaacaagggcagaaccaactctacaatgaacttaatttggggcggagggaagagtacgacgttctggacaaaaggaggggacgagatcccgagatgggcggaaagcctcagcgaaggaagaatccgcaagaggggctttataacgaactccagaaagataaaatggcagaagcctatagtgagattgggatgaagggagaaaggaggaggggtaaaggtcacgatgggttgtaccaaggattgagcacagccactaaagatacctatgatgcgctccacatgcaggccctgccgccaaga

SEQ ID NO: 6119 - DNA, 3930 bp, Artificial Sequence
  Synthetic Polynucloetide
atggccttaccagtgaccgccttgctcctgccgctggccttgctgctccacgccgccaggccggaggttcagctgcttgagtctggcggaggactggttcaacctggcggaagcctgagactgtcttgtgccgccagcggcttcacctttagcagctacgccatgagctgggtccgacaggctcctggcaaaggactggaatgggtgtccagcatcagcggcagcggcgactacatctactacgccgatagcgtgaagggcagattcaccatcagccgggacatcagcaagaacaccctgtacctccagatgaacagcctgagagccgaggacaccgccgtgtactactgtgccaaagaaggcaccggcgctaacagcagcctggccgattatagaggccagggcacactggtcaccgtgtctagtggcggaggaagcggcggaggatctgaagtgcaactggtggaatctggaggctctctggtgcagccagggggaagcctgagactgtcttgtgccgcttccggcttcaccttcgacgactacgccatgagctgggtgcgccaggtgccaggcaaaggcctggaatgggtgtccagcatcaactggagcggcacccacaccgattacgccgactccgtgaaaggcagattcacaatcagcagaaacaacgccaacaataccctgtacctgcagatgaactccctgaagtctgaggatacagcagtgtattattgcgccaagaactggcgggacgccggcaccacttggtttgagaaaagcggctctgccggacagggaacccaagtgacagtgtcctccggtaccggcggaggcggatctggcggcggaggtagcggtggcggaggatctgaattcgacatccagatgacacagagccctagcagcctgtctgccagcgtgggagacagagtgaccatcacatgcaaggccagcgaccacatcaacaactggctggcctggtatcagcagaagcctggacaggcccctaagctgctgatctacggcgctaccacactggaaacaggcgtgcccagcagattttctggcagcggctctggcaccgactacaccctgacaatatccagcctccagcctgaggacttcgccacctactactgtcagcagagctggaacaccccttggacattcggccagggcaccaagctggaaatcaagagactcgaggggaaaccaattcccaaccctcttctgggactggattcaaccggcagcggcgaggacctgaagaacgtgttcccacctgaggtggccgtgttcgagcctagcgaggccgagatcagccacacccagaaagccaccctcgtgtgcctggctaccggcttctaccccgaccatgtggaactgtcttggtgggtcaacggcaaagaggtgcacagcggcgtgtctaccgacccccagccactgaaagaacagcccgccctgaacgacagccggtactgcctgagcagcagactgagagtgtccgccaccttctggcagaacccccggaaccacttcagatgccaggtgcagttctacggcctgagcgagaacgacgagtggacccaggacagagccaagcccgtgacccagatcgtgtctgccgaagcctggggcagagccgattgcggatcccagagcttcggcctgctggaccccaagctgtgctacctgctggatggcatcctgttcatctacggcgtgatcctgaccgccctgttcctgagagtgaagttcagcagaagcgccgacgcccctgcctaccagcagggacagaaccaactgtacaacgagctgaacctgggcagacgggaagagtacgacgtgctggacaagcggagaggcagggaccctgagatgggcggaaagccccagcggagaaagaacccccaggaaggactgtataacgaactccagaaagacaagatggccgaagcctacagcgagatcggcatgaagggcgagcggagaagaggcaagggccacgatggcctgtaccagggcctgagcaccgccaccaaggacacctatgacgccctgcacatgcaggccctgcctccaagaagggccaagcgatctggatctggagcaacaaacttctcactactcaaacaagcaggtgacgtggaggagaatcccgggcctactagtatggactggatttggcgcatccttttccttgtcggcgctgctaccggcgcccattccgggcccgaagtgcagctggttgaatctggcggaggactggttcagcctggcggatctctgagactgtcttgtgccgcctctggcttcgccagcgactactatatcatcggctggttcagacaggcccctggcaaagagagagagggcgtcagctgtatcagcagcagatacgccaacaccaactacgccgacagcgtgaagggcagattcaccatcagccgggacaacgccaagaacaccgtgtacctccagatgaacagcctgaagcctgaggacaccgccgtgtactactgtgccgccgacaccagaagatacacctgtcctgacattgccaccatgcaccggaacttcgattcttggggccagggcacactggtcaccgtttcttctggatccggcggcggaggatctggcggaggcggatctgggggcggaggctctttcgaacaagttcagcttcaacagcctggcgctgagctggtcaaacctggcgcttctgtgaagatgagctgcaaagccagcggctacgccttcagcagctactggatcaactggatgaagcagaaacccggccagggactcgaatggatcggccaaatctatcccggcgacggcgacaccaactacaacggcaagttcaagggcagagccacactgaccgccgatacctctagcagcacagcctacatgcagctgagcagcctgaccagcgaagatagcgccgtgtacttctgtgcccggtccatcacaacagtcgtgggctgcgctatggactattggggccagggaacaagcgtgaccgtgtctagtacgcgtgagcagaaactgatctcggaagaggatctggggagcggcatccagaaccctgatcctgccgtgtaccagctgcgggatagcaagagcagcgacaagagcgtgtgtctgttcaccgacttcgacagccagaccaacgtgtcccagagcaaggactccgacgtgtacatcaccgataagaccgtgctggacatgcggagcatggacttcaagagcaactccgccgtggcctggtccaacaagtccgatttcgcctgcgccaacgccttcaacaacagcattatccccgaggacacattcttcccaagccccgagagcagctgcggtacccagagttttgggttgttggaccctaaattgtgctatctgttggacggaatcctgttcatttacggagtgatcctgaccgcattgttcctgaagagaggccggaagaagctgctgtacatcttcaagcagcctttcatgcggcccgtgcagaccacccaggaagaggacggctgctcctgccggttccccgaggaagaagaaggcggctgcgagctgcgggttaagttttccagatccgcagacgcacccgcttaccaacaagggcagaaccaactctacaatgaacttaatttggggcggagggaagagtacgacgttctggacaaaaggaggggacgagatcccgagatgggcggaaagcctcagcgaaggaagaatccgcaagaggggctttataacgaactccagaaagataaaatggcagaagcctatagtgagattgggatgaagggagaaaggaggaggggtaaaggtcacgatgggttgtaccaaggattgagcacagccactaaagatacctatgatgcgctccacatgcaggccctgccgccaaga

SEQ ID NO: 6120 - DNA, 4056 bp, Artificial Sequence
  Synthetic Polynucloetide
atggccttaccagtgaccgccttgctcctgccgctggccttgctgctccacgccgccaggccggaggttcagctgcttgagtctggcggaggactggttcaacctggcggaagcctgagactgtcttgtgccgccagcggcttcacctttagcagctacgccatgagctgggtccgacaggctcctggcaaaggactggaatgggtgtccagcatcagcggcagcggcgactacatctactacgccgatagcgtgaagggcagattcaccatcagccgggacatcagcaagaacaccctgtacctccagatgaacagcctgagagccgaggacaccgccgtgtactactgtgccaaagaaggcaccggcgctaacagcagcctggccgattatagaggccagggcacactggtcaccgtgtctagtggcggaggaagcggcggaggatctgaagtgcaactggtggaatctggaggctctctggtgcagccagggggaagcctgagactgtcttgtgccgcttccggcttcaccttcgacgactacgccatgagctgggtgcgccaggtgccaggcaaaggcctggaatgggtgtccagcatcaactggagcggcacccacaccgattacgccgactccgtgaaaggcagattcacaatcagcagaaacaacgccaacaataccctgtacctgcagatgaactccctgaagtctgaggatacagcagtgtattattgcgccaagaactggcgggacgccggcaccacttggtttgagaaaagcggctctgccggacagggaacccaagtgacagtgtcctccggtaccggcggaggcggatctggcggcggaggtagcggtggcggaggatctgaattcgacatccagatgacacagagccctagcagcctgtctgccagcgtgggagacagagtgaccatcacatgcaaggccagcgaccacatcaacaactggctggcctggtatcagcagaagcctggacaggcccctaagctgctgatctacggcgctaccacactggaaacaggcgtgcccagcagattttctggcagcggctctggcaccgactacaccctgacaatatccagcctccagcctgaggacttcgccacctactactgtcagcagagctggaacaccccttggacattcggccagggcaccaagctggaaatcaagagactcgaggggaaaccaattcccaaccctcttctgggactggattcaaccggcagcggcgaggacctgaagaacgtgttcccacctgaggtggccgtgttcgagcctagcgaggccgagatcagccacacccagaaagccaccctcgtgtgcctggctaccggcttctaccccgaccatgtggaactgtcttggtgggtcaacggcaaagaggtgcacagcggcgtgtctaccgacccccagccactgaaagaacagcccgccctgaacgacagccggtactgcctgagcagcagactgagagtgtccgccaccttctggcagaacccccggaaccacttcagatgccaggtgcagttctacggcctgagcgagaacgacgagtggacccaggacagagccaagcccgtgacccagatcgtgtctgccgaagcctggggcagagccgattgcggatcccagagcttcggcctgctggaccccaagctgtgctacctgctggatggcatcctgttcatctacggcgtgatcctgaccgccctgttcctgaaacggggcagaaagaaactcctgtatatattcaaacaaccatttatgagaccagtacaaactactcaagaggaagatggctgtagctgccgatttccagaagaagaagaaggaggatgtgaactgagagtgaagttcagcagaagcgccgacgcccctgcctaccagcagggacagaaccaactgtacaacgagctgaacctgggcagacgggaagagtacgacgtgctggacaagcggagaggcagggaccctgagatgggcggaaagccccagcggagaaagaacccccaggaaggactgtataacgaactccagaaagacaagatggccgaagcctacagcgagatcggcatgaagggcgagcggagaagaggcaagggccacgatggcctgtaccagggcctgagcaccgccaccaaggacacctatgacgccctgcacatgcaggccctgcctccaagaagggccaagcgatctggatctggagcaacaaacttctcactactcaaacaagcaggtgacgtggaggagaatcccgggcctactagtatggactggatttggcgcatccttttccttgtcggcgctgctaccggcgcccattccgggcccgaagtgcagctggttgaatctggcggaggactggttcagcctggcggatctctgagactgtcttgtgccgcctctggcttcgccagcgactactatatcatcggctggttcagacaggcccctggcaaagagagagagggcgtcagctgtatcagcagcagatacgccaacaccaactacgccgacagcgtgaagggcagattcaccatcagccgggacaacgccaagaacaccgtgtacctccagatgaacagcctgaagcctgaggacaccgccgtgtactactgtgccgccgacaccagaagatacacctgtcctgacattgccaccatgcaccggaacttcgattcttggggccagggcacactggtcaccgtttcttctggatccggcggcggaggatctggcggaggcggatctgggggcggaggctctttcgaacaagttcagcttcaacagcctggcgctgagctggtcaaacctggcgcttctgtgaagatgagctgcaaagccagcggctacgccttcagcagctactggatcaactggatgaagcagaaacccggccagggactcgaatggatcggccaaatctatcccggcgacggcgacaccaactacaacggcaagttcaagggcagagccacactgaccgccgatacctctagcagcacagcctacatgcagctgagcagcctgaccagcgaagatagcgccgtgtacttctgtgcccggtccatcacaacagtcgtgggctgcgctatggactattggggccagggaacaagcgtgaccgtgtctagtacgcgtgagcagaaactgatctcggaagaggatctggggagcggcatccagaaccctgatcctgccgtgtaccagctgcgggatagcaagagcagcgacaagagcgtgtgtctgttcaccgacttcgacagccagaccaacgtgtcccagagcaaggactccgacgtgtacatcaccgataagaccgtgctggacatgcggagcatggacttcaagagcaactccgccgtggcctggtccaacaagtccgatttcgcctgcgccaacgccttcaacaacagcattatccccgaggacacattcttcccaagccccgagagcagctgcggtacccagagttttgggttgttggaccctaaattgtgctatctgttggacggaatcctgttcatttacggagtgatcctgaccgcattgttcctgaagagaggccggaagaagctgctgtacatcttcaagcagcctttcatgcggcccgtgcagaccacccaggaagaggacggctgctcctgccggttccccgaggaagaagaaggcggctgcgagctgcgggttaagttttccagatccgcagacgcacccgcttaccaacaagggcagaaccaactctacaatgaacttaatttggggcggagggaagagtacgacgttctggacaaaaggaggggacgagatcccgagatgggcggaaagcctcagcgaaggaagaatccgcaagaggggctttataacgaactccagaaagataaaatggcagaagcctatagtgagattgggatgaagggagaaaggaggaggggtaaaggtcacgatgggttgtaccaaggattgagcacagccactaaagatacctatgatgcgctccacatgcaggccctgccgccaaga

SEQ ID NO: 6121 - DNA, 3729 bp, Artificial Sequence
  Synthetic Polynucloetide
atggccttaccagtgaccgccttgctcctgccgctggccttgctgctccacgccgccaggccggaggttcagctgcttgagtctggcggaggactggttcaacctggcggaagcctgagactgtcttgtgccgccagcggcttcacctttagcagctacgccatgagctgggtccgacaggctcctggcaaaggactggaatgggtgtccagcatcagcggcagcggcgactacatctactacgccgatagcgtgaagggcagattcaccatcagccgggacatcagcaagaacaccctgtacctccagatgaacagcctgagagccgaggacaccgccgtgtactactgtgccaaagaaggcaccggcgctaacagcagcctggccgattatagaggccagggcacactggtcaccgtgtctagtggcggaggaagcggcggaggatctgaagtgcaactggtggaatctggaggctctctggtgcagccagggggaagcctgagactgtcttgtgccgcttccggcttcaccttcgacgactacgccatgagctgggtgcgccaggtgccaggcaaaggcctggaatgggtgtccagcatcaactggagcggcacccacaccgattacgccgactccgtgaaaggcagattcacaatcagcagaaacaacgccaacaataccctgtacctgcagatgaactccctgaagtctgaggatacagcagtgtattattgcgccaagaactggcgggacgccggcaccacttggtttgagaaaagcggctctgccggacagggaacccaagtgacagtgtcctccggtaccggcggaggcggatctggcggcggaggtagcggtggcggaggatctgaattcgacatccagatgacacagagccctagcagcctgtctgccagcgtgggagacagagtgaccatcacatgcaaggccagcgaccacatcaacaactggctggcctggtatcagcagaagcctggacaggcccctaagctgctgatctacggcgctaccacactggaaacaggcgtgcccagcagattttctggcagcggctctggcaccgactacaccctgacaatatccagcctccagcctgaggacttcgccacctactactgtcagcagagctggaacaccccttggacattcggccagggcaccaagctggaaatcaagagactcgagcagagcttcggcctgctggaccccaagctgtgctacctgctggatggcatcctgttcatctacggcgtgatcctgaccgccctgttcctgagagtgaagttcagcagaagcgccgacgcccctgcctaccagcagggacagaaccaactgtacaacgagctgaacctgggcagacgggaagagtacgacgtgctggacaagcggagaggcagggaccctgagatgggcggaaagccccagcggagaaagaacccccaggaaggactgtataacgaactccagaaagacaagatggccgaagcctacagcgagatcggcatgaagggcgagcggagaagaggcaagggccacgatggcctgtaccagggcctgagcaccgccaccaaggacacctatgacgccctgcacatgcaggccctgcctccaagaagggccaagcgatctggatctggagcaacaaacttctcactactcaaacaagcaggtgacgtggaggagaatcccgggcctactagtatggactggatttggcgcatccttttccttgtcggcgctgctaccggcgcccattccgggcccgaagtgcagctggttgaatctggcggaggactggttcagcctggcggatctctgagactgtcttgtgccgcctctggcttcgccagcgactactatatcatcggctggttcagacaggcccctggcaaagagagagagggcgtcagctgtatcagcagcagatacgccaacaccaactacgccgacagcgtgaagggcagattcaccatcagccgggacaacgccaagaacaccgtgtacctccagatgaacagcctgaagcctgaggacaccgccgtgtactactgtgccgccgacaccagaagatacacctgtcctgacattgccaccatgcaccggaacttcgattcttggggccagggcacactggtcaccgtttcttctggatccggcggcggaggatctggcggaggcggatctgggggcggaggctctttcgaacaagttcagcttcaacagcctggcgctgagctggtcaaacctggcgcttctgtgaagatgagctgcaaagccagcggctacgccttcagcagctactggatcaactggatgaagcagaaacccggccagggactcgaatggatcggccaaatctatcccggcgacggcgacaccaactacaacggcaagttcaagggcagagccacactgaccgccgatacctctagcagcacagcctacatgcagctgagcagcctgaccagcgaagatagcgccgtgtacttctgtgcccggtccatcacaacagtcgtgggctgcgctatggactattggggccagggaacaagcgtgaccgtgtctagtacgcgtcagagttttgggttgttggaccctaaattgtgctatctgttggacggaatcctgttcatttacggagtgatcctgaccgcattgttcctgcgggttaagttttccagatccgcagacgcacccgcttaccaacaagggcagaaccaactctacaatgaacttaatttggggcggagggaagagtacgacgttctggacaaaaggaggggacgagatcccgagatgggcggaaagcctcagcgaaggaagaatccgcaagaggggctttataacgaactccagaaagataaaatggcagaagcctatagtgagattgggatgaagggagaaaggaggaggggtaaaggtcacgatgggttgtaccaaggattgagcacagccactaaagatacctatgatgcgctccacatgcaggccctgccgccaagacgcgccaagagaagcggatctggcgtgaagcagaccctgaatttcgacctgctgaagctggctggcgacgtggaatccaacccaggcccttctagaggccatatgaccgagtacaagcccacggtgcgcctcgccacccgcgacgacgtccccagggccgtacgcaccctcgccgccgcgttcgccgactaccccgccacgcgccacaccgtcgatccggaccgccacatcgagcgggtcaccgagctgcaagaactcttcctcacgcgcgtcgggctcgacatcggcaaggtgtgggtcgcggacgacggcgccgcggtggcggtctggaccacgccggagagcgtcgaagcgggggcggtgttcgccgagatcggcccgcgcatggccgagttgagcggttcccggctggccgcgcagcaacagatggaaggcctcctggcgccgcaccggcccaaggagcccgcgtggttcctggccaccgtcggcgtctcgcccgaccaccagggcaagggtctgggcagcgccgtcgtgctccccggagtggaggcggccgagcgcgccggggtgcccgccttcctggagacctccgcgccccgcaacctccccttctacgagcggctcggcttcaccgtcaccgccgacgtcgaggtgcccgaaggaccgcgcacctggtgcatgacccgcaagcccggtgcctga

SEQ ID NO: 6122 - DNA, 3201 bp, Artificial Sequence
  Synthetic Polynucloetide
atggccttaccagtgaccgccttgctcctgccgctggccttgctgctccacgccgccaggccggaggttcagctgcttgagtctggcggaggactggttcaacctggcggaagcctgagactgtcttgtgccgccagcggcttcacctttagcagctacgccatgagctgggtccgacaggctcctggcaaaggactggaatgggtgtccagcatcagcggcagcggcgactacatctactacgccgatagcgtgaagggcagattcaccatcagccgggacatcagcaagaacaccctgtacctccagatgaacagcctgagagccgaggacaccgccgtgtactactgtgccaaagaaggcaccggcgctaacagcagcctggccgattatagaggccagggcacactggtcaccgtgtctagtggcggaggaagcggcggaggatctgaagtgcaactggtggaatctggaggctctctggtgcagccagggggaagcctgagactgtcttgtgccgcttccggcttcaccttcgacgactacgccatgagctgggtgcgccaggtgccaggcaaaggcctggaatgggtgtccagcatcaactggagcggcacccacaccgattacgccgactccgtgaaaggcagattcacaatcagcagaaacaacgccaacaataccctgtacctgcagatgaactccctgaagtctgaggatacagcagtgtattattgcgccaagaactggcgggacgccggcaccacttggtttgagaaaagcggctctgccggacagggaacccaagtgacagtgtcctccggtaccggcggaggcggatctggcggcggaggtagcggtggcggaggatctgaattcgacatccagatgacacagagccctagcagcctgtctgccagcgtgggagacagagtgaccatcacatgcaaggccagcgaccacatcaacaactggctggcctggtatcagcagaagcctggacaggcccctaagctgctgatctacggcgctaccacactggaaacaggcgtgcccagcagattttctggcagcggctctggcaccgactacaccctgacaatatccagcctccagcctgaggacttcgccacctactactgtcagcagagctggaacaccccttggacattcggccagggcaccaagctggaaatcaagagactcgagggacagcctaaggccaatcctaccgtgacactgttccctccaagcagcgaagaactccaggccaacaaggccacacttgtgtgcctgatctccgacttctaccctggggctgtgacagtggcttggaaggccgatggatctcctgtgaaagccggcgtggaaaccaccaagccatccaagcagagcaacaacaaatacgccgccagctcctacctgagcctgacacctgagcagtggaagtcccacagatcctacagctgccaagtgacccacgaaggcagcaccgtggaaaagacagtggcccctacagagtgcagccccatcaagaccgatgtgattacaatggaccccaaggacaactgctccaaggacgccaacgataccctgctgctccagctgaccaacaccagcgcctactacatgtacttgttgctgctgctgaagtccgtggtgtacttcgccatcatcacatgctgcctgctgcggagaaccgccttctgctgcaacggcgagaagtctagggccaagcgatctggatctggagcaacaaacttctcactactcaaacaagcaggtgacgtggaggagaatcccgggcctactagtatggactggatttggcgcatccttttccttgtcggcgctgctaccggcgcccattccgggcccgaagtgcagctggttgaatctggcggaggactggttcagcctggcggatctctgagactgtcttgtgccgcctctggcttcgccagcgactactatatcatcggctggttcagacaggcccctggcaaagagagagagggcgtcagctgtatcagcagcagatacgccaacaccaactacgccgacagcgtgaagggcagattcaccatcagccgggacaacgccaagaacaccgtgtacctccagatgaacagcctgaagcctgaggacaccgccgtgtactactgtgccgccgacaccagaagatacacctgtcctgacattgccaccatgcaccggaacttcgattcttggggccagggcacactggtcaccgtttcttctggatccggcggcggaggatctggcggaggcggatctgggggcggaggctctttcgaacaagttcagcttcaacagcctggcgctgagctggtcaaacctggcgcttctgtgaagatgagctgcaaagccagcggctacgccttcagcagctactggatcaactggatgaagcagaaacccggccagggactcgaatggatcggccaaatctatcccggcgacggcgacaccaactacaacggcaagttcaagggcagagccacactgaccgccgatacctctagcagcacagcctacatgcagctgagcagcctgaccagcgaagatagcgccgtgtacttctgtgcccggtccatcacaacagtcgtgggctgcgctatggactattggggccagggaacaagcgtgaccgtgtctagtacgcgtgcctctacaaagggaccctccgtgtttcctctggctcccagcagcaagtctacaagcggaggaacagccgctctgggctgcctggtcaaggattactttcccgagcctgtgaccgtgtcctggaatagcggagcactgacaagcggcgtgcacacctttccagccgtgctgcaaagcagcggcctgtactctctgagcagcgtggtcacagtgcctagctctagcctgggcacccagacctacatctgcaatgtgaaccacaagcctagcaacaccaaggtggacaagagagtggaacccaagagctgtgaagtgaaaaccgactccaccgaccacgtgaagcccaaagagacagagaacaccaagcagcccagcaagagctgccacaagcccaaggccatcgtgcacaccgagaaagtgaacatgatgagcctgaccgtgctgggcctgcggatgctgttcgccaaaaccgtggccgtgaacttcctgctgaccgccaagctgttcttcctc

SEQ ID NO: 6123 - DNA, 3135 bp, Artificial Sequence
  Synthetic Polynucloetide
atggccttaccagtgaccgccttgctcctgccgctggccttgctgctccacgccgccaggccggaggttcagctgcttgagtctggcggaggactggttcaacctggcggaagcctgagactgtcttgtgccgccagcggcttcacctttagcagctacgccatgagctgggtccgacaggctcctggcaaaggactggaatgggtgtccagcatcagcggcagcggcgactacatctactacgccgatagcgtgaagggcagattcaccatcagccgggacatcagcaagaacaccctgtacctccagatgaacagcctgagagccgaggacaccgccgtgtactactgtgccaaagaaggcaccggcgctaacagcagcctggccgattatagaggccagggcacactggtcaccgtgtctagtggcggaggaagcggcggaggatctgaagtgcaactggtggaatctggaggctctctggtgcagccagggggaagcctgagactgtcttgtgccgcttccggcttcaccttcgacgactacgccatgagctgggtgcgccaggtgccaggcaaaggcctggaatgggtgtccagcatcaactggagcggcacccacaccgattacgccgactccgtgaaaggcagattcacaatcagcagaaacaacgccaacaataccctgtacctgcagatgaactccctgaagtctgaggatacagcagtgtattattgcgccaagaactggcgggacgccggcaccacttggtttgagaaaagcggctctgccggacagggaacccaagtgacagtgtcctccggtaccggcggaggcggatctggcggcggaggtagcggtggcggaggatctgaattcgacatccagatgacacagagccctagcagcctgtctgccagcgtgggagacagagtgaccatcacatgcaaggccagcgaccacatcaacaactggctggcctggtatcagcagaagcctggacaggcccctaagctgctgatctacggcgctaccacactggaaacaggcgtgcccagcagattttctggcagcggctctggcaccgactacaccctgacaatatccagcctccagcctgaggacttcgccacctactactgtcagcagagctggaacaccccttggacattcggccagggcaccaagctggaaatcaagagactcgagggacagcctaaggccaatcctaccgtgacactgttccctccaagcagcgaagaactccaggccaacaaggccacacttgtgtgcctgatctccgacttctaccctggggctgtgacagtggcttggaaggccgatggatctcctgtgaaagccggcgtggaaaccaccaagccatccaagcagagcaacaacaaatacgccgccagctcctacctgagcctgacacctgagcagtggaagtcccacagatcctacagctgccaagtgacccacgaaggcagcaccgtggaaaagacagtggcccctacagagtgcagcggcagagccgattgcggcatcaccagcgccagctaccaccagggcgtgctgagcgccaccatcctgtacgagatcctgctgggcaaggccaccctgtacgccgtgctggtgtctgccctggtgctgatggctatggtcaagcggaaggacagccggggaagggccaagcgatctggatctggagcaacaaacttctcactactcaaacaagcaggtgacgtggaggagaatcccgggcctactagtatggactggatttggcgcatccttttccttgtcggcgctgctaccggcgcccattccgggcccgaagtgcagctggttgaatctggcggaggactggttcagcctggcggatctctgagactgtcttgtgccgcctctggcttcgccagcgactactatatcatcggctggttcagacaggcccctggcaaagagagagagggcgtcagctgtatcagcagcagatacgccaacaccaactacgccgacagcgtgaagggcagattcaccatcagccgggacaacgccaagaacaccgtgtacctccagatgaacagcctgaagcctgaggacaccgccgtgtactactgtgccgccgacaccagaagatacacctgtcctgacattgccaccatgcaccggaacttcgattcttggggccagggcacactggtcaccgtttcttctggatccggcggcggaggatctggcggaggcggatctgggggcggaggctctttcgaacaagttcagcttcaacagcctggcgctgagctggtcaaacctggcgcttctgtgaagatgagctgcaaagccagcggctacgccttcagcagctactggatcaactggatgaagcagaaacccggccagggactcgaatggatcggccaaatctatcccggcgacggcgacaccaactacaacggcaagttcaagggcagagccacactgaccgccgatacctctagcagcacagcctacatgcagctgagcagcctgaccagcgaagatagcgccgtgtacttctgtgcccggtccatcacaacagtcgtgggctgcgctatggactattggggccagggaacaagcgtgaccgtgtctagtacgcgtgcctctacaaagggaccctccgtgtttcctctggctcccagcagcaagtctacaagcggaggaacagccgctctgggctgcctggtcaaggattactttcccgagcctgtgaccgtgtcctggaatagcggagcactgacaagcggcgtgcacacctttccagccgtgctgcaaagcagcggcctgtactctctgagcagcgtggtcacagtgcctagctctagcctgggcacccagacctacatctgcaatgtgaaccacaagcctagcaacaccaaggtggacaagagagtggaacccaagagctgtatccccgaggacacattcttcccaagcagcgacgtgccctgcgacgtgaagctggtggaaaagagcttcgagacagacaccaacctgaacttccagaacctgagcgtgatcggcttcagaatcctgctgctgaaagtggccggctttaacctgctgatgaccctgcggctgtggtccagc

SEQ ID NO: 6124 - DNA, 3135 bp, Artificial Sequence
  Synthetic Polynucloetide
atggccttaccagtgaccgccttgctcctgccgctggccttgctgctccacgccgccaggccggaggttcagctgcttgagtctggcggaggactggttcaacctggcggaagcctgagactgtcttgtgccgccagcggcttcacctttagcagctacgccatgagctgggtccgacaggctcctggcaaaggactggaatgggtgtccagcatcagcggcagcggcgactacatctactacgccgatagcgtgaagggcagattcaccatcagccgggacatcagcaagaacaccctgtacctccagatgaacagcctgagagccgaggacaccgccgtgtactactgtgccaaagaaggcaccggcgctaacagcagcctggccgattatagaggccagggcacactggtcaccgtgtctagtggcggaggaagcggcggaggatctgaagtgcaactggtggaatctggaggctctctggtgcagccagggggaagcctgagactgtcttgtgccgcttccggcttcaccttcgacgactacgccatgagctgggtgcgccaggtgccaggcaaaggcctggaatgggtgtccagcatcaactggagcggcacccacaccgattacgccgactccgtgaaaggcagattcacaatcagcagaaacaacgccaacaataccctgtacctgcagatgaactccctgaagtctgaggatacagcagtgtattattgcgccaagaactggcgggacgccggcaccacttggtttgagaaaagcggctctgccggacagggaacccaagtgacagtgtcctccggtaccggcggaggcggatctggcggcggaggtagcggtggcggaggatctgaattcgacatccagatgacacagagccctagcagcctgtctgccagcgtgggagacagagtgaccatcacatgcaaggccagcgaccacatcaacaactggctggcctggtatcagcagaagcctggacaggcccctaagctgctgatctacggcgctaccacactggaaacaggcgtgcccagcagattttctggcagcggctctggcaccgactacaccctgacaatatccagcctccagcctgaggacttcgccacctactactgtcagcagagctggaacaccccttggacattcggccagggcaccaagctggaaatcaagagactcgagggacagcctaaggccaatcctaccgtgacactgttccctccaagcagcgaagaactccaggccaacaaggccacacttgtgtgcctgatctccgacttctaccctggggctgtgacagtggcttggaaggccgatggatctcctgtgaaagccggcgtggaaaccaccaagccatccaagcagagcaacaacaaatacgccgccagctcctacctgagcctgacacctgagcagtggaagtcccacagatcctacagctgccaagtgacccacgaaggcagcaccgtggaaaagacagtggcccctacagagtgcagcggcagagccgattgcggctttaccagcgagagctaccagcagggcgtgctgagcgccaccatcctgtacgagatcctgctgggcaaggccaccctgtacgccgtgctggtgtctgccctggtgctgatggctatggtcaagcggaaggacagccggggaagggccaagcgatctggatctggagcaacaaacttctcactactcaaacaagcaggtgacgtggaggagaatcccgggcctactagtatggactggatttggcgcatccttttccttgtcggcgctgctaccggcgcccattccgggcccgaagtgcagctggttgaatctggcggaggactggttcagcctggcggatctctgagactgtcttgtgccgcctctggcttcgccagcgactactatatcatcggctggttcagacaggcccctggcaaagagagagagggcgtcagctgtatcagcagcagatacgccaacaccaactacgccgacagcgtgaagggcagattcaccatcagccgggacaacgccaagaacaccgtgtacctccagatgaacagcctgaagcctgaggacaccgccgtgtactactgtgccgccgacaccagaagatacacctgtcctgacattgccaccatgcaccggaacttcgattcttggggccagggcacactggtcaccgtttcttctggatccggcggcggaggatctggcggaggcggatctgggggcggaggctctttcgaacaagttcagcttcaacagcctggcgctgagctggtcaaacctggcgcttctgtgaagatgagctgcaaagccagcggctacgccttcagcagctactggatcaactggatgaagcagaaacccggccagggactcgaatggatcggccaaatctatcccggcgacggcgacaccaactacaacggcaagttcaagggcagagccacactgaccgccgatacctctagcagcacagcctacatgcagctgagcagcctgaccagcgaagatagcgccgtgtacttctgtgcccggtccatcacaacagtcgtgggctgcgctatggactattggggccagggaacaagcgtgaccgtgtctagtacgcgtgcctctacaaagggaccctccgtgtttcctctggctcccagcagcaagtctacaagcggaggaacagccgctctgggctgcctggtcaaggattactttcccgagcctgtgaccgtgtcctggaatagcggagcactgacaagcggcgtgcacacctttccagccgtgctgcaaagcagcggcctgtactctctgagcagcgtggtcacagtgcctagctctagcctgggcacccagacctacatctgcaatgtgaaccacaagcctagcaacaccaaggtggacaagagagtggaacccaagagctgtatccccgaggacacattcttcccaagccccgagagcagctgcgacgtgaagctggtggaaaagagcttcgagacagacaccaacctgaacttccagaacctgagcgtgatcggcttcagaatcctgctgctgaaagtggccggctttaacctgctgatgaccctgcggctgtggtccagc

SEQ ID NO: 6125 - DNA, 3036 bp, Artificial Sequence
  Synthetic Polynucloetide
atggccttaccagtgaccgccttgctcctgccgctggccttgctgctccacgccgccaggccggaggttcagctgcttgagtctggcggaggactggttcaacctggcggaagcctgagactgtcttgtgccgccagcggcttcacctttagcagctacgccatgagctgggtccgacaggctcctggcaaaggactggaatgggtgtccagcatcagcggcagcggcgactacatctactacgccgatagcgtgaagggcagattcaccatcagccgggacatcagcaagaacaccctgtacctccagatgaacagcctgagagccgaggacaccgccgtgtactactgtgccaaagaaggcaccggcgctaacagcagcctggccgattatagaggccagggcacactggtcaccgtgtctagtggcggaggaagcggcggaggatctgaagtgcaactggtggaatctggaggctctctggtgcagccagggggaagcctgagactgtcttgtgccgcttccggcttcaccttcgacgactacgccatgagctgggtgcgccaggtgccaggcaaaggcctggaatgggtgtccagcatcaactggagcggcacccacaccgattacgccgactccgtgaaaggcagattcacaatcagcagaaacaacgccaacaataccctgtacctgcagatgaactccctgaagtctgaggatacagcagtgtattattgcgccaagaactggcgggacgccggcaccacttggtttgagaaaagcggctctgccggacagggaacccaagtgacagtgtcctccctcgagggacagcctaaggccaatcctaccgtgacactgttccctccaagcagcgaagaactccaggccaacaaggccacacttgtgtgcctgatctccgacttctaccctggggctgtgacagtggcttggaaggccgatggatctcctgtgaaagccggcgtggaaaccaccaagccatccaagcagagcaacaacaaatacgccgccagctcctacctgagcctgacacctgagcagtggaagtcccacagatcctacagctgccaagtgacccacgaaggcagcaccgtggaaaagacagtggcccctacagagtgcagcggcagagccgattgcggctttaccagcgagagctaccagcagggcgtgctgagcgccaccatcctgtacgagatcctgctgggcaaggccaccctgtacgccgtgctggtgtctgccctggtgctgatggctatggtcaagcggaaggacagccggggaagggccaagcgatctggatctggagcaacaaacttctcactactcaaacaagcaggtgacgtggaggagaatcccgggcctactagtatggactggatttggcgcatccttttccttgtcggcgctgctaccggcgcgcattccgggcccgaagtgcagctggttgaatctggcggaggactggttcagcctggcggatctctgagactgtcttgtgccgcctctggcttcgccagcgactactatatcatcggctggttcagacaggcccctggcaaagagagagagggcgtcagctgtatcagcagcagatacgccaacaccaactacgccgacagcgtgaagggcagattcaccatcagccgggacaacgccaagaacaccgtgtacctccagatgaacagcctgaagcctgaggacaccgccgtgtactactgtgccgccgacaccagaagatacacctgtcctgacattgccaccatgcaccggaacttcgattcttggggccagggcacactggtcaccgtttcttctacgcgtgcctctacaaagggaccctccgtgtttcctctggctcccagcagcaagtctacaagcggaggaacagccgctctgggctgcctggtcaaggattactttcccgagcctgtgaccgtgtcctggaatagcggagcactgacaagcggcgtgcacacctttccagccgtgctgcaaagcagcggcctgtactctctgagcagcgtggtcacagtgcctagctctagcctgggcacccagacctacatctgcaatgtgaaccacaagcctagcaacaccaaggtggacaagagagtggaacccaagagctgtatccccgaggacacattcttcccaagccccgagagcagctgcgacgtgaagctggtggaaaagagcttcgagacagacaccaacctgaacttccagaacctgagcgtgatcggcttcagaatcctgctgctgaaagtggccggctttaacctgctgatgaccctgcggctgtggtccagccgcgccaagagaagcggatctggcgtgaagcagaccctgaatttcgacctgctgaagctggctggcgacgtggaatccaacccaggcccttctagaggccatatgaccgagtacaagcccacggtgcgcctcgccacccgcgacgacgtccccagggccgtacgcaccctcgccgccgcgttcgccgactaccccgccacgcgccacaccgtcgatccggaccgccacatcgagcgggtcaccgagctgcaagaactcttcctcacgcgcgtcgggctcgacatcggcaaggtgtgggtcgcggacgacggcgccgcggtggcggtctggaccacgccggagagcgtcgaagcgggggcggtgttcgccgagatcggcccgcgcatggccgagttgagcggttcccggctggccgcgcagcaacagatggaaggcctcctggcgccgcaccggcccaaggagcccgcgtggttcctggccaccgtcggcgtctcgcccgaccaccagggcaagggtctgggcagcgccgtcgtgctccccggagtggaggcggccgagcgcgccggggtgcccgccttcctggagacctccgcgccccgcaacctccccttctacgagcggctcggcttcaccgtcaccgccgacgtcgaggtgcccgaaggaccgcgcacctggtgcatgacccgcaagcccggtgcctga

SEQ ID NO: 6126 - DNA, 2334 bp, Artificial Sequence
  Synthetic Polynucloetide
atggccttaccagtgaccgccttgctcctgccgctggccttgctgctccacgccgccaggccggaggttcagctgcttgagtctggcggaggactggttcaacctggcggaagcctgagactgtcttgtgccgccagcggcttcacctttagcagctacgccatgagctgggtccgacaggctcctggcaaaggactggaatgggtgtccagcatcagcggcagcggcgactacatctactacgccgatagcgtgaagggcagattcaccatcagccgggacatcagcaagaacaccctgtacctccagatgaacagcctgagagccgaggacaccgccgtgtactactgtgccaaagaaggcaccggcgctaacagcagcctggccgattatagaggccagggcacactggtcaccgtgtctagtggcggaggaagcggcggaggatctgaagtgcaactggtggaatctggaggctctctggtgcagccagggggaagcctgagactgtcttgtgccgcttccggcttcaccttcgacgactacgccatgagctgggtgcgccaggtgccaggcaaaggcctggaatgggtgtccagcatcaactggagcggcacccacaccgattacgccgactccgtgaaaggcagattcacaatcagcagaaacaacgccaacaataccctgtacctgcagatgaactccctgaagtctgaggatacagcagtgtattattgcgccaagaactggcgggacgccggcaccacttggtttgagaaaagcggctctgccggacagggaacccaagtgacagtgtcctccctcgagggacagcctaaggccaatcctaccgtgacactgttccctccaagcagcgaagaactccaggccaacaaggccacacttgtgtgcctgatctccgacttctaccctggggctgtgacagtggcttggaaggccgatggatctcctgtgaaagccggcgtggaaaccaccaagccatccaagcagagcaacaacaaatacgccgccagctcctacctgagcctgacacctgagcagtggaagtcccacagatcctacagctgccaagtgacccacgaaggcagcaccgtggaaaagacagtggcccctacagagtgcagcggcagagccgattgcggctttaccagcgagagctaccagcagggcgtgctgagcgccaccatcctgtacgagatcctgctgggcaaggccaccctgtacgccgtgctggtgtctgccctggtgctgatggctatggtcaagcggaaggacagccggggaagggccaagcgatctggatctggagcaacaaacttctcactactcaaacaagcaggtgacgtggaggagaatcccgggcctactagtatggactggatttggcgcatccttttccttgtcggcgctgctaccggcgcgcattccgggcccgaagtgcagctggttgaatctggcggaggactggttcagcctggcggatctctgagactgtcttgtgccgcctctggcttcgccagcgactactatatcatcggctggttcagacaggcccctggcaaagagagagagggcgtcagctgtatcagcagcagatacgccaacaccaactacgccgacagcgtgaagggcagattcaccatcagccgggacaacgccaagaacaccgtgtacctccagatgaacagcctgaagcctgaggacaccgccgtgtactactgtgccgccgacaccagaagatacacctgtcctgacattgccaccatgcaccggaacttcgattcttggggccagggcacactggtcaccgtttcttctacgcgtgcctctacaaagggaccctccgtgtttcctctggctcccagcagcaagtctacaagcggaggaacagccgctctgggctgcctggtcaaggattactttcccgagcctgtgaccgtgtcctggaatagcggagcactgacaagcggcgtgcacacctttccagccgtgctgcaaagcagcggcctgtactctctgagcagcgtggtcacagtgcctagctctagcctgggcacccagacctacatctgcaatgtgaaccacaagcctagcaacaccaaggtggacaagagagtggaacccaagagctgtatccccgaggacacattcttcccaagccccgagagcagctgcgacgtgaagctggtggaaaagagcttcgagacagacaccaacctgaacttccagaacctgagcgtgatcggcttcagaatcctgctgctgaaagtggccggctttaacctgctgatgaccctgcggctgtggtccagc

SEQ ID NO: 6127 - DNA, 2421 bp, Artificial Sequence
  Synthetic Polynucloetide
atggccttaccagtgaccgccttgctcctgccgctggccttgctgctccacgccgccaggccggaggttcagctgcttgagtctggcggaggactggttcaacctggcggaagcctgagactgtcttgtgccgccagcggcttcacctttagcagctacgccatgagctgggtccgacaggctcctggcaaaggactggaatgggtgtccagcatcagcggcagcggcgactacatctactacgccgatagcgtgaagggcagattcaccatcagccgggacatcagcaagaacaccctgtacctccagatgaacagcctgagagccgaggacaccgccgtgtactactgtgccaaagaaggcaccggcgctaacagcagcctggccgattatagaggccagggcacactggtcaccgtgtctagtggcggaggaagcggcggaggatctgaagtgcaactggtggaatctggaggctctctggtgcagccagggggaagcctgagactgtcttgtgccgcttccggcttcaccttcgacgactacgccatgagctgggtgcgccaggtgccaggcaaaggcctggaatgggtgtccagcatcaactggagcggcacccacaccgattacgccgactccgtgaaaggcagattcacaatcagcagaaacaacgccaacaataccctgtacctgcagatgaactccctgaagtctgaggatacagcagtgtattattgcgccaagaactggcgggacgccggcaccacttggtttgagaaaagcggctctgccggacagggaacccaagtgacagtgtcctccctcgagggatctggcagagccgattgcggctttaccagcgagagctaccagcagggcgtgctgagcgccaccatcctgtacgagatcctgctgggcaaggccaccctgtacgccgtgctggtgtctgccctggtgctgatggctatggtcaagcggaaggacagccggggaagggccaagcgatctggatctggagcaacaaacttctcactactcaaacaagcaggtgacgtggaggagaatcccgggcctactagtatggactggatttggcgcatccttttccttgtcggcgctgctaccggcgcgcattccgggcccgaagtgcagctggttgaatctggcggaggactggttcagcctggcggatctctgagactgtcttgtgccgcctctggcttcgccagcgactactatatcatcggctggttcagacaggcccctggcaaagagagagagggcgtcagctgtatcagcagcagatacgccaacaccaactacgccgacagcgtgaagggcagattcaccatcagccgggacaacgccaagaacaccgtgtacctccagatgaacagcctgaagcctgaggacaccgccgtgtactactgtgccgccgacaccagaagatacacctgtcctgacattgccaccatgcaccggaacttcgattcttggggccagggcacactggtcaccgtttcttctacgcgtggcagcatccccgaggacacattcttcccaagccccgagagcagctgcgacgtgaagctggtggaaaagagcttcgagacagacaccaacctgaacttccagaacctgagcgtgatcggcttcagaatcctgctgctgaaagtggccggctttaacctgctgatgaccctgcggctgtggtccagccgcgccaagagaagcggatctggcgtgaagcagaccctgaatttcgacctgctgaagctggctggcgacgtggaatccaacccaggcccttctagaggccatatgaccgagtacaagcccacggtgcgcctcgccacccgcgacgacgtccccagggccgtacgcaccctcgccgccgcgttcgccgactaccccgccacgcgccacaccgtcgatccggaccgccacatcgagcgggtcaccgagctgcaagaactcttcctcacgcgcgtcgggctcgacatcggcaaggtgtgggtcgcggacgacggcgccgcggtggcggtctggaccacgccggagagcgtcgaagcgggggcggtgttcgccgagatcggcccgcgcatggccgagttgagcggttcccggctggccgcgcagcaacagatggaaggcctcctggcgccgcaccggcccaaggagcccgcgtggttcctggccaccgtcggcgtctcgcccgaccaccagggcaagggtctgggcagcgccgtcgtgctccccggagtggaggcggccgagcgcgccggggtgcccgccttcctggagacctccgcgccccgcaacctccccttctacgagcggctcggcttcaccgtcaccgccgacgtcgaggtgcccgaaggaccgcgcacctggtgcatgacccgcaagcccggtgcctga

SEQ ID NO: 6128 - DNA, 1719 bp, Artificial Sequence
  Synthetic Polynucloetide
atggccttaccagtgaccgccttgctcctgccgctggccttgctgctccacgccgccaggccggaggttcagctgcttgagtctggcggaggactggttcaacctggcggaagcctgagactgtcttgtgccgccagcggcttcacctttagcagctacgccatgagctgggtccgacaggctcctggcaaaggactggaatgggtgtccagcatcagcggcagcggcgactacatctactacgccgatagcgtgaagggcagattcaccatcagccgggacatcagcaagaacaccctgtacctccagatgaacagcctgagagccgaggacaccgccgtgtactactgtgccaaagaaggcaccggcgctaacagcagcctggccgattatagaggccagggcacactggtcaccgtgtctagtggcggaggaagcggcggaggatctgaagtgcaactggtggaatctggaggctctctggtgcagccagggggaagcctgagactgtcttgtgccgcttccggcttcaccttcgacgactacgccatgagctgggtgcgccaggtgccaggcaaaggcctggaatgggtgtccagcatcaactggagcggcacccacaccgattacgccgactccgtgaaaggcagattcacaatcagcagaaacaacgccaacaataccctgtacctgcagatgaactccctgaagtctgaggatacagcagtgtattattgcgccaagaactggcgggacgccggcaccacttggtttgagaaaagcggctctgccggacagggaacccaagtgacagtgtcctccctcgagggatctggcagagccgattgcggctttaccagcgagagctaccagcagggcgtgctgagcgccaccatcctgtacgagatcctgctgggcaaggccaccctgtacgccgtgctggtgtctgccctggtgctgatggctatggtcaagcggaaggacagccggggaagggccaagcgatctggatctggagcaacaaacttctcactactcaaacaagcaggtgacgtggaggagaatcccgggcctactagtatggactggatttggcgcatccttttccttgtcggcgctgctaccggcgcgcattccgggcccgaagtgcagctggttgaatctggcggaggactggttcagcctggcggatctctgagactgtcttgtgccgcctctggcttcgccagcgactactatatcatcggctggttcagacaggcccctggcaaagagagagagggcgtcagctgtatcagcagcagatacgccaacaccaactacgccgacagcgtgaagggcagattcaccatcagccgggacaacgccaagaacaccgtgtacctccagatgaacagcctgaagcctgaggacaccgccgtgtactactgtgccgccgacaccagaagatacacctgtcctgacattgccaccatgcaccggaacttcgattcttggggccagggcacactggtcaccgtttcttctacgcgtggcagcatccccgaggacacattcttcccaagccccgagagcagctgcgacgtgaagctggtggaaaagagcttcgagacagacaccaacctgaacttccagaacctgagcgtgatcggcttcagaatcctgctgctgaaagtggccggctttaacctgctgatgaccctgcggctgtggtccagc

SEQ ID NO: 6129 - DNA, 2448 bp, Artificial Sequence
  Synthetic Polynucloetide
atggccttaccagtgaccgccttgctcctgccgctggccttgctgctccacgccgccaggccggaggttcagctgcttgagtctggcggaggactggttcaacctggcggaagcctgagactgtcttgtgccgccagcggcttcacctttagcagctacgccatgagctgggtccgacaggctcctggcaaaggactggaatgggtgtccagcatcagcggcagcggcgactacatctactacgccgatagcgtgaagggcagattcaccatcagccgggacatcagcaagaacaccctgtacctccagatgaacagcctgagagccgaggacaccgccgtgtactactgtgccaaagaaggcaccggcgctaacagcagcctggccgattatagaggccagggcacactggtcaccgtgtctagtggcggaggaagcggcggaggatctgaagtgcaactggtggaatctggaggctctctggtgcagccagggggaagcctgagactgtcttgtgccgcttccggcttcaccttcgacgactacgccatgagctgggtgcgccaggtgccaggcaaaggcctggaatgggtgtccagcatcaactggagcggcacccacaccgattacgccgactccgtgaaaggcagattcacaatcagcagaaacaacgccaacaataccctgtacctgcagatgaactccctgaagtctgaggatacagcagtgtattattgcgccaagaactggcgggacgccggcaccacttggtttgagaaaagcggctctgccggacagggaacccaagtgacagtgtcctccctcgaggacaaaactcacacatgcccaccgtgcccagcaggcagagccgattgcggctttaccagcgagagctaccagcagggcgtgctgagcgccaccatcctgtacgagatcctgctgggcaaggccaccctgtacgccgtgctggtgtctgccctggtgctgatggctatggtcaagcggaaggacagccggggaagggccaagcgatctggatctggagcaacaaacttctcactactcaaacaagcaggtgacgtggaggagaatcccgggcctactagtatggactggatttggcgcatccttttccttgtcggcgctgctaccggcgcgcattccgggcccgaagtgcagctggttgaatctggcggaggactggttcagcctggcggatctctgagactgtcttgtgccgcctctggcttcgccagcgactactatatcatcggctggttcagacaggcccctggcaaagagagagagggcgtcagctgtatcagcagcagatacgccaacaccaactacgccgacagcgtgaagggcagattcaccatcagccgggacaacgccaagaacaccgtgtacctccagatgaacagcctgaagcctgaggacaccgccgtgtactactgtgccgccgacaccagaagatacacctgtcctgacattgccaccatgcaccggaacttcgattcttggggccagggcacactggtcaccgtttcttctacgcgtggcagcatccccgaggacacattcttcccaagccccgagagcagctgcgacgtgaagctggtggaaaagagcttcgagacagacaccaacctgaacttccagaacctgagcgtgatcggcttcagaatcctgctgctgaaagtggccggctttaacctgctgatgaccctgcggctgtggtccagccgcgccaagagaagcggatctggcgtgaagcagaccctgaatttcgacctgctgaagctggctggcgacgtggaatccaacccaggcccttctagaggccatatgaccgagtacaagcccacggtgcgcctcgccacccgcgacgacgtccccagggccgtacgcaccctcgccgccgcgttcgccgactaccccgccacgcgccacaccgtcgatccggaccgccacatcgagcgggtcaccgagctgcaagaactcttcctcacgcgcgtcgggctcgacatcggcaaggtgtgggtcgcggacgacggcgccgcggtggcggtctggaccacgccggagagcgtcgaagcgggggcggtgttcgccgagatcggcccgcgcatggccgagttgagcggttcccggctggccgcgcagcaacagatggaaggcctcctggcgccgcaccggcccaaggagcccgcgtggttcctggccaccgtcggcgtctcgcccgaccaccagggcaagggtctgggcagcgccgtcgtgctccccggagtggaggcggccgagcgcgccggggtgcccgccttcctggagacctccgcgccccgcaacctccccttctacgagcggctcggcttcaccgtcaccgccgacgtcgaggtgcccgaaggaccgcgcacctggtgcatgacccgcaagcccggtgcctga

SEQ ID NO: 6130 - DNA, 2448 bp, Artificial Sequence
  Synthetic Polynucloetide
atggccttaccagtgaccgccttgctcctgccgctggccttgctgctccacgccgccaggccggaggttcagctgcttgagtctggcggaggactggttcaacctggcggaagcctgagactgtcttgtgccgccagcggcttcacctttagcagctacgccatgagctgggtccgacaggctcctggcaaaggactggaatgggtgtccagcatcagcggcagcggcgactacatctactacgccgatagcgtgaagggcagattcaccatcagccgggacatcagcaagaacaccctgtacctccagatgaacagcctgagagccgaggacaccgccgtgtactactgtgccaaagaaggcaccggcgctaacagcagcctggccgattatagaggccagggcacactggtcaccgtgtctagtggcggaggaagcggcggaggatctgaagtgcaactggtggaatctggaggctctctggtgcagccagggggaagcctgagactgtcttgtgccgcttccggcttcaccttcgacgactacgccatgagctgggtgcgccaggtgccaggcaaaggcctggaatgggtgtccagcatcaactggagcggcacccacaccgattacgccgactccgtgaaaggcagattcacaatcagcagaaacaacgccaacaataccctgtacctgcagatgaactccctgaagtctgaggatacagcagtgtattattgcgccaagaactggcgggacgccggcaccacttggtttgagaaaagcggctctgccggacagggaacccaagtgacagtgtcctccctcgagggatctggcagagccgattgcggctttaccagcgagagctaccagcagggcgtgctgagcgccaccatcctgtacgagatcctgctgggcaaggccaccctgtacgccgtgctggtgtctgccctggtgctgatggctatggtcaagcggaaggacagccggggaagggccaagcgatctggatctggagcaacaaacttctcactactcaaacaagcaggtgacgtggaggagaatcccgggcctactagtatggactggatttggcgcatccttttccttgtcggcgctgctaccggcgcgcattccgggcccgaagtgcagctggttgaatctggcggaggactggttcagcctggcggatctctgagactgtcttgtgccgcctctggcttcgccagcgactactatatcatcggctggttcagacaggcccctggcaaagagagagagggcgtcagctgtatcagcagcagatacgccaacaccaactacgccgacagcgtgaagggcagattcaccatcagccgggacaacgccaagaacaccgtgtacctccagatgaacagcctgaagcctgaggacaccgccgtgtactactgtgccgccgacaccagaagatacacctgtcctgacattgccaccatgcaccggaacttcgattcttggggccagggcacactggtcaccgtttcttctacgcgtgataaaactcatacctgtccgccatgcccggcaatccccgaggacacattcttcccaagccccgagagcagctgcgacgtgaagctggtggaaaagagcttcgagacagacaccaacctgaacttccagaacctgagcgtgatcggcttcagaatcctgctgctgaaagtggccggctttaacctgctgatgaccctgcggctgtggtccagccgcgccaagagaagcggatctggcgtgaagcagaccctgaatttcgacctgctgaagctggctggcgacgtggaatccaacccaggcccttctagaggccatatgaccgagtacaagcccacggtgcgcctcgccacccgcgacgacgtccccagggccgtacgcaccctcgccgccgcgttcgccgactaccccgccacgcgccacaccgtcgatccggaccgccacatcgagcgggtcaccgagctgcaagaactcttcctcacgcgcgtcgggctcgacatcggcaaggtgtgggtcgcggacgacggcgccgcggtggcggtctggaccacgccggagagcgtcgaagcgggggcggtgttcgccgagatcggcccgcgcatggccgagttgagcggttcccggctggccgcgcagcaacagatggaaggcctcctggcgccgcaccggcccaaggagcccgcgtggttcctggccaccgtcggcgtctcgcccgaccaccagggcaagggtctgggcagcgccgtcgtgctccccggagtggaggcggccgagcgcgccggggtgcccgccttcctggagacctccgcgccccgcaacctccccttctacgagcggctcggcttcaccgtcaccgccgacgtcgaggtgcccgaaggaccgcgcacctggtgcatgacccgcaagcccggtgcctga

SEQ ID NO: 6131 - DNA, 2475 bp, Artificial Sequence
  Synthetic Polynucloetide
atggccttaccagtgaccgccttgctcctgccgctggccttgctgctccacgccgccaggccggaggttcagctgcttgagtctggcggaggactggttcaacctggcggaagcctgagactgtcttgtgccgccagcggcttcacctttagcagctacgccatgagctgggtccgacaggctcctggcaaaggactggaatgggtgtccagcatcagcggcagcggcgactacatctactacgccgatagcgtgaagggcagattcaccatcagccgggacatcagcaagaacaccctgtacctccagatgaacagcctgagagccgaggacaccgccgtgtactactgtgccaaagaaggcaccggcgctaacagcagcctggccgattatagaggccagggcacactggtcaccgtgtctagtggcggaggaagcggcggaggatctgaagtgcaactggtggaatctggaggctctctggtgcagccagggggaagcctgagactgtcttgtgccgcttccggcttcaccttcgacgactacgccatgagctgggtgcgccaggtgccaggcaaaggcctggaatgggtgtccagcatcaactggagcggcacccacaccgattacgccgactccgtgaaaggcagattcacaatcagcagaaacaacgccaacaataccctgtacctgcagatgaactccctgaagtctgaggatacagcagtgtattattgcgccaagaactggcgggacgccggcaccacttggtttgagaaaagcggctctgccggacagggaacccaagtgacagtgtcctccctcgaggacaaaactcacacatgcccaccgtgcccagcaggcagagccgattgcggctttaccagcgagagctaccagcagggcgtgctgagcgccaccatcctgtacgagatcctgctgggcaaggccaccctgtacgccgtgctggtgtctgccctggtgctgatggctatggtcaagcggaaggacagccggggaagggccaagcgatctggatctggagcaacaaacttctcactactcaaacaagcaggtgacgtggaggagaatcccgggcctactagtatggactggatttggcgcatccttttccttgtcggcgctgctaccggcgcgcattccgggcccgaagtgcagctggttgaatctggcggaggactggttcagcctggcggatctctgagactgtcttgtgccgcctctggcttcgccagcgactactatatcatcggctggttcagacaggcccctggcaaagagagagagggcgtcagctgtatcagcagcagatacgccaacaccaactacgccgacagcgtgaagggcagattcaccatcagccgggacaacgccaagaacaccgtgtacctccagatgaacagcctgaagcctgaggacaccgccgtgtactactgtgccgccgacaccagaagatacacctgtcctgacattgccaccatgcaccggaacttcgattcttggggccagggcacactggtcaccgtttcttctacgcgtgataaaactcatacctgtccgccatgcccggcaatccccgaggacacattcttcccaagccccgagagcagctgcgacgtgaagctggtggaaaagagcttcgagacagacaccaacctgaacttccagaacctgagcgtgatcggcttcagaatcctgctgctgaaagtggccggctttaacctgctgatgaccctgcggctgtggtccagccgcgccaagagaagcggatctggcgtgaagcagaccctgaatttcgacctgctgaagctggctggcgacgtggaatccaacccaggcccttctagaggccatatgaccgagtacaagcccacggtgcgcctcgccacccgcgacgacgtccccagggccgtacgcaccctcgccgccgcgttcgccgactaccccgccacgcgccacaccgtcgatccggaccgccacatcgagcgggtcaccgagctgcaagaactcttcctcacgcgcgtcgggctcgacatcggcaaggtgtgggtcgcggacgacggcgccgcggtggcggtctggaccacgccggagagcgtcgaagcgggggcggtgttcgccgagatcggcccgcgcatggccgagttgagcggttcccggctggccgcgcagcaacagatggaaggcctcctggcgccgcaccggcccaaggagcccgcgtggttcctggccaccgtcggcgtctcgcccgaccaccagggcaagggtctgggcagcgccgtcgtgctccccggagtggaggcggccgagcgcgccggggtgcccgccttcctggagacctccgcgccccgcaacctccccttctacgagcggctcggcttcaccgtcaccgccgacgtcgaggtgcccgaaggaccgcgcacctggtgcatgacccgcaagcccggtgcctga

SEQ ID NO: 6132 - DNA, 1773 bp, Artificial Sequence
  Synthetic Polynucloetide
atggccttaccagtgaccgccttgctcctgccgctggccttgctgctccacgccgccaggccggaggttcagctgcttgagtctggcggaggactggttcaacctggcggaagcctgagactgtcttgtgccgccagcggcttcacctttagcagctacgccatgagctgggtccgacaggctcctggcaaaggactggaatgggtgtccagcatcagcggcagcggcgactacatctactacgccgatagcgtgaagggcagattcaccatcagccgggacatcagcaagaacaccctgtacctccagatgaacagcctgagagccgaggacaccgccgtgtactactgtgccaaagaaggcaccggcgctaacagcagcctggccgattatagaggccagggcacactggtcaccgtgtctagtggcggaggaagcggcggaggatctgaagtgcaactggtggaatctggaggctctctggtgcagccagggggaagcctgagactgtcttgtgccgcttccggcttcaccttcgacgactacgccatgagctgggtgcgccaggtgccaggcaaaggcctggaatgggtgtccagcatcaactggagcggcacccacaccgattacgccgactccgtgaaaggcagattcacaatcagcagaaacaacgccaacaataccctgtacctgcagatgaactccctgaagtctgaggatacagcagtgtattattgcgccaagaactggcgggacgccggcaccacttggtttgagaaaagcggctctgccggacagggaacccaagtgacagtgtcctccctcgaggacaaaactcacacatgcccaccgtgcccagcaggcagagccgattgcggctttaccagcgagagctaccagcagggcgtgctgagcgccaccatcctgtacgagatcctgctgggcaaggccaccctgtacgccgtgctggtgtctgccctggtgctgatggctatggtcaagcggaaggacagccggggaagggccaagcgatctggatctggagcaacaaacttctcactactcaaacaagcaggtgacgtggaggagaatcccgggcctactagtatggactggatttggcgcatccttttccttgtcggcgctgctaccggcgcgcattccgggcccgaagtgcagctggttgaatctggcggaggactggttcagcctggcggatctctgagactgtcttgtgccgcctctggcttcgccagcgactactatatcatcggctggttcagacaggcccctggcaaagagagagagggcgtcagctgtatcagcagcagatacgccaacaccaactacgccgacagcgtgaagggcagattcaccatcagccgggacaacgccaagaacaccgtgtacctccagatgaacagcctgaagcctgaggacaccgccgtgtactactgtgccgccgacaccagaagatacacctgtcctgacattgccaccatgcaccggaacttcgattcttggggccagggcacactggtcaccgtttcttctacgcgtgataaaactcatacctgtccgccatgcccggcaatccccgaggacacattcttcccaagccccgagagcagctgcgacgtgaagctggtggaaaagagcttcgagacagacaccaacctgaacttccagaacctgagcgtgatcggcttcagaatcctgctgctgaaagtggccggctttaacctgctgatgaccctgcggctgtggtccagc

SEQ ID NO: 6133 - DNA, 1746 bp, Artificial Sequence
  Synthetic Polynucloetide
atggccttaccagtgaccgccttgctcctgccgctggccttgctgctccacgccgccaggccggaggttcagctgcttgagtctggcggaggactggttcaacctggcggaagcctgagactgtcttgtgccgccagcggcttcacctttagcagctacgccatgagctgggtccgacaggctcctggcaaaggactggaatgggtgtccagcatcagcggcagcggcgactacatctactacgccgatagcgtgaagggcagattcaccatcagccgggacatcagcaagaacaccctgtacctccagatgaacagcctgagagccgaggacaccgccgtgtactactgtgccaaagaaggcaccggcgctaacagcagcctggccgattatagaggccagggcacactggtcaccgtgtctagtggcggaggaagcggcggaggatctgaagtgcaactggtggaatctggaggctctctggtgcagccagggggaagcctgagactgtcttgtgccgcttccggcttcaccttcgacgactacgccatgagctgggtgcgccaggtgccaggcaaaggcctggaatgggtgtccagcatcaactggagcggcacccacaccgattacgccgactccgtgaaaggcagattcacaatcagcagaaacaacgccaacaataccctgtacctgcagatgaactccctgaagtctgaggatacagcagtgtattattgcgccaagaactggcgggacgccggcaccacttggtttgagaaaagcggctctgccggacagggaacccaagtgacagtgtcctccctcgagggatctggcagagccgattgcggctttaccagcgagagctaccagcagggcgtgctgagcgccaccatcctgtacgagatcctgctgggcaaggccaccctgtacgccgtgctggtgtctgccctggtgctgatggctatggtcaagcggaaggacagccggggaagggccaagcgatctggatctggagcaacaaacttctcactactcaaacaagcaggtgacgtggaggagaatcccgggcctactagtatggactggatttggcgcatccttttccttgtcggcgctgctaccggcgcgcattccgggcccgaagtgcagctggttgaatctggcggaggactggttcagcctggcggatctctgagactgtcttgtgccgcctctggcttcgccagcgactactatatcatcggctggttcagacaggcccctggcaaagagagagagggcgtcagctgtatcagcagcagatacgccaacaccaactacgccgacagcgtgaagggcagattcaccatcagccgggacaacgccaagaacaccgtgtacctccagatgaacagcctgaagcctgaggacaccgccgtgtactactgtgccgccgacaccagaagatacacctgtcctgacattgccaccatgcaccggaacttcgattcttggggccagggcacactggtcaccgtttcttctacgcgtgataaaactcatacctgtccgccatgcccggcaatccccgaggacacattcttcccaagccccgagagcagctgcgacgtgaagctggtggaaaagagcttcgagacagacaccaacctgaacttccagaacctgagcgtgatcggcttcagaatcctgctgctgaaagtggccggctttaacctgctgatgaccctgcggctgtggtccagc

SEQ ID NO: 6134 - DNA, 3102 bp, Artificial Sequence
  Synthetic Polynucloetide
atggccttaccagtgaccgccttgctcctgccgctggccttgctgctccacgccgccaggccggaggttcagctgcttgagtctggcggaggactggttcaacctggcggaagcctgagactgtcttgtgccgccagcggcttcacctttagcagctacgccatgagctgggtccgacaggctcctggcaaaggactggaatgggtgtccagcatcagcggcagcggcgactacatctactacgccgatagcgtgaagggcagattcaccatcagccgggacatcagcaagaacaccctgtacctccagatgaacagcctgagagccgaggacaccgccgtgtactactgtgccaaagaaggcaccggcgctaacagcagcctggccgattatagaggccagggcacactggtcaccgtgtctagtggcggaggaagcggcggaggatctgaagtgcaactggtggaatctggaggctctctggtgcagccagggggaagcctgagactgtcttgtgccgcttccggcttcaccttcgacgactacgccatgagctgggtgcgccaggtgccaggcaaaggcctggaatgggtgtccagcatcaactggagcggcacccacaccgattacgccgactccgtgaaaggcagattcacaatcagcagaaacaacgccaacaataccctgtacctgcagatgaactccctgaagtctgaggatacagcagtgtattattgcgccaagaactggcgggacgccggcaccacttggtttgagaaaagcggctctgccggacagggaacccaagtgacagtgtcctccctcgagggacagcctaaggccaatcctaccgtgacactgttccctccaagcagcgaagaactccaggccaacaaggccacacttgtgtgcctgatctccgacttctaccctggggctgtgacagtggcttggaaggccgatggatctcctgtgaaagccggcgtggaaaccaccaagccatccaagcagagcaacaacaaatacgccgccagctcctacctgagcctgacacctgagcagtggaagtcccacagatcctacagctgccaagtgacccacgaaggcagcaccgtggaaaagacagtggcccctacagagtgcagccccatcaagaccgatgtgattacaatggaccccaaggacaactgctccaaggacgccaacgataccctgctgctccagctgaccaacaccagcgcctactacatgtacttgttgctgctgctgaagtccgtggtgtacttcgccatcatcacatgctgcctgctgcggagaaccgccttctgctgcaacggcgagaagtctagggccaagcgatctggatctggagcaacaaacttctcactactcaaacaagcaggtgacgtggaggagaatcccgggcctactagtatggactggatttggcgcatccttttccttgtcggcgctgctaccggcgcgcattccgggcccgaagtgcagctggttgaatctggcggaggactggttcagcctggcggatctctgagactgtcttgtgccgcctctggcttcgccagcgactactatatcatcggctggttcagacaggcccctggcaaagagagagagggcgtcagctgtatcagcagcagatacgccaacaccaactacgccgacagcgtgaagggcagattcaccatcagccgggacaacgccaagaacaccgtgtacctccagatgaacagcctgaagcctgaggacaccgccgtgtactactgtgccgccgacaccagaagatacacctgtcctgacattgccaccatgcaccggaacttcgattcttggggccagggcacactggtcaccgtttcttctacgcgtgcctctacaaagggaccctccgtgtttcctctggctcccagcagcaagtctacaagcggaggaacagccgctctgggctgcctggtcaaggattactttcccgagcctgtgaccgtgtcctggaatagcggagcactgacaagcggcgtgcacacctttccagccgtgctgcaaagcagcggcctgtactctctgagcagcgtggtcacagtgcctagctctagcctgggcacccagacctacatctgcaatgtgaaccacaagcctagcaacaccaaggtggacaagagagtggaacccaagagctgtgaagtgaaaaccgactccaccgaccacgtgaagcccaaagagacagagaacaccaagcagcccagcaagagctgccacaagcccaaggccatcgtgcacaccgagaaagtgaacatgatgagcctgaccgtgctgggcctgcggatgctgttcgccaaaaccgtggccgtgaacttcctgctgaccgccaagctgttcttcctccgcgccaagagaagcggatctggcgtgaagcagaccctgaatttcgacctgctgaagctggctggcgacgtggaatccaacccaggcccttctagaggccatatgaccgagtacaagcccacggtgcgcctcgccacccgcgacgacgtccccagggccgtacgcaccctcgccgccgcgttcgccgactaccccgccacgcgccacaccgtcgatccggaccgccacatcgagcgggtcaccgagctgcaagaactcttcctcacgcgcgtcgggctcgacatcggcaaggtgtgggtcgcggacgacggcgccgcggtggcggtctggaccacgccggagagcgtcgaagcgggggcggtgttcgccgagatcggcccgcgcatggccgagttgagcggttcccggctggccgcgcagcaacagatggaaggcctcctggcgccgcaccggcccaaggagcccgcgtggttcctggccaccgtcggcgtctcgcccgaccaccagggcaagggtctgggcagcgccgtcgtgctccccggagtggaggcggccgagcgcgccggggtgcccgccttcctggagacctccgcgccccgcaacctccccttctacgagcggctcggcttcaccgtcaccgccgacgtcgaggtgcccgaaggaccgcgcacctggtgcatgacccgcaagcccggtgcctga

SEQ ID NO: 6135 - DNA, 2400 bp, Artificial Sequence
  Synthetic Polynucloetide
atggccttaccagtgaccgccttgctcctgccgctggccttgctgctccacgccgccaggccggaggttcagctgcttgagtctggcggaggactggttcaacctggcggaagcctgagactgtcttgtgccgccagcggcttcacctttagcagctacgccatgagctgggtccgacaggctcctggcaaaggactggaatgggtgtccagcatcagcggcagcggcgactacatctactacgccgatagcgtgaagggcagattcaccatcagccgggacatcagcaagaacaccctgtacctccagatgaacagcctgagagccgaggacaccgccgtgtactactgtgccaaagaaggcaccggcgctaacagcagcctggccgattatagaggccagggcacactggtcaccgtgtctagtggcggaggaagcggcggaggatctgaagtgcaactggtggaatctggaggctctctggtgcagccagggggaagcctgagactgtcttgtgccgcttccggcttcaccttcgacgactacgccatgagctgggtgcgccaggtgccaggcaaaggcctggaatgggtgtccagcatcaactggagcggcacccacaccgattacgccgactccgtgaaaggcagattcacaatcagcagaaacaacgccaacaataccctgtacctgcagatgaactccctgaagtctgaggatacagcagtgtattattgcgccaagaactggcgggacgccggcaccacttggtttgagaaaagcggctctgccggacagggaacccaagtgacagtgtcctccctcgagggacagcctaaggccaatcctaccgtgacactgttccctccaagcagcgaagaactccaggccaacaaggccacacttgtgtgcctgatctccgacttctaccctggggctgtgacagtggcttggaaggccgatggatctcctgtgaaagccggcgtggaaaccaccaagccatccaagcagagcaacaacaaatacgccgccagctcctacctgagcctgacacctgagcagtggaagtcccacagatcctacagctgccaagtgacccacgaaggcagcaccgtggaaaagacagtggcccctacagagtgcagccccatcaagaccgatgtgattacaatggaccccaaggacaactgctccaaggacgccaacgataccctgctgctccagctgaccaacaccagcgcctactacatgtacttgttgctgctgctgaagtccgtggtgtacttcgccatcatcacatgctgcctgctgcggagaaccgccttctgctgcaacggcgagaagtctagggccaagcgatctggatctggagcaacaaacttctcactactcaaacaagcaggtgacgtggaggagaatcccgggcctactagtatggactggatttggcgcatccttttccttgtcggcgctgctaccggcgcgcattccgggcccgaagtgcagctggttgaatctggcggaggactggttcagcctggcggatctctgagactgtcttgtgccgcctctggcttcgccagcgactactatatcatcggctggttcagacaggcccctggcaaagagagagagggcgtcagctgtatcagcagcagatacgccaacaccaactacgccgacagcgtgaagggcagattcaccatcagccgggacaacgccaagaacaccgtgtacctccagatgaacagcctgaagcctgaggacaccgccgtgtactactgtgccgccgacaccagaagatacacctgtcctgacattgccaccatgcaccggaacttcgattcttggggccagggcacactggtcaccgtttcttctacgcgtgcctctacaaagggaccctccgtgtttcctctggctcccagcagcaagtctacaagcggaggaacagccgctctgggctgcctggtcaaggattactttcccgagcctgtgaccgtgtcctggaatagcggagcactgacaagcggcgtgcacacctttccagccgtgctgcaaagcagcggcctgtactctctgagcagcgtggtcacagtgcctagctctagcctgggcacccagacctacatctgcaatgtgaaccacaagcctagcaacaccaaggtggacaagagagtggaacccaagagctgtgaagtgaaaaccgactccaccgaccacgtgaagcccaaagagacagagaacaccaagcagcccagcaagagctgccacaagcccaaggccatcgtgcacaccgagaaagtgaacatgatgagcctgaccgtgctgggcctgcggatgctgttcgccaaaaccgtggccgtgaacttcctgctgaccgccaagctgttcttcctc

SEQ ID NO: 6136 - DNA, 2487 bp, Artificial Sequence
  Synthetic Polynucloetide
atggccttaccagtgaccgccttgctcctgccgctggccttgctgctccacgccgccaggccggaggttcagctgcttgagtctggcggaggactggttcaacctggcggaagcctgagactgtcttgtgccgccagcggcttcacctttagcagctacgccatgagctgggtccgacaggctcctggcaaaggactggaatgggtgtccagcatcagcggcagcggcgactacatctactacgccgatagcgtgaagggcagattcaccatcagccgggacatcagcaagaacaccctgtacctccagatgaacagcctgagagccgaggacaccgccgtgtactactgtgccaaagaaggcaccggcgctaacagcagcctggccgattatagaggccagggcacactggtcaccgtgtctagtggcggaggaagcggcggaggatctgaagtgcaactggtggaatctggaggctctctggtgcagccagggggaagcctgagactgtcttgtgccgcttccggcttcaccttcgacgactacgccatgagctgggtgcgccaggtgccaggcaaaggcctggaatgggtgtccagcatcaactggagcggcacccacaccgattacgccgactccgtgaaaggcagattcacaatcagcagaaacaacgccaacaataccctgtacctgcagatgaactccctgaagtctgaggatacagcagtgtattattgcgccaagaactggcgggacgccggcaccacttggtttgagaaaagcggctctgccggacagggaacccaagtgacagtgtcctccctcgagggatctcccatcaagaccgatgtgattacaatggaccccaaggacaactgctccaaggacgccaacgataccctgctgctccagctgaccaacaccagcgcctactacatgtacttgttgctgctgctgaagtccgtggtgtacttcgccatcatcacatgctgcctgctgcggagaaccgccttctgctgcaacggcgagaagtctagggccaagcgatctggatctggagcaacaaacttctcactactcaaacaagcaggtgacgtggaggagaatcccgggcctactagtatggactggatttggcgcatccttttccttgtcggcgctgctaccggcgcgcattccgggcccgaagtgcagctggttgaatctggcggaggactggttcagcctggcggatctctgagactgtcttgtgccgcctctggcttcgccagcgactactatatcatcggctggttcagacaggcccctggcaaagagagagagggcgtcagctgtatcagcagcagatacgccaacaccaactacgccgacagcgtgaagggcagattcaccatcagccgggacaacgccaagaacaccgtgtacctccagatgaacagcctgaagcctgaggacaccgccgtgtactactgtgccgccgacaccagaagatacacctgtcctgacattgccaccatgcaccggaacttcgattcttggggccagggcacactggtcaccgtttcttctacgcgtggcagcgaagtgaaaaccgactccaccgaccacgtgaagcccaaagagacagagaacaccaagcagcccagcaagagctgccacaagcccaaggccatcgtgcacaccgagaaagtgaacatgatgagcctgaccgtgctgggcctgcggatgctgttcgccaaaaccgtggccgtgaacttcctgctgaccgccaagctgttcttcctccgcgccaagagaagcggatctggcgtgaagcagaccctgaatttcgacctgctgaagctggctggcgacgtggaatccaacccaggcccttctagaggccatatgaccgagtacaagcccacggtgcgcctcgccacccgcgacgacgtccccagggccgtacgcaccctcgccgccgcgttcgccgactaccccgccacgcgccacaccgtcgatccggaccgccacatcgagcgggtcaccgagctgcaagaactcttcctcacgcgcgtcgggctcgacatcggcaaggtgtgggtcgcggacgacggcgccgcggtggcggtctggaccacgccggagagcgtcgaagcgggggcggtgttcgccgagatcggcccgcgcatggccgagttgagcggttcccggctggccgcgcagcaacagatggaaggcctcctggcgccgcaccggcccaaggagcccgcgtggttcctggccaccgtcggcgtctcgcccgaccaccagggcaagggtctgggcagcgccgtcgtgctccccggagtggaggcggccgagcgcgccggggtgcccgccttcctggagacctccgcgccccgcaacctccccttctacgagcggctcggcttcaccgtcaccgccgacgtcgaggtgcccgaaggaccgcgcacctggtgcatgacccgcaagcccggtgcctga

SEQ ID NO: 6137 - DNA, 1785 bp, Artificial Sequence
  Synthetic Polynucloetide
atggccttaccagtgaccgccttgctcctgccgctggccttgctgctccacgccgccaggccggaggttcagctgcttgagtctggcggaggactggttcaacctggcggaagcctgagactgtcttgtgccgccagcggcttcacctttagcagctacgccatgagctgggtccgacaggctcctggcaaaggactggaatgggtgtccagcatcagcggcagcggcgactacatctactacgccgatagcgtgaagggcagattcaccatcagccgggacatcagcaagaacaccctgtacctccagatgaacagcctgagagccgaggacaccgccgtgtactactgtgccaaagaaggcaccggcgctaacagcagcctggccgattatagaggccagggcacactggtcaccgtgtctagtggcggaggaagcggcggaggatctgaagtgcaactggtggaatctggaggctctctggtgcagccagggggaagcctgagactgtcttgtgccgcttccggcttcaccttcgacgactacgccatgagctgggtgcgccaggtgccaggcaaaggcctggaatgggtgtccagcatcaactggagcggcacccacaccgattacgccgactccgtgaaaggcagattcacaatcagcagaaacaacgccaacaataccctgtacctgcagatgaactccctgaagtctgaggatacagcagtgtattattgcgccaagaactggcgggacgccggcaccacttggtttgagaaaagcggctctgccggacagggaacccaagtgacagtgtcctccctcgagggatctcccatcaagaccgatgtgattacaatggaccccaaggacaactgctccaaggacgccaacgataccctgctgctccagctgaccaacaccagcgcctactacatgtacttgttgctgctgctgaagtccgtggtgtacttcgccatcatcacatgctgcctgctgcggagaaccgccttctgctgcaacggcgagaagtctagggccaagcgatctggatctggagcaacaaacttctcactactcaaacaagcaggtgacgtggaggagaatcccgggcctactagtatggactggatttggcgcatccttttccttgtcggcgctgctaccggcgcgcattccgggcccgaagtgcagctggttgaatctggcggaggactggttcagcctggcggatctctgagactgtcttgtgccgcctctggcttcgccagcgactactatatcatcggctggttcagacaggcccctggcaaagagagagagggcgtcagctgtatcagcagcagatacgccaacaccaactacgccgacagcgtgaagggcagattcaccatcagccgggacaacgccaagaacaccgtgtacctccagatgaacagcctgaagcctgaggacaccgccgtgtactactgtgccgccgacaccagaagatacacctgtcctgacattgccaccatgcaccggaacttcgattcttggggccagggcacactggtcaccgtttcttctacgcgtggcagcgaagtgaaaaccgactccaccgaccacgtgaagcccaaagagacagagaacaccaagcagcccagcaagagctgccacaagcccaaggccatcgtgcacaccgagaaagtgaacatgatgagcctgaccgtgctgggcctgcggatgctgttcgccaaaaccgtggccgtgaacttcctgctgaccgccaagctgttcttcctc

SEQ ID NO: 6138 - DNA, 2514 bp, Artificial Sequence
  Synthetic Polynucloetide
atggccttaccagtgaccgccttgctcctgccgctggccttgctgctccacgccgccaggccggaggttcagctgcttgagtctggcggaggactggttcaacctggcggaagcctgagactgtcttgtgccgccagcggcttcacctttagcagctacgccatgagctgggtccgacaggctcctggcaaaggactggaatgggtgtccagcatcagcggcagcggcgactacatctactacgccgatagcgtgaagggcagattcaccatcagccgggacatcagcaagaacaccctgtacctccagatgaacagcctgagagccgaggacaccgccgtgtactactgtgccaaagaaggcaccggcgctaacagcagcctggccgattatagaggccagggcacactggtcaccgtgtctagtggcggaggaagcggcggaggatctgaagtgcaactggtggaatctggaggctctctggtgcagccagggggaagcctgagactgtcttgtgccgcttccggcttcaccttcgacgactacgccatgagctgggtgcgccaggtgccaggcaaaggcctggaatgggtgtccagcatcaactggagcggcacccacaccgattacgccgactccgtgaaaggcagattcacaatcagcagaaacaacgccaacaataccctgtacctgcagatgaactccctgaagtctgaggatacagcagtgtattattgcgccaagaactggcgggacgccggcaccacttggtttgagaaaagcggctctgccggacagggaacccaagtgacagtgtcctccctcgaggacaaaactcacacatgcccaccgtgcccagcacccatcaagaccgatgtgattacaatggaccccaaggacaactgctccaaggacgccaacgataccctgctgctccagctgaccaacaccagcgcctactacatgtacttgttgctgctgctgaagtccgtggtgtacttcgccatcatcacatgctgcctgctgcggagaaccgccttctgctgcaacggcgagaagtctagggccaagcgatctggatctggagcaacaaacttctcactactcaaacaagcaggtgacgtggaggagaatcccgggcctactagtatggactggatttggcgcatccttttccttgtcggcgctgctaccggcgcgcattccgggcccgaagtgcagctggttgaatctggcggaggactggttcagcctggcggatctctgagactgtcttgtgccgcctctggcttcgccagcgactactatatcatcggctggttcagacaggcccctggcaaagagagagagggcgtcagctgtatcagcagcagatacgccaacaccaactacgccgacagcgtgaagggcagattcaccatcagccgggacaacgccaagaacaccgtgtacctccagatgaacagcctgaagcctgaggacaccgccgtgtactactgtgccgccgacaccagaagatacacctgtcctgacattgccaccatgcaccggaacttcgattcttggggccagggcacactggtcaccgtttcttctacgcgtggcagcgaagtgaaaaccgactccaccgaccacgtgaagcccaaagagacagagaacaccaagcagcccagcaagagctgccacaagcccaaggccatcgtgcacaccgagaaagtgaacatgatgagcctgaccgtgctgggcctgcggatgctgttcgccaaaaccgtggccgtgaacttcctgctgaccgccaagctgttcttcctccgcgccaagagaagcggatctggcgtgaagcagaccctgaatttcgacctgctgaagctggctggcgacgtggaatccaacccaggcccttctagaggccatatgaccgagtacaagcccacggtgcgcctcgccacccgcgacgacgtccccagggccgtacgcaccctcgccgccgcgttcgccgactaccccgccacgcgccacaccgtcgatccggaccgccacatcgagcgggtcaccgagctgcaagaactcttcctcacgcgcgtcgggctcgacatcggcaaggtgtgggtcgcggacgacggcgccgcggtggcggtctggaccacgccggagagcgtcgaagcgggggcggtgttcgccgagatcggcccgcgcatggccgagttgagcggttcccggctggccgcgcagcaacagatggaaggcctcctggcgccgcaccggcccaaggagcccgcgtggttcctggccaccgtcggcgtctcgcccgaccaccagggcaagggtctgggcagcgccgtcgtgctccccggagtggaggcggccgagcgcgccggggtgcccgccttcctggagacctccgcgccccgcaacctccccttctacgagcggctcggcttcaccgtcaccgccgacgtcgaggtgcccgaaggaccgcgcacctggtgcatgacccgcaagcccggtgcctga

SEQ ID NO: 6139 - DNA, 2514 bp, Artificial Sequence
  Synthetic Polynucloetide
atggccttaccagtgaccgccttgctcctgccgctggccttgctgctccacgccgccaggccggaggttcagctgcttgagtctggcggaggactggttcaacctggcggaagcctgagactgtcttgtgccgccagcggcttcacctttagcagctacgccatgagctgggtccgacaggctcctggcaaaggactggaatgggtgtccagcatcagcggcagcggcgactacatctactacgccgatagcgtgaagggcagattcaccatcagccgggacatcagcaagaacaccctgtacctccagatgaacagcctgagagccgaggacaccgccgtgtactactgtgccaaagaaggcaccggcgctaacagcagcctggccgattatagaggccagggcacactggtcaccgtgtctagtggcggaggaagcggcggaggatctgaagtgcaactggtggaatctggaggctctctggtgcagccagggggaagcctgagactgtcttgtgccgcttccggcttcaccttcgacgactacgccatgagctgggtgcgccaggtgccaggcaaaggcctggaatgggtgtccagcatcaactggagcggcacccacaccgattacgccgactccgtgaaaggcagattcacaatcagcagaaacaacgccaacaataccctgtacctgcagatgaactccctgaagtctgaggatacagcagtgtattattgcgccaagaactggcgggacgccggcaccacttggtttgagaaaagcggctctgccggacagggaacccaagtgacagtgtcctccctcgagggatctcccatcaagaccgatgtgattacaatggaccccaaggacaactgctccaaggacgccaacgataccctgctgctccagctgaccaacaccagcgcctactacatgtacttgttgctgctgctgaagtccgtggtgtacttcgccatcatcacatgctgcctgctgcggagaaccgccttctgctgcaacggcgagaagtctagggccaagcgatctggatctggagcaacaaacttctcactactcaaacaagcaggtgacgtggaggagaatcccgggcctactagtatggactggatttggcgcatccttttccttgtcggcgctgctaccggcgcgcattccgggcccgaagtgcagctggttgaatctggcggaggactggttcagcctggcggatctctgagactgtcttgtgccgcctctggcttcgccagcgactactatatcatcggctggttcagacaggcccctggcaaagagagagagggcgtcagctgtatcagcagcagatacgccaacaccaactacgccgacagcgtgaagggcagattcaccatcagccgggacaacgccaagaacaccgtgtacctccagatgaacagcctgaagcctgaggacaccgccgtgtactactgtgccgccgacaccagaagatacacctgtcctgacattgccaccatgcaccggaacttcgattcttggggccagggcacactggtcaccgtttcttctacgcgtgataaaactcatacctgtccgccatgcccggcagaagtgaaaaccgactccaccgaccacgtgaagcccaaagagacagagaacaccaagcagcccagcaagagctgccacaagcccaaggccatcgtgcacaccgagaaagtgaacatgatgagcctgaccgtgctgggcctgcggatgctgttcgccaaaaccgtggccgtgaacttcctgctgaccgccaagctgttcttcctccgcgccaagagaagcggatctggcgtgaagcagaccctgaatttcgacctgctgaagctggctggcgacgtggaatccaacccaggcccttctagaggccatatgaccgagtacaagcccacggtgcgcctcgccacccgcgacgacgtccccagggccgtacgcaccctcgccgccgcgttcgccgactaccccgccacgcgccacaccgtcgatccggaccgccacatcgagcgggtcaccgagctgcaagaactcttcctcacgcgcgtcgggctcgacatcggcaaggtgtgggtcgcggacgacggcgccgcggtggcggtctggaccacgccggagagcgtcgaagcgggggcggtgttcgccgagatcggcccgcgcatggccgagttgagcggttcccggctggccgcgcagcaacagatggaaggcctcctggcgccgcaccggcccaaggagcccgcgtggttcctggccaccgtcggcgtctcgcccgaccaccagggcaagggtctgggcagcgccgtcgtgctccccggagtggaggcggccgagcgcgccggggtgcccgccttcctggagacctccgcgccccgcaacctccccttctacgagcggctcggcttcaccgtcaccgccgacgtcgaggtgcccgaaggaccgcgcacctggtgcatgacccgcaagcccggtgcctga

SEQ ID NO: 6140 - DNA, 2541 bp, Artificial Sequence
  Synthetic Polynucloetide
atggccttaccagtgaccgccttgctcctgccgctggccttgctgctccacgccgccaggccggaggttcagctgcttgagtctggcggaggactggttcaacctggcggaagcctgagactgtcttgtgccgccagcggcttcacctttagcagctacgccatgagctgggtccgacaggctcctggcaaaggactggaatgggtgtccagcatcagcggcagcggcgactacatctactacgccgatagcgtgaagggcagattcaccatcagccgggacatcagcaagaacaccctgtacctccagatgaacagcctgagagccgaggacaccgccgtgtactactgtgccaaagaaggcaccggcgctaacagcagcctggccgattatagaggccagggcacactggtcaccgtgtctagtggcggaggaagcggcggaggatctgaagtgcaactggtggaatctggaggctctctggtgcagccagggggaagcctgagactgtcttgtgccgcttccggcttcaccttcgacgactacgccatgagctgggtgcgccaggtgccaggcaaaggcctggaatgggtgtccagcatcaactggagcggcacccacaccgattacgccgactccgtgaaaggcagattcacaatcagcagaaacaacgccaacaataccctgtacctgcagatgaactccctgaagtctgaggatacagcagtgtattattgcgccaagaactggcgggacgccggcaccacttggtttgagaaaagcggctctgccggacagggaacccaagtgacagtgtcctccctcgaggacaaaactcacacatgcccaccgtgcccagcacccatcaagaccgatgtgattacaatggaccccaaggacaactgctccaaggacgccaacgataccctgctgctccagctgaccaacaccagcgcctactacatgtacttgttgctgctgctgaagtccgtggtgtacttcgccatcatcacatgctgcctgctgcggagaaccgccttctgctgcaacggcgagaagtctagggccaagcgatctggatctggagcaacaaacttctcactactcaaacaagcaggtgacgtggaggagaatcccgggcctactagtatggactggatttggcgcatccttttccttgtcggcgctgctaccggcgcgcattccgggcccgaagtgcagctggttgaatctggcggaggactggttcagcctggcggatctctgagactgtcttgtgccgcctctggcttcgccagcgactactatatcatcggctggttcagacaggcccctggcaaagagagagagggcgtcagctgtatcagcagcagatacgccaacaccaactacgccgacagcgtgaagggcagattcaccatcagccgggacaacgccaagaacaccgtgtacctccagatgaacagcctgaagcctgaggacaccgccgtgtactactgtgccgccgacaccagaagatacacctgtcctgacattgccaccatgcaccggaacttcgattcttggggccagggcacactggtcaccgtttcttctacgcgtgataaaactcatacctgtccgccatgcccggcagaagtgaaaaccgactccaccgaccacgtgaagcccaaagagacagagaacaccaagcagcccagcaagagctgccacaagcccaaggccatcgtgcacaccgagaaagtgaacatgatgagcctgaccgtgctgggcctgcggatgctgttcgccaaaaccgtggccgtgaacttcctgctgaccgccaagctgttcttcctccgcgccaagagaagcggatctggcgtgaagcagaccctgaatttcgacctgctgaagctggctggcgacgtggaatccaacccaggcccttctagaggccatatgaccgagtacaagcccacggtgcgcctcgccacccgcgacgacgtccccagggccgtacgcaccctcgccgccgcgttcgccgactaccccgccacgcgccacaccgtcgatccggaccgccacatcgagcgggtcaccgagctgcaagaactcttcctcacgcgcgtcgggctcgacatcggcaaggtgtgggtcgcggacgacggcgccgcggtggcggtctggaccacgccggagagcgtcgaagcgggggcggtgttcgccgagatcggcccgcgcatggccgagttgagcggttcccggctggccgcgcagcaacagatggaaggcctcctggcgccgcaccggcccaaggagcccgcgtggttcctggccaccgtcggcgtctcgcccgaccaccagggcaagggtctgggcagcgccgtcgtgctccccggagtggaggcggccgagcgcgccggggtgcccgccttcctggagacctccgcgccccgcaacctccccttctacgagcggctcggcttcaccgtcaccgccgacgtcgaggtgcccgaaggaccgcgcacctggtgcatgacccgcaagcccggtgcctga

SEQ ID NO: 6141 - DNA, 1839 bp, Artificial Sequence
  Synthetic Polynucloetide
atggccttaccagtgaccgccttgctcctgccgctggccttgctgctccacgccgccaggccggaggttcagctgcttgagtctggcggaggactggttcaacctggcggaagcctgagactgtcttgtgccgccagcggcttcacctttagcagctacgccatgagctgggtccgacaggctcctggcaaaggactggaatgggtgtccagcatcagcggcagcggcgactacatctactacgccgatagcgtgaagggcagattcaccatcagccgggacatcagcaagaacaccctgtacctccagatgaacagcctgagagccgaggacaccgccgtgtactactgtgccaaagaaggcaccggcgctaacagcagcctggccgattatagaggccagggcacactggtcaccgtgtctagtggcggaggaagcggcggaggatctgaagtgcaactggtggaatctggaggctctctggtgcagccagggggaagcctgagactgtcttgtgccgcttccggcttcaccttcgacgactacgccatgagctgggtgcgccaggtgccaggcaaaggcctggaatgggtgtccagcatcaactggagcggcacccacaccgattacgccgactccgtgaaaggcagattcacaatcagcagaaacaacgccaacaataccctgtacctgcagatgaactccctgaagtctgaggatacagcagtgtattattgcgccaagaactggcgggacgccggcaccacttggtttgagaaaagcggctctgccggacagggaacccaagtgacagtgtcctccctcgaggacaaaactcacacatgcccaccgtgcccagcacccatcaagaccgatgtgattacaatggaccccaaggacaactgctccaaggacgccaacgataccctgctgctccagctgaccaacaccagcgcctactacatgtacttgttgctgctgctgaagtccgtggtgtacttcgccatcatcacatgctgcctgctgcggagaaccgccttctgctgcaacggcgagaagtctagggccaagcgatctggatctggagcaacaaacttctcactactcaaacaagcaggtgacgtggaggagaatcccgggcctactagtatggactggatttggcgcatccttttccttgtcggcgctgctaccggcgcgcattccgggcccgaagtgcagctggttgaatctggcggaggactggttcagcctggcggatctctgagactgtcttgtgccgcctctggcttcgccagcgactactatatcatcggctggttcagacaggcccctggcaaagagagagagggcgtcagctgtatcagcagcagatacgccaacaccaactacgccgacagcgtgaagggcagattcaccatcagccgggacaacgccaagaacaccgtgtacctccagatgaacagcctgaagcctgaggacaccgccgtgtactactgtgccgccgacaccagaagatacacctgtcctgacattgccaccatgcaccggaacttcgattcttggggccagggcacactggtcaccgtttcttctacgcgtgataaaactcatacctgtccgccatgcccggcagaagtgaaaaccgactccaccgaccacgtgaagcccaaagagacagagaacaccaagcagcccagcaagagctgccacaagcccaaggccatcgtgcacaccgagaaagtgaacatgatgagcctgaccgtgctgggcctgcggatgctgttcgccaaaaccgtggccgtgaacttcctgctgaccgccaagctgttcttcctc

SEQ ID NO: 6142 - DNA, 1812 bp, Artificial Sequence
  Synthetic Polynucloetide
atggccttaccagtgaccgccttgctcctgccgctggccttgctgctccacgccgccaggccggaggttcagctgcttgagtctggcggaggactggttcaacctggcggaagcctgagactgtcttgtgccgccagcggcttcacctttagcagctacgccatgagctgggtccgacaggctcctggcaaaggactggaatgggtgtccagcatcagcggcagcggcgactacatctactacgccgatagcgtgaagggcagattcaccatcagccgggacatcagcaagaacaccctgtacctccagatgaacagcctgagagccgaggacaccgccgtgtactactgtgccaaagaaggcaccggcgctaacagcagcctggccgattatagaggccagggcacactggtcaccgtgtctagtggcggaggaagcggcggaggatctgaagtgcaactggtggaatctggaggctctctggtgcagccagggggaagcctgagactgtcttgtgccgcttccggcttcaccttcgacgactacgccatgagctgggtgcgccaggtgccaggcaaaggcctggaatgggtgtccagcatcaactggagcggcacccacaccgattacgccgactccgtgaaaggcagattcacaatcagcagaaacaacgccaacaataccctgtacctgcagatgaactccctgaagtctgaggatacagcagtgtattattgcgccaagaactggcgggacgccggcaccacttggtttgagaaaagcggctctgccggacagggaacccaagtgacagtgtcctccctcgagggatctcccatcaagaccgatgtgattacaatggaccccaaggacaactgctccaaggacgccaacgataccctgctgctccagctgaccaacaccagcgcctactacatgtacttgttgctgctgctgaagtccgtggtgtacttcgccatcatcacatgctgcctgctgcggagaaccgccttctgctgcaacggcgagaagtctagggccaagcgatctggatctggagcaacaaacttctcactactcaaacaagcaggtgacgtggaggagaatcccgggcctactagtatggactggatttggcgcatccttttccttgtcggcgctgctaccggcgcgcattccgggcccgaagtgcagctggttgaatctggcggaggactggttcagcctggcggatctctgagactgtcttgtgccgcctctggcttcgccagcgactactatatcatcggctggttcagacaggcccctggcaaagagagagagggcgtcagctgtatcagcagcagatacgccaacaccaactacgccgacagcgtgaagggcagattcaccatcagccgggacaacgccaagaacaccgtgtacctccagatgaacagcctgaagcctgaggacaccgccgtgtactactgtgccgccgacaccagaagatacacctgtcctgacattgccaccatgcaccggaacttcgattcttggggccagggcacactggtcaccgtttcttctacgcgtgataaaactcatacctgtccgccatgcccggcagaagtgaaaaccgactccaccgaccacgtgaagcccaaagagacagagaacaccaagcagcccagcaagagctgccacaagcccaaggccatcgtgcacaccgagaaagtgaacatgatgagcctgaccgtgctgggcctgcggatgctgttcgccaaaaccgtggccgtgaacttcctgctgaccgccaagctgttcttcctc

SEQ ID NO: 6143 - DNA, 2463 bp, Artificial Sequence
  Synthetic Polynucloetide
atggccttaccagtgaccgccttgctcctgccgctggccttgctgctccacgccgccaggccggaggttcagctgcttgagtctggcggaggactggttcaacctggcggaagcctgagactgtcttgtgccgccagcggcttcacctttagcagctacgccatgagctgggtccgacaggctcctggcaaaggactggaatgggtgtccagcatcagcggcagcggcgactacatctactacgccgatagcgtgaagggcagattcaccatcagccgggacatcagcaagaacaccctgtacctccagatgaacagcctgagagccgaggacaccgccgtgtactactgtgccaaagaaggcaccggcgctaacagcagcctggccgattatagaggccagggcacactggtcaccgtgtctagtggcggaggaagcggcggaggatctgaagtgcaactggtggaatctggaggctctctggtgcagccagggggaagcctgagactgtcttgtgccgcttccggcttcaccttcgacgactacgccatgagctgggtgcgccaggtgccaggcaaaggcctggaatgggtgtccagcatcaactggagcggcacccacaccgattacgccgactccgtgaaaggcagattcacaatcagcagaaacaacgccaacaataccctgtacctgcagatgaactccctgaagtctgaggatacagcagtgtattattgcgccaagaactggcgggacgccggcaccacttggtttgagaaaagcggctctgccggacagggaacccaagtgacagtgtcctccctcgagggatctatggaccccaaggacaactgctccaaggacgccaacgataccctgctgctccagctgaccaacaccagcgcctactacatgtacttgttgctgctgctgaagtccgtggtgtacttcgccatcatcacatgctgcctgctgcggagaaccgccttctgctgcaacggcgagaagtctagggccaagcgatctggatctggagcaacaaacttctcactactcaaacaagcaggtgacgtggaggagaatcccgggcctactagtatggactggatttggcgcatccttttccttgtcggcgctgctaccggcgcgcattccgggcccgaagtgcagctggttgaatctggcggaggactggttcagcctggcggatctctgagactgtcttgtgccgcctctggcttcgccagcgactactatatcatcggctggttcagacaggcccctggcaaagagagagagggcgtcagctgtatcagcagcagatacgccaacaccaactacgccgacagcgtgaagggcagattcaccatcagccgggacaacgccaagaacaccgtgtacctccagatgaacagcctgaagcctgaggacaccgccgtgtactactgtgccgccgacaccagaagatacacctgtcctgacattgccaccatgcaccggaacttcgattcttggggccagggcacactggtcaccgtttcttctacgcgtggcagcgaagtgaaaaccgactccaccgaccacgtgaagcccaaagagacagagaacaccaagcagcccagcaagagctgccacaagcccaaggccatcgtgcacaccgagaaagtgaacatgatgagcctgaccgtgctgggcctgcggatgctgttcgccaaaaccgtggccgtgaacttcctgctgaccgccaagctgttcttcctccgcgccaagagaagcggatctggcgtgaagcagaccctgaatttcgacctgctgaagctggctggcgacgtggaatccaacccaggcccttctagaggccatatgaccgagtacaagcccacggtgcgcctcgccacccgcgacgacgtccccagggccgtacgcaccctcgccgccgcgttcgccgactaccccgccacgcgccacaccgtcgatccggaccgccacatcgagcgggtcaccgagctgcaagaactcttcctcacgcgcgtcgggctcgacatcggcaaggtgtgggtcgcggacgacggcgccgcggtggcggtctggaccacgccggagagcgtcgaagcgggggcggtgttcgccgagatcggcccgcgcatggccgagttgagcggttcccggctggccgcgcagcaacagatggaaggcctcctggcgccgcaccggcccaaggagcccgcgtggttcctggccaccgtcggcgtctcgcccgaccaccagggcaagggtctgggcagcgccgtcgtgctccccggagtggaggcggccgagcgcgccggggtgcccgccttcctggagacctccgcgccccgcaacctccccttctacgagcggctcggcttcaccgtcaccgccgacgtcgaggtgcccgaaggaccgcgcacctggtgcatgacccgcaagcccggtgcctga

SEQ ID NO: 6144 - DNA, 2466 bp, Artificial Sequence
  Synthetic Polynucloetide
atggccttaccagtgaccgccttgctcctgccgctggccttgctgctccacgccgccaggccggaggttcagctgcttgagtctggcggaggactggttcaacctggcggaagcctgagactgtcttgtgccgccagcggcttcacctttagcagctacgccatgagctgggtccgacaggctcctggcaaaggactggaatgggtgtccagcatcagcggcagcggcgactacatctactacgccgatagcgtgaagggcagattcaccatcagccgggacatcagcaagaacaccctgtacctccagatgaacagcctgagagccgaggacaccgccgtgtactactgtgccaaagaaggcaccggcgctaacagcagcctggccgattatagaggccagggcacactggtcaccgtgtctagtggcggaggaagcggcggaggatctgaagtgcaactggtggaatctggaggctctctggtgcagccagggggaagcctgagactgtcttgtgccgcttccggcttcaccttcgacgactacgccatgagctgggtgcgccaggtgccaggcaaaggcctggaatgggtgtccagcatcaactggagcggcacccacaccgattacgccgactccgtgaaaggcagattcacaatcagcagaaacaacgccaacaataccctgtacctgcagatgaactccctgaagtctgaggatacagcagtgtattattgcgccaagaactggcgggacgccggcaccacttggtttgagaaaagcggctctgccggacagggaacccaagtgacagtgtcctccctcgagggatctcccatcaagaccgatgtgattacaatggaccccaaggacaactgctccaaggacgccaacgataccctgctgctccagctgaccaacaccagcgcctactacatgtacttgttgctgctgctgaagtccgtggtgtacttcgccatcatcacatgctgcctgctgcggagaaccgccttctgctgcaacggcgagaagtctagggccaagcgatctggatctggagcaacaaacttctcactactcaaacaagcaggtgacgtggaggagaatcccgggcctactagtatggactggatttggcgcatccttttccttgtcggcgctgctaccggcgcgcattccgggcccgaagtgcagctggttgaatctggcggaggactggttcagcctggcggatctctgagactgtcttgtgccgcctctggcttcgccagcgactactatatcatcggctggttcagacaggcccctggcaaagagagagagggcgtcagctgtatcagcagcagatacgccaacaccaactacgccgacagcgtgaagggcagattcaccatcagccgggacaacgccaagaacaccgtgtacctccagatgaacagcctgaagcctgaggacaccgccgtgtactactgtgccgccgacaccagaagatacacctgtcctgacattgccaccatgcaccggaacttcgattcttggggccagggcacactggtcaccgtttcttctacgcgtggcagcgaccacgtgaagcccaaagagacagagaacaccaagcagcccagcaagagctgccacaagcccaaggccatcgtgcacaccgagaaagtgaacatgatgagcctgaccgtgctgggcctgcggatgctgttcgccaaaaccgtggccgtgaacttcctgctgaccgccaagctgttcttcctccgcgccaagagaagcggatctggcgtgaagcagaccctgaatttcgacctgctgaagctggctggcgacgtggaatccaacccaggcccttctagaggccatatgaccgagtacaagcccacggtgcgcctcgccacccgcgacgacgtccccagggccgtacgcaccctcgccgccgcgttcgccgactaccccgccacgcgccacaccgtcgatccggaccgccacatcgagcgggtcaccgagctgcaagaactcttcctcacgcgcgtcgggctcgacatcggcaaggtgtgggtcgcggacgacggcgccgcggtggcggtctggaccacgccggagagcgtcgaagcgggggcggtgttcgccgagatcggcccgcgcatggccgagttgagcggttcccggctggccgcgcagcaacagatggaaggcctcctggcgccgcaccggcccaaggagcccgcgtggttcctggccaccgtcggcgtctcgcccgaccaccagggcaagggtctgggcagcgccgtcgtgctccccggagtggaggcggccgagcgcgccggggtgcccgccttcctggagacctccgcgccccgcaacctccccttctacgagcggctcggcttcaccgtcaccgccgacgtcgaggtgcccgaaggaccgcgcacctggtgcatgacccgcaagcccggtgcctga

SEQ ID NO: 6145 - DNA, 1305 bp, Artificial Sequence
  Synthetic Polynucloetide
atggccttaccagtgaccgccttgctcctgccgctggccttgctgctccacgccgccaggccggaggttcagctgcttgagtctggcggaggactggttcaacctggcggaagcctgagactgtcttgtgccgccagcggcttcacctttagcagctacgccatgagctgggtccgacaggctcctggcaaaggactggaatgggtgtccagcatcagcggcagcggcgactacatctactacgccgatagcgtgaagggcagattcaccatcagccgggacatcagcaagaacaccctgtacctccagatgaacagcctgagagccgaggacaccgccgtgtactactgtgccaaagaaggcaccggcgctaacagcagcctggccgattatagaggccagggcacactggtcaccgtgtctagtggcggaggaagcggcggaggatctgaagtgcaactggtggaatctggaggctctctggtgcagccagggggaagcctgagactgtcttgtgccgcttccggcttcaccttcgacgactacgccatgagctgggtgcgccaggtgccaggcaaaggcctggaatgggtgtccagcatcaactggagcggcacccacaccgattacgccgactccgtgaaaggcagattcacaatcagcagaaacaacgccaacaataccctgtacctgcagatgaactccctgaagtctgaggatacagcagtgtattattgcgccaagaactggcgggacgccggcaccacttggtttgagaaaagcggctctgccggacagggaacccaagtgacagtgtcctccctcgagggacagcctaaggccaatcctaccgtgacactgttccctccaagcagcgaagaactccaggccaacaaggccacacttgtgtgcctgatctccgacttctaccctggggctgtgacagtggcttggaaggccgatggatctcctgtgaaagccggcgtggaaaccaccaagccatccaagcagagcaacaacaaatacgccgccagctcctacctgagcctgacacctgagcagtggaagtcccacagatcctacagctgccaagtgacccacgaaggcagcaccgtggaaaagacagtggcccctacagagtgcagcggcagagccgattgcggctttaccagcgagagctaccagcagggcgtgctgagcgccaccatcctgtacgagatcctgctgggcaaggccaccctgtacgccgtgctggtgtctgccctggtgctgatggctatggtcaagcggaaggacagccgggga

SEQ ID NO: 6146 - DNA, 1347 bp, Artificial Sequence
  Synthetic Polynucloetide
atggccttaccagtgaccgccttgctcctgccgctggccttgctgctccacgccgccaggccggaggttcagctgcttgagtctggcggaggactggttcaacctggcggaagcctgagactgtcttgtgccgccagcggcttcacctttagcagctacgccatgagctgggtccgacaggctcctggcaaaggactggaatgggtgtccagcatcagcggcagcggcgactacatctactacgccgatagcgtgaagggcagattcaccatcagccgggacatcagcaagaacaccctgtacctccagatgaacagcctgagagccgaggacaccgccgtgtactactgtgccaaagaaggcaccggcgctaacagcagcctggccgattatagaggccagggcacactggtcaccgtgtctagtggcggaggaagcggcggaggatctgaagtgcaactggtggaatctggaggctctctggtgcagccagggggaagcctgagactgtcttgtgccgcttccggcttcaccttcgacgactacgccatgagctgggtgcgccaggtgccaggcaaaggcctggaatgggtgtccagcatcaactggagcggcacccacaccgattacgccgactccgtgaaaggcagattcacaatcagcagaaacaacgccaacaataccctgtacctgcagatgaactccctgaagtctgaggatacagcagtgtattattgcgccaagaactggcgggacgccggcaccacttggtttgagaaaagcggctctgccggacagggaacccaagtgacagtgtcctccctcgagggacagcctaaggccaatcctaccgtgacactgttccctccaagcagcgaagaactccaggccaacaaggccacacttgtgtgcctgatctccgacttctaccctggggctgtgacagtggcttggaaggccgatggatctcctgtgaaagccggcgtggaaaccaccaagccatccaagcagagcaacaacaaatacgccgccagctcctacctgagcctgacacctgagcagtggaagtcccacagatcctacagctgccaagtgacccacgaaggcagcaccgtggaaaagacagtggcccctacagagtgcagccccatcaagaccgatgtgattacaatggaccccaaggacaactgctccaaggacgccaacgataccctgctgctccagctgaccaacaccagcgcctactacatgtacttgttgctgctgctgaagtccgtggtgtacttcgccatcatcacatgctgcctgctgcggagaaccgccttctgctgcaacggcgagaagtct

SEQ ID NO: 6147 - DNA, 2334 bp, Artificial Sequence
  Synthetic Polynucloetide
atggactggatttggcgcatccttttccttgtcggcgctgctaccggcgcccattcccagctccagttgcaagagagcggccctggcttggtaaaaccttccgagacccttagcctcacatgcacggttagtgggggcagcatttcctcaggtgattactattggggatggattcggcaacccccgggtaaaggattggagtggattggtcatatttattatagtggagcgacgtactacaacccaagtctcaaatccagggttacaatatccgtcgatacgagcaggaaccaattcagcttgaaactttctagtgtcaccgcagcagacacagccgtctattactgtacgcgggatgactccagtaattggcggtcccgagggcaagggacactggtcacggtctcctcatctggaggcggtggaagcggtggaggaggatctgaagtgcagctggttgaatctggcggaggactggttcagcctggcggatctctgagactgtcttgtgccgcctctggcttcgccagcgactactatatcatcggctggttcagacaggcccctggcaaagagagagagggcgtcagctgtatcagcagcagatacgccaacaccaactacgccgacagcgtgaagggcagattcaccatcagccgggacaacgccaagaacaccgtgtacctccagatgaacagcctgaagcctgaggacaccgccgtgtactactgtgccgccgacaccagaagatacacctgtcctgacattgccaccatgcaccggaacttcgattcttggggccagggcacactggtcaccgtttcttctggatccggcggcggaggatctggcggaggcggatctgggggcggaggctctttcgaacaagttcagcttcaacagcctggcgctgagctggtcaaacctggcgcttctgtgaagatgagctgcaaagccagcggctacgccttcagcagctactggatcaactggatgaagcagaaacccggccagggactcgaatggatcggccaaatctatcccggcgacggcgacaccaactacaacggcaagttcaagggcagagccacactgaccgccgatacctctagcagcacagcctacatgcagctgagcagcctgaccagcgaagatagcgccgtgtacttctgtgcccggtccatcacaacagtcgtgggctgcgctatggactattggggccagggaacaagcgtgaccgtgtctagtggcggaggcggaagtggaggcggaggatctggcggcggaggctctgacatccagatgacacagagccctagcagcctgtctgccagcgtgggagacagagtgaccatcacatgcaaggccagcgaccacatcaacaactggctggcctggtatcagcagaagcctggacaggcccctaagctgctgatctacggcgctaccacactggaaacaggcgtgcccagcagattttctggcagcggctctggcaccgactacaccctgacaatatccagcctccagcctgaggacttcgccacctactactgtcagcagagctggaacaccccttggacattcggccagggcaccaagctggaaatcaagagaacgcgtgagcagaaactgatctcggaagaggatctggcgaagcccaccacgacgccagcgccgcgaccaccaacaccggcgcccaccatcgcgtcgcagcccctgtccctgcgcccagaggcgtgccggccagcggcggggggcgcagtgcacacgagggggctggacttcgcctgtgacatctacatctgggcgcccttggccgggacttgtggggtccttctcctgtcactggttatcaccctttactgcaaacggggcagaaagaaactcctgtatatattcaaacaaccatttatgagaccagtacaaactactcaagaggaagatggctgtagctgccgatttccagaagaagaagaaggaggatgtgaactgagagtgaagttcagcaggagcgcagacgcccccgcgtaccagcagggccagaaccagctctataacgagctgaatctaggacgaagagaggagtacgatgttttggacaagagacgtggccgggaccctgagatggggggaaagccgagaaggaagaaccctcaggaaggcctgtacaatgaactgcagaaagataagatggcggaggcctacagtgagattgggatgaaaggcgagcgccggaggggcaaggggcacgatggcctttaccagggtctcagtacagccaccaaggacacctacgacgcccttcacatgcaggccctgccccctcgctga

SEQ ID NO: 6148 - DNA, 3393 bp, Artificial Sequence
  Synthetic Polynucloetide
atggccttaccagtgaccgccttgctcctgccgctggccttgctgctccacgccgccaggccggacatccagatgacacagagccctagcagcctgtctgccagcgtgggagacagagtgaccatcacatgcaaggccagcgaccacatcaacaactggctggcctggtatcagcagaagcctggacaggcccctaagctgctgatctacggcgctaccacactggaaacaggcgtgcccagcagattttctggcagcggctctggcaccgactacaccctgacaatatccagcctccagcctgaggacttcgccacctactactgtcagcagagctggaacaccccttggacattcggccagggcaccaagctggaaatcaagagactcgagatccagaaccctgatcctgccgtgtaccagctgcgggatagcaagagcagcgacaagagcgtgtgtctgttcaccgacttcgacagccagaccaacgtgtcccagagcaaggactccgacgtgtacatcaccgataagtgcgtgctggacatgcggagcatggacttcaagagcaactccgccgtggcctggtccaacaagtccgatttcgcctgcgccaacgccttcaacaacagcattatccccgaggacacattcttcccaagcagcgacgtgccctgcgacgtgaagctggtggaaaagagcttcgagacagacaccaacctgaacttccagaacctgagcgtgatcggcttcagaatcctgctgctgaaagtggccggctttaacctgctgatgaccctgcggctgtggtccagccgcgccaagagaagcggatctggcgtgaagcagaccctgaatttcgacctgctgaagctggctggcgacgtggaatccaacccaggccctactagtatggactggatttggcgcatccttttccttgtcggcgctgctaccggcgcccattcccagctccagttgcaagagagcggccctggcttggtaaaaccttccgagacccttagcctcacatgcacggttagtgggggcagcatttcctcaggtgattactattggggatggattcggcaacccccgggtaaaggattggagtggattggtcatatttattatagtggagcgacgtactacaacccaagtctcaaatccagggttacaatatccgtcgatacgagcaggaaccaattcagcttgaaactttctagtgtcaccgcagcagacacagccgtctattactgtacgcgggatgactccagtaattggcggtcccgagggcaagggacactggtcacggtctcctcatctggaggcggtggaagcggtggaggaggatctgaagtgcagctggttgaatctggcggaggactggttcagcctggcggatctctgagactgtcttgtgccgcctctggcttcgccagcgactactatatcatcggctggttcagacaggcccctggcaaagagagagagggcgtcagctgtatcagcagcagatacgccaacaccaactacgccgacagcgtgaagggcagattcaccatcagccgggacaacgccaagaacaccgtgtacctccagatgaacagcctgaagcctgaggacaccgccgtgtactactgtgccgccgacaccagaagatacacctgtcctgacattgccaccatgcaccggaacttcgattcttggggccagggcacactggtcaccgtttcttctggatccggcggcggaggatctggcggaggcggatctgggggcggaggctctttcgaacaagttcagcttcaacagcctggcgctgagctggtcaaacctggcgcttctgtgaagatgagctgcaaagccagcggctacgccttcagcagctactggatcaactggatgaagcagaaacccggccagggactcgaatggatcggccaaatctatcccggcgacggcgacaccaactacaacggcaagttcaagggcagagccacactgaccgccgatacctctagcagcacagcctacatgcagctgagcagcctgaccagcgaagatagcgccgtgtacttctgtgcccggtccatcacaacagtcgtgggctgcgctatggactattggggccagggaacaagcgtgaccgtgtctagtacgcgtgaggacctgaagaacgtgttcccacctgaggtggccgtgttcgagcctagcaaggccgagatcgcccacacccagaaagccaccctcgtgtgcctggctaccggcttctaccccgaccatgtggaactgtcttggtgggtcaacggcaaagaggtgcacagcggcgtgtgtaccgacccccagccactgaaagaacagcccgccctgaacgacagccggtactgcctgagcagcagactgagagtgtccgccaccttctggcagaacccccggaaccacttcagatgccaggtgcagttctacggcctgagcgagaacgacgagtggacccaggacagagccaagcccgtgacccagatcgtgtctgccgaagcctggggcagagccgattgcggcatcaccagcgccagctaccaccagggcgtgctgagcgccaccatcctgtacgagatcctgctgggcaaggccaccctgtacgccgtgctggtgtctgccctggtgctgatggctatggtcaagcggaaggacagccggggaagggccaagcgatctggatctggagcaacaaacttctcactactcaaacaagcaggtgacgtggaggagaatcccgggccttctagaggccatatgaccgagtacaagcccacggtgcgcctcgccacccgcgacgacgtccccagggccgtacgcaccctcgccgccgcgttcgccgactaccccgccacgcgccacaccgtcgatccggaccgccacatcgagcgggtcaccgagctgcaagaactcttcctcacgcgcgtcgggctcgacatcggcaaggtgtgggtcgcggacgacggcgccgcggtggcggtctggaccacgccggagagcgtcgaagcgggggcggtgttcgccgagatcggcccgcgcatggccgagttgagcggttcccggctggccgcgcagcaacagatggaaggcctcctggcgccgcaccggcccaaggagcccgcgtggttcctggccaccgtcggcgtctcgcccgaccaccagggcaagggtctgggcagcgccgtcgtgctccccggagtggaggcggccgagcgcgccggggtgcccgccttcctggagacctccgcgccccgcaacctccccttctacgagcggctcggcttcaccgtcaccgccgacgtcgaggtgcccgaaggaccgcgcacctggtgcatgacccgcaagcccggtgcctga

SEQ ID NO: 6149 - DNA, 3390 bp, Artificial Sequence
  Synthetic Polynucloetide
atggccttaccagtgaccgccttgctcctgccgctggccttgctgctccacgccgccaggccggacatccagatgacacagagccctagcagcctgtctgccagcgtgggagacagagtgaccatcacatgcaaggccagcgaccacatcaacaactggctggcctggtatcagcagaagcctggacaggcccctaagctgctgatctacggcgctaccacactggaaacaggcgtgcccagcagattttctggcagcggctctggcaccgactacaccctgacaatatccagcctccagcctgaggacttcgccacctactactgtcagcagagctggaacaccccttggacattcggccagggcaccaagctggaaatcaagagactcgaggacctgaagaacgtgttcccacctgaggtggccgtgttcgagcctagcaaggccgagatcgcccacacccagaaagccaccctcgtgtgcctggctaccggcttctaccccgaccatgtggaactgtcttggtgggtcaacggcaaagaggtgcacagcggcgtgtgtaccgacccccagccactgaaagaacagcccgccctgaacgacagccggtactgcctgagcagcagactgagagtgtccgccaccttctggcagaacccccggaaccacttcagatgccaggtgcagttctacggcctgagcgagaacgacgagtggacccaggacagagccaagcccgtgacccagatcgtgtctgccgaagcctggggcagagccgattgcggcatcaccagcgccagctaccaccagggcgtgctgagcgccaccatcctgtacgagatcctgctgggcaaggccaccctgtacgccgtgctggtgtctgccctggtgctgatggctatggtcaagcggaaggacagccggggaagggccaagcgatctggatctggagcaacaaacttctcactactcaaacaagcaggtgacgtggaggagaatcccgggcctactagtatggactggatttggcgcatccttttccttgtcggcgctgctaccggcgcccattcccagctccagttgcaagagagcggccctggcttggtaaaaccttccgagacccttagcctcacatgcacggttagtgggggcagcatttcctcaggtgattactattggggatggattcggcaacccccgggtaaaggattggagtggattggtcatatttattatagtggagcgacgtactacaacccaagtctcaaatccagggttacaatatccgtcgatacgagcaggaaccaattcagcttgaaactttctagtgtcaccgcagcagacacagccgtctattactgtacgcgggatgactccagtaattggcggtcccgagggcaagggacactggtcacggtctcctcatctggaggcggtggaagcggtggaggaggatctgaagtgcagctggttgaatctggcggaggactggttcagcctggcggatctctgagactgtcttgtgccgcctctggcttcgccagcgactactatatcatcggctggttcagacaggcccctggcaaagagagagagggcgtcagctgtatcagcagcagatacgccaacaccaactacgccgacagcgtgaagggcagattcaccatcagccgggacaacgccaagaacaccgtgtacctccagatgaacagcctgaagcctgaggacaccgccgtgtactactgtgccgccgacaccagaagatacacctgtcctgacattgccaccatgcaccggaacttcgattcttggggccagggcacactggtcaccgtttcttctggatccggcggcggaggatctggcggaggcggatctgggggcggaggctctttcgaacaagttcagcttcaacagcctggcgctgagctggtcaaacctggcgcttctgtgaagatgagctgcaaagccagcggctacgccttcagcagctactggatcaactggatgaagcagaaacccggccagggactcgaatggatcggccaaatctatcccggcgacggcgacaccaactacaacggcaagttcaagggcagagccacactgaccgccgatacctctagcagcacagcctacatgcagctgagcagcctgaccagcgaagatagcgccgtgtacttctgtgcccggtccatcacaacagtcgtgggctgcgctatggactattggggccagggaacaagcgtgaccgtgtctagtacgcgtatccagaaccctgatcctgccgtgtaccagctgcgggatagcaagagcagcgacaagagcgtgtgtctgttcaccgacttcgacagccagaccaacgtgtcccagagcaaggactccgacgtgtacatcaccgataagtgcgtgctggacatgcggagcatggacttcaagagcaactccgccgtggcctggtccaacaagtccgatttcgcctgcgccaacgccttcaacaacagcattatccccgaggacacattcttcccaagcagcgacgtgccctgcgacgtgaagctggtggaaaagagcttcgagacagacaccaacctgaacttccagaacctgagcgtgatcggcttcagaatcctgctgctgaaagtggccggctttaacctgctgatgaccctgcggctgtggtccagccgcgccaagagaagcggatctggcgtgaagcagaccctgaatttcgacctgctgaagctggctggcgacgtggaatccaacccaggcccttctagaggccatatgaccgagtacaagcccacggtgcgcctcgccacccgcgacgacgtccccagggccgtacgcaccctcgccgccgcgttcgccgactaccccgccacgcgccacaccgtcgatccggaccgccacatcgagcgggtcaccgagctgcaagaactcttcctcacgcgcgtcgggctcgacatcggcaaggtgtgggtcgcggacgacggcgccgcggtggcggtctggaccacgccggagagcgtcgaagcgggggcggtgttcgccgagatcggcccgcgcatggccgagttgagcggttcccggctggccgcgcagcaacagatggaaggcctcctggcgccgcaccggcccaaggagcccgcgtggttcctggccaccgtcggcgtctcgcccgaccaccagggcaagggtctgggcagcgccgtcgtgctccccggagtggaggcggccgagcgcgccggggtgcccgccttcctggagacctccgcgccccgcaacctccccttctacgagcggctcggcttcaccgtcaccgccgacgtcgaggtgcccgaaggaccgcgcacctggtgcatgacccgcaagcccggtgcctga

SEQ ID NO: 6150 - DNA, 3390 bp, Artificial Sequence
  Synthetic Polynucloetide
atggccttaccagtgaccgccttgctcctgccgctggccttgctgctccacgccgccaggccggacatccagatgacacagagccctagcagcctgtctgccagcgtgggagacagagtgaccatcacatgcaaggccagcgaccacatcaacaactggctggcctggtatcagcagaagcctggacaggcccctaagctgctgatctacggcgctaccacactggaaacaggcgtgcccagcagattttctggcagcggctctggcaccgactacaccctgacaatatccagcctccagcctgaggacttcgccacctactactgtcagcagagctggaacaccccttggacattcggccagggcaccaagctggaaatcaagagactcgaggacctgaagaacgtgttcccacctgaggtggccgtgttcgagcctagcgaggccgagatcagccacacccagaaagccaccctcgtgtgcctggctaccggcttctaccccgaccatgtggaactgtcttggtgggtcaacggcaaagaggtgcacagcggcgtgtgtaccgacccccagccactgaaagaacagcccgccctgaacgacagccggtactgcctgagcagcagactgagagtgtccgccaccttctggcagaacccccggaaccacttcagatgccaggtgcagttctacggcctgagcgagaacgacgagtggacccaggacagagccaagcccgtgacccagatcgtgtctgccgaagcctggggcagagccgattgcggctttaccagcgagagctaccagcagggcgtgctgagcgccaccatcctgtacgagatcctgctgggcaaggccaccctgtacgccgtgctggtgtctgccctggtgctgatggctatggtcaagcggaaggacagccggggaagggccaagcgatctggatctggagcaacaaacttctcactactcaaacaagcaggtgacgtggaggagaatcccgggcctactagtatggactggatttggcgcatccttttccttgtcggcgctgctaccggcgcccattcccagctccagttgcaagagagcggccctggcttggtaaaaccttccgagacccttagcctcacatgcacggttagtgggggcagcatttcctcaggtgattactattggggatggattcggcaacccccgggtaaaggattggagtggattggtcatatttattatagtggagcgacgtactacaacccaagtctcaaatccagggttacaatatccgtcgatacgagcaggaaccaattcagcttgaaactttctagtgtcaccgcagcagacacagccgtctattactgtacgcgggatgactccagtaattggcggtcccgagggcaagggacactggtcacggtctcctcatctggaggcggtggaagcggtggaggaggatctgaagtgcagctggttgaatctggcggaggactggttcagcctggcggatctctgagactgtcttgtgccgcctctggcttcgccagcgactactatatcatcggctggttcagacaggcccctggcaaagagagagagggcgtcagctgtatcagcagcagatacgccaacaccaactacgccgacagcgtgaagggcagattcaccatcagccgggacaacgccaagaacaccgtgtacctccagatgaacagcctgaagcctgaggacaccgccgtgtactactgtgccgccgacaccagaagatacacctgtcctgacattgccaccatgcaccggaacttcgattcttggggccagggcacactggtcaccgtttcttctggatccggcggcggaggatctggcggaggcggatctgggggcggaggctctttcgaacaagttcagcttcaacagcctggcgctgagctggtcaaacctggcgcttctgtgaagatgagctgcaaagccagcggctacgccttcagcagctactggatcaactggatgaagcagaaacccggccagggactcgaatggatcggccaaatctatcccggcgacggcgacaccaactacaacggcaagttcaagggcagagccacactgaccgccgatacctctagcagcacagcctacatgcagctgagcagcctgaccagcgaagatagcgccgtgtacttctgtgcccggtccatcacaacagtcgtgggctgcgctatggactattggggccagggaacaagcgtgaccgtgtctagtacgcgtatccagaaccctgatcctgccgtgtaccagctgcgggatagcaagagcagcgacaagagcgtgtgtctgttcaccgacttcgacagccagaccaacgtgtcccagagcaaggactccgacgtgtacatcaccgataagtgcgtgctggacatgcggagcatggacttcaagagcaactccgccgtggcctggtccaacaagtccgatttcgcctgcgccaacgccttcaacaacagcattatccccgaggacacattcttcccaagccccgagagcagctgcgacgtgaagctggtggaaaagagcttcgagacagacaccaacctgaacttccagaacctgagcgtgatcggcttcagaatcctgctgctgaaagtggccggctttaacctgctgatgaccctgcggctgtggtccagccgcgccaagagaagcggatctggcgtgaagcagaccctgaatttcgacctgctgaagctggctggcgacgtggaatccaacccaggcccttctagaggccatatgaccgagtacaagcccacggtgcgcctcgccacccgcgacgacgtccccagggccgtacgcaccctcgccgccgcgttcgccgactaccccgccacgcgccacaccgtcgatccggaccgccacatcgagcgggtcaccgagctgcaagaactcttcctcacgcgcgtcgggctcgacatcggcaaggtgtgggtcgcggacgacggcgccgcggtggcggtctggaccacgccggagagcgtcgaagcgggggcggtgttcgccgagatcggcccgcgcatggccgagttgagcggttcccggctggccgcgcagcaacagatggaaggcctcctggcgccgcaccggcccaaggagcccgcgtggttcctggccaccgtcggcgtctcgcccgaccaccagggcaagggtctgggcagcgccgtcgtgctccccggagtggaggcggccgagcgcgccggggtgcccgccttcctggagacctccgcgccccgcaacctccccttctacgagcggctcggcttcaccgtcaccgccgacgtcgaggtgcccgaaggaccgcgcacctggtgcatgacccgcaagcccggtgcctga

SEQ ID NO: 6151 - DNA, 2688 bp, Artificial Sequence
  Synthetic Polynucloetide
atggccttaccagtgaccgccttgctcctgccgctggccttgctgctccacgccgccaggccggacatccagatgacacagagccctagcagcctgtctgccagcgtgggagacagagtgaccatcacatgcaaggccagcgaccacatcaacaactggctggcctggtatcagcagaagcctggacaggcccctaagctgctgatctacggcgctaccacactggaaacaggcgtgcccagcagattttctggcagcggctctggcaccgactacaccctgacaatatccagcctccagcctgaggacttcgccacctactactgtcagcagagctggaacaccccttggacattcggccagggcaccaagctggaaatcaagagactcgaggacctgaagaacgtgttcccacctgaggtggccgtgttcgagcctagcgaggccgagatcagccacacccagaaagccaccctcgtgtgcctggctaccggcttctaccccgaccatgtggaactgtcttggtgggtcaacggcaaagaggtgcacagcggcgtgtgtaccgacccccagccactgaaagaacagcccgccctgaacgacagccggtactgcctgagcagcagactgagagtgtccgccaccttctggcagaacccccggaaccacttcagatgccaggtgcagttctacggcctgagcgagaacgacgagtggacccaggacagagccaagcccgtgacccagatcgtgtctgccgaagcctggggcagagccgattgcggctttaccagcgagagctaccagcagggcgtgctgagcgccaccatcctgtacgagatcctgctgggcaaggccaccctgtacgccgtgctggtgtctgccctggtgctgatggctatggtcaagcggaaggacagccggggaagggccaagcgatctggatctggagcaacaaacttctcactactcaaacaagcaggtgacgtggaggagaatcccgggcctactagtatggactggatttggcgcatccttttccttgtcggcgctgctaccggcgcccattcccagctccagttgcaagagagcggccctggcttggtaaaaccttccgagacccttagcctcacatgcacggttagtgggggcagcatttcctcaggtgattactattggggatggattcggcaacccccgggtaaaggattggagtggattggtcatatttattatagtggagcgacgtactacaacccaagtctcaaatccagggttacaatatccgtcgatacgagcaggaaccaattcagcttgaaactttctagtgtcaccgcagcagacacagccgtctattactgtacgcgggatgactccagtaattggcggtcccgagggcaagggacactggtcacggtctcctcatctggaggcggtggaagcggtggaggaggatctgaagtgcagctggttgaatctggcggaggactggttcagcctggcggatctctgagactgtcttgtgccgcctctggcttcgccagcgactactatatcatcggctggttcagacaggcccctggcaaagagagagagggcgtcagctgtatcagcagcagatacgccaacaccaactacgccgacagcgtgaagggcagattcaccatcagccgggacaacgccaagaacaccgtgtacctccagatgaacagcctgaagcctgaggacaccgccgtgtactactgtgccgccgacaccagaagatacacctgtcctgacattgccaccatgcaccggaacttcgattcttggggccagggcacactggtcaccgtttcttctggatccggcggcggaggatctggcggaggcggatctgggggcggaggctctttcgaacaagttcagcttcaacagcctggcgctgagctggtcaaacctggcgcttctgtgaagatgagctgcaaagccagcggctacgccttcagcagctactggatcaactggatgaagcagaaacccggccagggactcgaatggatcggccaaatctatcccggcgacggcgacaccaactacaacggcaagttcaagggcagagccacactgaccgccgatacctctagcagcacagcctacatgcagctgagcagcctgaccagcgaagatagcgccgtgtacttctgtgcccggtccatcacaacagtcgtgggctgcgctatggactattggggccagggaacaagcgtgaccgtgtctagtacgcgtatccagaaccctgatcctgccgtgtaccagctgcgggatagcaagagcagcgacaagagcgtgtgtctgttcaccgacttcgacagccagaccaacgtgtcccagagcaaggactccgacgtgtacatcaccgataagtgcgtgctggacatgcggagcatggacttcaagagcaactccgccgtggcctggtccaacaagtccgatttcgcctgcgccaacgccttcaacaacagcattatccccgaggacacattcttcccaagccccgagagcagctgcgacgtgaagctggtggaaaagagcttcgagacagacaccaacctgaacttccagaacctgagcgtgatcggcttcagaatcctgctgctgaaagtggccggctttaacctgctgatgaccctgcggctgtggtccagc

SEQ ID NO: 6152 - DNA, 3363 bp, Artificial Sequence
  Synthetic Polynucloetide
atggccttaccagtgaccgccttgctcctgccgctggccttgctgctccacgccgccaggccggacatccagatgacacagagccctagcagcctgtctgccagcgtgggagacagagtgaccatcacatgcaaggccagcgaccacatcaacaactggctggcctggtatcagcagaagcctggacaggcccctaagctgctgatctacggcgctaccacactggaaacaggcgtgcccagcagattttctggcagcggctctggcaccgactacaccctgacaatatccagcctccagcctgaggacttcgccacctactactgtcagcagagctggaacaccccttggacattcggccagggcaccaagctggaaatcaagagactcgaggacctgaagaacgtgttcccacctgaggtggccgtgttcgagcctagcgaggccgagatcagccacacccagaaagccaccctcgtgtgcctggctaccggcttctaccccgaccatgtggaactgtcttggtgggtcaacggcaaagaggtgcacagcggcgtgtgtaccgacccccagccactgaaagaacagcccgccctgaacgacagccggtactgcctgagcagcagactgagagtgtccgccaccttctggcagaacccccggaaccacttcagatgccaggtgcagttctacggcctgagcgagaacgacgagtggacccaggacagagccaagcccgtgacccagatcgtgtctgccgaagcctggggcagagccgattgcggctttaccagcgagagctaccagcagggcgtgctgagcgccaccatcctgtacgagatcctgctgggcaaggccaccctgtacgccgtgctggtgtctgccctggtgctgatggctatggtcaagcggaaggacagccggggaagggccaagcgatctggatctggagcaacaaacttctcactactcaaacaagcaggtgacgtggaggagaatcccgggcctactagtatggactggatttggcgcatccttttccttgtcggcgctgctaccggcgcccattcccagctccagttgcaagagagcggccctggcttggtaaaaccttccgagacccttagcctcacatgcacggttagtgggggcagcatttcctcaggtgattactattggggatggattcggcaacccccgggtaaaggattggagtggattggtcatatttattatagtggagcgacgtactacaacccaagtctcaaatccagggttacaatatccgtcgatacgagcaggaaccaattcagcttgaaactttctagtgtcaccgcagcagacacagccgtctattactgtacgcgggatgactccagtaattggcggtcccgagggcaagggacactggtcacggtctcctcatctggaggcggtggaagcggtggaggaggatctgaagtgcagctggttgaatctggcggaggactggttcagcctggcggatctctgagactgtcttgtgccgcctctggcttcgccagcgactactatatcatcggctggttcagacaggcccctggcaaagagagagagggcgtcagctgtatcagcagcagatacgccaacaccaactacgccgacagcgtgaagggcagattcaccatcagccgggacaacgccaagaacaccgtgtacctccagatgaacagcctgaagcctgaggacaccgccgtgtactactgtgccgccgacaccagaagatacacctgtcctgacattgccaccatgcaccggaacttcgattcttggggccagggcacactggtcaccgtttcttctggatccggcggcggaggatctggcggaggcggatctgggggcggaggctctttcgaacaagttcagcttcaacagcctggcgctgagctggtcaaacctggcgcttctgtgaagatgagctgcaaagccagcggctacgccttcagcagctactggatcaactggatgaagcagaaacccggccagggactcgaatggatcggccaaatctatcccggcgacggcgacaccaactacaacggcaagttcaagggcagagccacactgaccgccgatacctctagcagcacagcctacatgcagctgagcagcctgaccagcgaagatagcgccgtgtacttctgtgcccggtccatcacaacagtcgtgggctgcgctatggactattggggccagggaacaagcgtgaccgtgtctagtacgcgtatccagaaccctgatcctgccgtgtaccagctgcgggatagcaagagcagcgacaagagcgtgtgtctgttcaccgacttcgacagccagaccaacgtgtcccagagcaaggactccgacgtgtacatcaccgataagtgcgtgctggacatgcggagcatggacttcaagagcaactccgccgtggcctggtccaacaagtccgatttcgcctgcgccaacgccttcaacaacagcattatccccgaggacacattcttcccaagccccgagagcagctgcgacgtgaagctggtggaaaagagcttcgagacagacaccaacctgaacttccagaacctgagcgtgatcggcttcagaatcctgctgctgaaagtggccggctttaacctgctgatgaccctgcggctgtggtccagccgcgccaagagaagcggatctggcgtgaagcagaccctgaatttcgacctgctgaagctggctggcgacgtggaatccaacccaggcccttctagaggcgggatccacaccatggctacctacgaggtgctgtgcgaggtggcaagaaagctgggcaccgacgacagagaagtggtgctgttcctgctgaacgtgttcatccctcagcctacactggcccagctgatcggtgcactgagagccctgaaagaggaaggccggctgacctttcctctgctggccgaatgcctgttcagagccggaagaagggatctgctgcgggacctgctgcatctggaccccagatttctggaaagacacctggccggcaccatgagctacttcagcccttaccagctgaccgtgctgcacgttgacggcgaactgtgcgccagagatattcggagcctgatcttcctgagcaaggacaccatcggcagccggtctacccctcagacatttctgcactgggtgtactgcatggaaaacctggacctgctcggccccacagatgtggatgccctgatgtccatgctgagaagcctgagcagagtggacctccagagacaggtgcagacactgatgggactgcacctgagcggacctagccacagccagcactacagacacacccct

SEQ ID NO: 6153 - DNA, 2700 bp, Artificial Sequence
  Synthetic Polynucloetide
atggccttaccagtgaccgccttgctcctgccgctggccttgctgctccacgccgccaggccggacatccagatgacacagagccctagcagcctgtctgccagcgtgggagacagagtgaccatcacatgcaaggccagcgaccacatcaacaactggctggcctggtatcagcagaagcctggacaggcccctaagctgctgatctacggcgctaccacactggaaacaggcgtgcccagcagattttctggcagcggctctggcaccgactacaccctgacaatatccagcctccagcctgaggacttcgccacctactactgtcagcagagctggaacaccccttggacattcggccagggcaccaagctggaaatcaagagactcgagatccagaaccctgatcctgccgtgtaccagctgcgggatagcaagagcagcgacaagagcgtgtgtctgttcaccgacttcgacagccagaccaacgtgtcccagagcaaggactccgacgtgtacatcaccgataagtgcgtgctggacatgcggagcatggacttcaagagcaactccgccgtggcctggtccaacaagtccgatttcgcctgcgccaacgccttcaacaacagcattatccccgaggacacattcttcccaagccccgagagcagctgcgacgtgaagctggtggaaaagagcttcgagacagacaccaacctgaacttccagaacctgagcgtgatcggcttcagaatcctgctgctgaaagtggccggctttaacctgctgatgaccctgcggctgtggtccagccgcgccaagagaagcggatctggcgtgaagcagaccctgaatttcgacctgctgaagctggctggcgacgtggaatccaacccaggccctactagtatggactggatttggcgcatccttttccttgtcggcgctgctaccggcgcccattcccagctccagttgcaagagagcggccctggcttggtaaaaccttccgagacccttagcctcacatgcacggttagtgggggcagcatttcctcaggtgattactattggggatggattcggcaacccccgggtaaaggattggagtggattggtcatatttattatagtggagcgacgtactacaacccaagtctcaaatccagggttacaatatccgtcgatacgagcaggaaccaattcagcttgaaactttctagtgtcaccgcagcagacacagccgtctattactgtacgcgggatgactccagtaattggcggtcccgagggcaagggacactggtcacggtctcctcatctggaggcggtggaagcggtggaggaggatctgaagtgcagctggttgaatctggcggaggactggttcagcctggcggatctctgagactgtcttgtgccgcctctggcttcgccagcgactactatatcatcggctggttcagacaggcccctggcaaagagagagagggcgtcagctgtatcagcagcagatacgccaacaccaactacgccgacagcgtgaagggcagattcaccatcagccgggacaacgccaagaacaccgtgtacctccagatgaacagcctgaagcctgaggacaccgccgtgtactactgtgccgccgacaccagaagatacacctgtcctgacattgccaccatgcaccggaacttcgattcttggggccagggcacactggtcaccgtttcttctggatccggcggcggaggatctggcggaggcggatctgggggcggaggctctttcgaacaagttcagcttcaacagcctggcgctgagctggtcaaacctggcgcttctgtgaagatgagctgcaaagccagcggctacgccttcagcagctactggatcaactggatgaagcagaaacccggccagggactcgaatggatcggccaaatctatcccggcgacggcgacaccaactacaacggcaagttcaagggcagagccacactgaccgccgatacctctagcagcacagcctacatgcagctgagcagcctgaccagcgaagatagcgccgtgtacttctgtgcccggtccatcacaacagtcgtgggctgcgctatggactattggggccagggaacaagcgtgaccgtgtctagtacgcgtgaggacctgaagaacgtgttcccacctgaggtggccgtgttcgagcctagcgaggccgagatcagccacacccagaaagccaccctcgtgtgcctggctaccggcttctaccccgaccatgtggaactgtcttggtgggtcaacggcaaagaggtgcacagcggcgtgtgtaccgacccccagccactgaaagaacagcccgccctgaacgacagccggtactgcctgagcagcagactgagagtgtccgccaccttctggcagaacccccggaaccacttcagatgccaggtgcagttctacggcctgagcgagaacgacgagtggacccaggacagagccaagcccgtgacccagatcgtgtctgccgaagcctggggcagagccgattgcggctttaccagcgagagctaccagcagggcgtgctgagcgccaccatcctgtacgagatcctgctgggcaaggccaccctgtacgccgtgctggtgtctgccctggtgctgatggctatggtcaagcggaaggacagccgggga

SEQ ID NO: 6154 - DNA, 3366 bp, Artificial Sequence
  Synthetic Polynucloetide
atggccttaccagtgaccgccttgctcctgccgctggccttgctgctccacgccgccaggccggacatccagatgacacagagccctagcagcctgtctgccagcgtgggagacagagtgaccatcacatgcaaggccagcgaccacatcaacaactggctggcctggtatcagcagaagcctggacaggcccctaagctgctgatctacggcgctaccacactggaaacaggcgtgcccagcagattttctggcagcggctctggcaccgactacaccctgacaatatccagcctccagcctgaggacttcgccacctactactgtcagcagagctggaacaccccttggacattcggccagggcaccaagctggaaatcaagagactcgagatccagaaccctgatcctgccgtgtaccagctgcgggatagcaagagcagcgacaagagcgtgtgtctgttcaccgacttcgacagccagaccaacgtgtcccagagcaaggactccgacgtgtacatcaccgataagtgcgtgctggacatgcggagcatggacttcaagagcaactccgccgtggcctggtccaacaagtccgatttcgcctgcgccaacgccttcaacaacagcattatccccgaggacacattcttcccaagccccgagagcagctgcgacgtgaagctggtggaaaagagcttcgagacagacaccaacctgaacttccagaacctgagcgtgatcggcttcagaatcctgctgctgaaagtggccggctttaacctgctgatgaccctgcggctgtggtccagccgcgccaagagaagcggatctggcgtgaagcagaccctgaatttcgacctgctgaagctggctggcgacgtggaatccaacccaggccctactagtatggactggatttggcgcatccttttccttgtcggcgctgctaccggcgcccattcccagctccagttgcaagagagcggccctggcttggtaaaaccttccgagacccttagcctcacatgcacggttagtgggggcagcatttcctcaggtgattactattggggatggattcggcaacccccgggtaaaggattggagtggattggtcatatttattatagtggagcgacgtactacaacccaagtctcaaatccagggttacaatatccgtcgatacgagcaggaaccaattcagcttgaaactttctagtgtcaccgcagcagacacagccgtctattactgtacgcgggatgactccagtaattggcggtcccgagggcaagggacactggtcacggtctcctcatctggaggcggtggaagcggtggaggaggatctgaagtgcagctggttgaatctggcggaggactggttcagcctggcggatctctgagactgtcttgtgccgcctctggcttcgccagcgactactatatcatcggctggttcagacaggcccctggcaaagagagagagggcgtcagctgtatcagcagcagatacgccaacaccaactacgccgacagcgtgaagggcagattcaccatcagccgggacaacgccaagaacaccgtgtacctccagatgaacagcctgaagcctgaggacaccgccgtgtactactgtgccgccgacaccagaagatacacctgtcctgacattgccaccatgcaccggaacttcgattcttggggccagggcacactggtcaccgtttcttctggatccggcggcggaggatctggcggaggcggatctgggggcggaggctctttcgaacaagttcagcttcaacagcctggcgctgagctggtcaaacctggcgcttctgtgaagatgagctgcaaagccagcggctacgccttcagcagctactggatcaactggatgaagcagaaacccggccagggactcgaatggatcggccaaatctatcccggcgacggcgacaccaactacaacggcaagttcaagggcagagccacactgaccgccgatacctctagcagcacagcctacatgcagctgagcagcctgaccagcgaagatagcgccgtgtacttctgtgcccggtccatcacaacagtcgtgggctgcgctatggactattggggccagggaacaagcgtgaccgtgtctagtacgcgtgaggacctgaagaacgtgttcccacctgaggtggccgtgttcgagcctagcgaggccgagatcagccacacccagaaagccaccctcgtgtgcctggctaccggcttctaccccgaccatgtggaactgtcttggtgggtcaacggcaaagaggtgcacagcggcgtgtgtaccgacccccagccactgaaagaacagcccgccctgaacgacagccggtactgcctgagcagcagactgagagtgtccgccaccttctggcagaacccccggaaccacttcagatgccaggtgcagttctacggcctgagcgagaacgacgagtggacccaggacagagccaagcccgtgacccagatcgtgtctgccgaagcctggggcagagccgattgcggctttaccagcgagagctaccagcagggcgtgctgagcgccaccatcctgtacgagatcctgctgggcaaggccaccctgtacgccgtgctggtgtctgccctggtgctgatggctatggtcaagcggaaggacagccggggaagggccaagcgatctggatctggagcaacaaacttctcactactcaaacaagcaggtgacgtggaggagaatcccgggccttctagaggcgggatccacaccatggctacctacgaggtgctgtgcgaggtggcaagaaagctgggcaccgacgacagagaagtggtgctgttcctgctgaacgtgttcatccctcagcctacactggcccagctgatcggtgcactgagagccctgaaagaggaaggccggctgacctttcctctgctggccgaatgcctgttcagagccggaagaagggatctgctgcgggacctgctgcatctggaccccagatttctggaaagacacctggccggcaccatgagctacttcagcccttaccagctgaccgtgctgcacgttgacggcgaactgtgcgccagagatattcggagcctgatcttcctgagcaaggacaccatcggcagccggtctacccctcagacatttctgcactgggtgtactgcatggaaaacctggacctgctcggccccacagatgtggatgccctgatgtccatgctgagaagcctgagcagagtggacctccagagacaggtgcagacactgatgggactgcacctgagcggacctagccacagccagcactacagacacacccct

SEQ ID NO: 6155 - DNA, 3390 bp, Artificial Sequence
  Synthetic Polynucloetide
atggccttaccagtgaccgccttgctcctgccgctggccttgctgctccacgccgccaggccggacatccagatgacacagagccctagcagcctgtctgccagcgtgggagacagagtgaccatcacatgcaaggccagcgaccacatcaacaactggctggcctggtatcagcagaagcctggacaggcccctaagctgctgatctacggcgctaccacactggaaacaggcgtgcccagcagattttctggcagcggctctggcaccgactacaccctgacaatatccagcctccagcctgaggacttcgccacctactactgtcagcagagctggaacaccccttggacattcggccagggcaccaagctggaaatcaagagactcgaggacctgaagaacgtgttcccacctgaggtggccgtgttcgagcctagcgaggccgagatcagccacacccagaaagccaccctcgtgtgcctggctaccggcttctaccccgaccatgtggaactgtcttggtgggtcaacggcaaagaggtgcacagcggcgtgtctaccgacccccagccactgaaagaacagcccgccctgaacgacagccggtactgcctgagcagcagactgagagtgtccgccaccttctggcagaacccccggaaccacttcagatgccaggtgcagttctacggcctgagcgagaacgacgagtggacccaggacagagccaagcccgtgacccagatcgtgtctgccgaagcctggggcagagccgattgcggctttaccagcgagagctaccagcagggcgtgctgagcgccaccatcctgtacgagatcctgctgggcaaggccaccctgtacgccgtgctggtgtctgccctggtgctgatggctatggtcaagcggaaggacagccggggaagggccaagcgatctggatctggagcaacaaacttctcactactcaaacaagcaggtgacgtggaggagaatcccgggcctactagtatggactggatttggcgcatccttttccttgtcggcgctgctaccggcgcccattcccagctccagttgcaagagagcggccctggcttggtaaaaccttccgagacccttagcctcacatgcacggttagtgggggcagcatttcctcaggtgattactattggggatggattcggcaacccccgggtaaaggattggagtggattggtcatatttattatagtggagcgacgtactacaacccaagtctcaaatccagggttacaatatccgtcgatacgagcaggaaccaattcagcttgaaactttctagtgtcaccgcagcagacacagccgtctattactgtacgcgggatgactccagtaattggcggtcccgagggcaagggacactggtcacggtctcctcatctggaggcggtggaagcggtggaggaggatctgaagtgcagctggttgaatctggcggaggactggttcagcctggcggatctctgagactgtcttgtgccgcctctggcttcgccagcgactactatatcatcggctggttcagacaggcccctggcaaagagagagagggcgtcagctgtatcagcagcagatacgccaacaccaactacgccgacagcgtgaagggcagattcaccatcagccgggacaacgccaagaacaccgtgtacctccagatgaacagcctgaagcctgaggacaccgccgtgtactactgtgccgccgacaccagaagatacacctgtcctgacattgccaccatgcaccggaacttcgattcttggggccagggcacactggtcaccgtttcttctggatccggcggcggaggatctggcggaggcggatctgggggcggaggctctttcgaacaagttcagcttcaacagcctggcgctgagctggtcaaacctggcgcttctgtgaagatgagctgcaaagccagcggctacgccttcagcagctactggatcaactggatgaagcagaaacccggccagggactcgaatggatcggccaaatctatcccggcgacggcgacaccaactacaacggcaagttcaagggcagagccacactgaccgccgatacctctagcagcacagcctacatgcagctgagcagcctgaccagcgaagatagcgccgtgtacttctgtgcccggtccatcacaacagtcgtgggctgcgctatggactattggggccagggaacaagcgtgaccgtgtctagtacgcgtatccagaaccctgatcctgccgtgtaccagctgcgggatagcaagagcagcgacaagagcgtgtgtctgttcaccgacttcgacagccagaccaacgtgtcccagagcaaggactccgacgtgtacatcaccgataagaccgtgctggacatgcggagcatggacttcaagagcaactccgccgtggcctggtccaacaagtccgatttcgcctgcgccaacgccttcaacaacagcattatccccgaggacacattcttcccaagccccgagagcagctgcgacgtgaagctggtggaaaagagcttcgagacagacaccaacctgaacttccagaacctgagcgtgatcggcttcagaatcctgctgctgaaagtggccggctttaacctgctgatgaccctgcggctgtggtccagccgcgccaagagaagcggatctggcgtgaagcagaccctgaatttcgacctgctgaagctggctggcgacgtggaatccaacccaggcccttctagaggccatatgaccgagtacaagcccacggtgcgcctcgccacccgcgacgacgtccccagggccgtacgcaccctcgccgccgcgttcgccgactaccccgccacgcgccacaccgtcgatccggaccgccacatcgagcgggtcaccgagctgcaagaactcttcctcacgcgcgtcgggctcgacatcggcaaggtgtgggtcgcggacgacggcgccgcggtggcggtctggaccacgccggagagcgtcgaagcgggggcggtgttcgccgagatcggcccgcgcatggccgagttgagcggttcccggctggccgcgcagcaacagatggaaggcctcctggcgccgcaccggcccaaggagcccgcgtggttcctggccaccgtcggcgtctcgcccgaccaccagggcaagggtctgggcagcgccgtcgtgctccccggagtggaggcggccgagcgcgccggggtgcccgccttcctggagacctccgcgccccgcaacctccccttctacgagcggctcggcttcaccgtcaccgccgacgtcgaggtgcccgaaggaccgcgcacctggtgcatgacccgcaagcccggtgcctga

SEQ ID NO: 6156 - DNA, 3636 bp, Artificial Sequence
  Synthetic Polynucloetide
atggccttaccagtgaccgccttgctcctgccgctggccttgctgctccacgccgccaggccggacatccagatgacacagagccctagcagcctgtctgccagcgtgggagacagagtgaccatcacatgcaaggccagcgaccacatcaacaactggctggcctggtatcagcagaagcctggacaggcccctaagctgctgatctacggcgctaccacactggaaacaggcgtgcccagcagattttctggcagcggctctggcaccgactacaccctgacaatatccagcctccagcctgaggacttcgccacctactactgtcagcagagctggaacaccccttggacattcggccagggcaccaagctggaaatcaagagactcgaggacctgaagaacgtgttcccacctgaggtggccgtgttcgagcctagcgaggccgagatcagccacacccagaaagccaccctcgtgtgcctggctaccggcttctaccccgaccatgtggaactgtcttggtgggtcaacggcaaagaggtgcacagcggcgtgtctaccgacccccagccactgaaagaacagcccgccctgaacgacagccggtactgcctgagcagcagactgagagtgtccgccaccttctggcagaacccccggaaccacttcagatgccaggtgcagttctacggcctgagcgagaacgacgagtggacccaggacagagccaagcccgtgacccagatcgtgtctgccgaagcctggggcagagccgattgcggctttaccagcgagagctaccagcagggcgtgctgagcgccaccatcctgtacgagatcctgctgggcaaggccaccctgtacgccgtgctggtgtctgccctggtgctgatggctatggtcaagcggaaggacagccggggaagggccaagcgatctggatctggagcaacaaacttctcactactcaaacaagcaggtgacgtggaggagaatcccgggcctactagtatggactggatttggcgcatccttttccttgtcggcgctgctaccggcgcccattcccagctccagttgcaagagagcggccctggcttggtaaaaccttccgagacccttagcctcacatgcacggttagtgggggcagcatttcctcaggtgattactattggggatggattcggcaacccccgggtaaaggattggagtggattggtcatatttattatagtggagcgacgtactacaacccaagtctcaaatccagggttacaatatccgtcgatacgagcaggaaccaattcagcttgaaactttctagtgtcaccgcagcagacacagccgtctattactgtacgcgggatgactccagtaattggcggtcccgagggcaagggacactggtcacggtctcctcatctggaggcggtggaagcggtggaggaggatctgaagtgcagctggttgaatctggcggaggactggttcagcctggcggatctctgagactgtcttgtgccgcctctggcttcgccagcgactactatatcatcggctggttcagacaggcccctggcaaagagagagagggcgtcagctgtatcagcagcagatacgccaacaccaactacgccgacagcgtgaagggcagattcaccatcagccgggacaacgccaagaacaccgtgtacctccagatgaacagcctgaagcctgaggacaccgccgtgtactactgtgccgccgacaccagaagatacacctgtcctgacattgccaccatgcaccggaacttcgattcttggggccagggcacactggtcaccgtttcttctggatccggcggcggaggatctggcggaggcggatctgggggcggaggctctttcgaacaagttcagcttcaacagcctggcgctgagctggtcaaacctggcgcttctgtgaagatgagctgcaaagccagcggctacgccttcagcagctactggatcaactggatgaagcagaaacccggccagggactcgaatggatcggccaaatctatcccggcgacggcgacaccaactacaacggcaagttcaagggcagagccacactgaccgccgatacctctagcagcacagcctacatgcagctgagcagcctgaccagcgaagatagcgccgtgtacttctgtgcccggtccatcacaacagtcgtgggctgcgctatggactattggggccagggaacaagcgtgaccgtgtctagtacgcgtgagcagaaactgatctcggaagaggatgggagcggcaccccattcccttctctggcccctcccatcatgctgctggtggacggcaagcagcagatggtggtcgtgtgcctggtgctggatgtggccccacctggactggacagccccatctggtttagcgccggcaatggctctgccctggacgcctttacctacggcccaagccctgccaccgatggcacctggacaaatctggcccacctgagcctgcccagcgaggaactggcttcttgggagcctctcgtgtgccacacaggacctggcgctgagggacacagcagatccacccagcctatgcacctgtctggcgaggccagcaccgccagaacctgtcctcaggaacctctgagaggcacccctggcggagcactgtggctgggagtgctgagactgctgctgttcaagctgctgctgtttgacctgctgctgacctgctcctgtctgtgcgatcctgccggccctctgccttctcctgccaccaccacaagactgagagccctgggcagccacagactgcaccctgccacagagacaggcggcagagaggccacaagcagccctagaccccagcccagagacagaagatggggcgataccccccctggcagaaagcctggatctccagtccgcgccaagagaagcggatctggcgtgaagcagaccctgaatttcgacctgctgaagctggctggcgacgtggaatccaacccaggcccttctagaggccatatgaccgagtacaagcccacggtgcgcctcgccacccgcgacgacgtccccagggccgtacgcaccctcgccgccgcgttcgccgactaccccgccacgcgccacaccgtcgatccggaccgccacatcgagcgggtcaccgagctgcaagaactcttcctcacgcgcgtcgggctcgacatcggcaaggtgtgggtcgcggacgacggcgccgcggtggcggtctggaccacgccggagagcgtcgaagcgggggcggtgttcgccgagatcggcccgcgcatggccgagttgagcggttcccggctggccgcgcagcaacagatggaaggcctcctggcgccgcaccggcccaaggagcccgcgtggttcctggccaccgtcggcgtctcgcccgaccaccagggcaagggtctgggcagcgccgtcgtgctccccggagtggaggcggccgagcgcgccggggtgcccgccttcctggagacctccgcgccccgcaacctccccttctacgagcggctcggcttcaccgtcaccgccgacgtcgaggtgcccgaaggaccgcgcacctggtgcatgacccgcaagcccggtgcctga

SEQ ID NO: 6157 - DNA, 3501 bp, Artificial Sequence
  Synthetic Polynucloetide
atggccttaccagtgaccgccttgctcctgccgctggccttgctgctccacgccgccaggccggacatccagatgacacagagccctagcagcctgtctgccagcgtgggagacagagtgaccatcacatgcaaggccagcgaccacatcaacaactggctggcctggtatcagcagaagcctggacaggcccctaagctgctgatctacggcgctaccacactggaaacaggcgtgcccagcagattttctggcagcggctctggcaccgactacaccctgacaatatccagcctccagcctgaggacttcgccacctactactgtcagcagagctggaacaccccttggacattcggccagggcaccaagctggaaatcaagagactcgaggggaaaccaattcccaaccctcttctgggactggattcaaccggcagcggcgacaagcagctggacgccgacgtgtcccccaagcctaccatcttcctgccctctatcgccgagacaaagctccagaaggccggcacctacctgtgcctgctggaaaagttcttcccagatgtgattaagatccactggcaggaaaagaagtccaacaccatcctgggcagccaggaaggcaacaccatgaagaccaacgacacctacatgaagttcagctggctgaccgtgcccgagaagtccctggacaaagaacacagatgcatcgtgcggcacgaaaacaacaagaacggcgtggaccaggaaatcatcttcccacccatcaagaccgatgtgattacaatggaccccaaggacaactgctccaaggacgccaacgataccctgctgctccagctgaccaacaccagcgcctactacatgtacttgttgctgctgctgaagtccgtggtgtacttcgccatcatcacatgctgcctgctgcggagaaccgccttctgctgcaacggcgagaagtctagggccaagcgatctggatctggagcaacaaacttctcactactcaaacaagcaggtgacgtggaggagaatcccgggcctactagtatggactggatttggcgcatccttttccttgtcggcgctgctaccggcgcccattcccagctccagttgcaagagagcggccctggcttggtaaaaccttccgagacccttagcctcacatgcacggttagtgggggcagcatttcctcaggtgattactattggggatggattcggcaacccccgggtaaaggattggagtggattggtcatatttattatagtggagcgacgtactacaacccaagtctcaaatccagggttacaatatccgtcgatacgagcaggaaccaattcagcttgaaactttctagtgtcaccgcagcagacacagccgtctattactgtacgcgggatgactccagtaattggcggtcccgagggcaagggacactggtcacggtctcctcatctggaggcggtggaagcggtggaggaggatctgaagtgcagctggttgaatctggcggaggactggttcagcctggcggatctctgagactgtcttgtgccgcctctggcttcgccagcgactactatatcatcggctggttcagacaggcccctggcaaagagagagagggcgtcagctgtatcagcagcagatacgccaacaccaactacgccgacagcgtgaagggcagattcaccatcagccgggacaacgccaagaacaccgtgtacctccagatgaacagcctgaagcctgaggacaccgccgtgtactactgtgccgccgacaccagaagatacacctgtcctgacattgccaccatgcaccggaacttcgattcttggggccagggcacactggtcaccgtttcttctggatccggcggcggaggatctggcggaggcggatctgggggcggaggctctttcgaacaagttcagcttcaacagcctggcgctgagctggtcaaacctggcgcttctgtgaagatgagctgcaaagccagcggctacgccttcagcagctactggatcaactggatgaagcagaaacccggccagggactcgaatggatcggccaaatctatcccggcgacggcgacaccaactacaacggcaagttcaagggcagagccacactgaccgccgatacctctagcagcacagcctacatgcagctgagcagcctgaccagcgaagatagcgccgtgtacttctgtgcccggtccatcacaacagtcgtgggctgcgctatggactattggggccagggaacaagcgtgaccgtgtctagtacgcgtgagcagaaactgatctcggaagaggatgggagcggcagccagcctcacaccaagcccagcgtgttcgtgatgaagaacggcaccaacgtggcctgcctcgtgaaagagttctaccccaaggacatcaggatcaacctggtgtccagcaagaagatcaccgagttcgaccccgccatcgtgatctcccccagcggcaagtacaacgccgtgaagctggggaagtacgaggacagcaacagcgtgacctgctccgtgcagcacgacaacaagaccgtgcacagcaccgactttgaagtgaaaaccgactccaccgaccacgtgaagcccaaagagacagagaacaccaagcagcccagcaagagctgccacaagcccaaggccatcgtgcacaccgagaaagtgaacatgatgagcctgaccgtgctgggcctgcggatgctgttcgccaaaaccgtggccgtgaacttcctgctgaccgccaagctgttcttcctccgcgccaagagaagcggatctggcgtgaagcagaccctgaatttcgacctgctgaagctggctggcgacgtggaatccaacccaggcccttctagaggccatatgaccgagtacaagcccacggtgcgcctcgccacccgcgacgacgtccccagggccgtacgcaccctcgccgccgcgttcgccgactaccccgccacgcgccacaccgtcgatccggaccgccacatcgagcgggtcaccgagctgcaagaactcttcctcacgcgcgtcgggctcgacatcggcaaggtgtgggtcgcggacgacggcgccgcggtggcggtctggaccacgccggagagcgtcgaagcgggggcggtgttcgccgagatcggcccgcgcatggccgagttgagcggttcccggctggccgcgcagcaacagatggaaggcctcctggcgccgcaccggcccaaggagcccgcgtggttcctggccaccgtcggcgtctcgcccgaccaccagggcaagggtctgggcagcgccgtcgtgctccccggagtggaggcggccgagcgcgccggggtgcccgccttcctggagacctccgcgccccgcaacctccccttctacgagcggctcggcttcaccgtcaccgccgacgtcgaggtgcccgaaggaccgcgcacctggtgcatgacccgcaagcccggtgcctga

SEQ ID NO: 6158 - DNA, 2712 bp, Artificial Sequence
  Synthetic Polynucloetide
atggccttaccagtgaccgccttgctcctgccgctggccttgctgctccacgccgccaggccggacatccagatgacacagagccctagcagcctgtctgccagcgtgggagacagagtgaccatcacatgcaaggccagcgaccacatcaacaactggctggcctggtatcagcagaagcctggacaggcccctaagctgctgatctacggcgctaccacactggaaacaggcgtgcccagcagattttctggcagcggctctggcaccgactacaccctgacaatatccagcctccagcctgaggacttcgccacctactactgtcagcagagctggaacaccccttggacattcggccagggcaccaagctggaaatcaagagactcgagagccagcctcacaccaagcccagcgtgttcgtgatgaagaacggcaccaacgtggcctgcctcgtgaaagagttctaccccaaggacatcaggatcaacctggtgtccagcaagaagatcaccgagttcgaccccgccatcgtgatctcccccagcggcaagtacaacgccgtgaagctggggaagtacgaggacagcaacagcgtgacctgctccgtgcagcacgacaacaagaccgtgcacagcaccgactttgaagtgaaaaccgactccaccgaccacgtgaagcccaaagagacagagaacaccaagcagcccagcaagagctgccacaagcccaaggccatcgtgcacaccgagaaagtgaacatgatgagcctgaccgtgctgggcctgcggatgctgttcgccaaaaccgtggccgtgaacttcctgctgaccgccaagctgttcttcctcagggccaagcgatctggatctggagcaacaaacttctcactactcaaacaagcaggtgacgtggaggagaatcccgggcctactagtatggactggatttggcgcatccttttccttgtcggcgctgctaccggcgcccattcccagctccagttgcaagagagcggccctggcttggtaaaaccttccgagacccttagcctcacatgcacggttagtgggggcagcatttcctcaggtgattactattggggatggattcggcaacccccgggtaaaggattggagtggattggtcatatttattatagtggagcgacgtactacaacccaagtctcaaatccagggttacaatatccgtcgatacgagcaggaaccaattcagcttgaaactttctagtgtcaccgcagcagacacagccgtctattactgtacgcgggatgactccagtaattggcggtcccgagggcaagggacactggtcacggtctcctcatctggaggcggtggaagcggtggaggaggatctgaagtgcagctggttgaatctggcggaggactggttcagcctggcggatctctgagactgtcttgtgccgcctctggcttcgccagcgactactatatcatcggctggttcagacaggcccctggcaaagagagagagggcgtcagctgtatcagcagcagatacgccaacaccaactacgccgacagcgtgaagggcagattcaccatcagccgggacaacgccaagaacaccgtgtacctccagatgaacagcctgaagcctgaggacaccgccgtgtactactgtgccgccgacaccagaagatacacctgtcctgacattgccaccatgcaccggaacttcgattcttggggccagggcacactggtcaccgtttcttctggatccggcggcggaggatctggcggaggcggatctgggggcggaggctctttcgaacaagttcagcttcaacagcctggcgctgagctggtcaaacctggcgcttctgtgaagatgagctgcaaagccagcggctacgccttcagcagctactggatcaactggatgaagcagaaacccggccagggactcgaatggatcggccaaatctatcccggcgacggcgacaccaactacaacggcaagttcaagggcagagccacactgaccgccgatacctctagcagcacagcctacatgcagctgagcagcctgaccagcgaagatagcgccgtgtacttctgtgcccggtccatcacaacagtcgtgggctgcgctatggactattggggccagggaacaagcgtgaccgtgtctagtacgcgtgacaagcagctggacgccgacgtgtcccccaagcctaccatcttcctgccctctatcgccgagacaaagctccagaaggccggcacctacctgtgcctgctggaaaagttcttcccagatgtgattaagatccactggcaggaaaagaagtccaacaccatcctgggcagccaggaaggcaacaccatgaagaccaacgacacctacatgaagttcagctggctgaccgtgcccgagaagtccctggacaaagaacacagatgcatcgtgcggcacgaaaacaacaagaacggcgtggaccaggaaatcatcttcccacccatcaagaccgatgtgattacaatggaccccaaggacaactgctccaaggacgccaacgataccctgctgctccagctgaccaacaccagcgcctactacatgtacttgttgctgctgctgaagtccgtggtgtacttcgccatcatcacatgctgcctgctgcggagaaccgccttctgctgcaacggcgagaagtct

SEQ ID NO: 6159 - DNA, 3921 bp, Artificial Sequence
  Synthetic Polynucloetide
atggccttaccagtgaccgccttgctcctgccgctggccttgctgctccacgccgccaggccggacatccagatgacacagagccctagcagcctgtctgccagcgtgggagacagagtgaccatcacatgcaaggccagcgaccacatcaacaactggctggcctggtatcagcagaagcctggacaggcccctaagctgctgatctacggcgctaccacactggaaacaggcgtgcccagcagattttctggcagcggctctggcaccgactacaccctgacaatatccagcctccagcctgaggacttcgccacctactactgtcagcagagctggaacaccccttggacattcggccagggcaccaagctggaaatcaagagaggacagcctaaggccaatcctaccgtgacactgttccctccaagcagcgaagaactccaggccaacaaggccacacttgtgtgcctgatctccgacttctaccctggggctgtgacagtggcttggaaggccgatggatctcctgtgaaagccggcgtggaaaccaccaagccatccaagcagagcaacaacaaatacgccgccagctcctacctgagcctgacacctgagcagtggaagtcccacagatcctacagctgccaagtgacccacgaaggcagcaccgtggaaaagacagtggcccctacagagtgcagcggatcccagagcttcggcctgctggaccccaagctgtgctacctgctggatggcatcctgttcatctacggcgtgatcctgaccgccctgttcctgagagtgaagttcagcagaagcgccgacgcccctgcctaccagcagggacagaaccaactgtacaacgagctgaacctgggcagacgggaagagtacgacgtgctggacaagcggagaggcagggaccctgagatgggcggaaagccccagcggagaaagaacccccaggaaggactgtataacgaactccagaaagacaagatggccgaagcctacagcgagatcggcatgaagggcgagcggagaagaggcaagggccacgatggcctgtaccagggcctgagcaccgccaccaaggacacctatgacgccctgcacatgcaggccctgcctccaagaagggccaagcgatctggatctggagcaacaaacttctcactactcaaacaagcaggtgacgtggaggagaatcccgggcctactagtatggactggatttggcgcatccttttccttgtcggcgctgctaccggcgcccattcccagctccagttgcaagagagcggccctggcttggtaaaaccttccgagacccttagcctcacatgcacggttagtgggggcagcatttcctcaggtgattactattggggatggattcggcaacccccgggtaaaggattggagtggattggtcatatttattatagtggagcgacgtactacaacccaagtctcaaatccagggttacaatatccgtcgatacgagcaggaaccaattcagcttgaaactttctagtgtcaccgcagcagacacagccgtctattactgtacgcgggatgactccagtaattggcggtcccgagggcaagggacactggtcacggtctcctcatctggaggcggtggaagcggtggaggaggatctgaagtgcagctggttgaatctggcggaggactggttcagcctggcggatctctgagactgtcttgtgccgcctctggcttcgccagcgactactatatcatcggctggttcagacaggcccctggcaaagagagagagggcgtcagctgtatcagcagcagatacgccaacaccaactacgccgacagcgtgaagggcagattcaccatcagccgggacaacgccaagaacaccgtgtacctccagatgaacagcctgaagcctgaggacaccgccgtgtactactgtgccgccgacaccagaagatacacctgtcctgacattgccaccatgcaccggaacttcgattcttggggccagggcacactggtcaccgtttcttctggatccggcggcggaggatctggcggaggcggatctgggggcggaggctctttcgaacaagttcagcttcaacagcctggcgctgagctggtcaaacctggcgcttctgtgaagatgagctgcaaagccagcggctacgccttcagcagctactggatcaactggatgaagcagaaacccggccagggactcgaatggatcggccaaatctatcccggcgacggcgacaccaactacaacggcaagttcaagggcagagccacactgaccgccgatacctctagcagcacagcctacatgcagctgagcagcctgaccagcgaagatagcgccgtgtacttctgtgcccggtccatcacaacagtcgtgggctgcgctatggactattggggccagggaacaagcgtgaccgtgtctagtgcctctacaaagggaccctccgtgtttcctctggctcccagcagcaagtctacaagcggaggaacagccgctctgggctgcctggtcaaggattactttcccgagcctgtgaccgtgtcctggaatagcggagcactgacaagcggcgtgcacacctttccagccgtgctgcaaagcagcggcctgtactctctgagcagcgtggtcacagtgcctagctctagcctgggcacccagacctacatctgcaatgtgaaccacaagcctagcaacaccaaggtggacaagagagtggaacccaagagctgtggtacccagagttttgggttgttggaccctaaattgtgctatctgttggacggaatcctgttcatttacggagtgatcctgaccgcattgttcctgcgggttaagttttccagatccgcagacgcacccgcttaccaacaagggcagaaccaactctacaatgaacttaatttggggcggagggaagagtacgacgttctggacaaaaggaggggacgagatcccgagatgggcggaaagcctcagcgaaggaagaatccgcaagaggggctttataacgaactccagaaagataaaatggcagaagcctatagtgagattgggatgaagggagaaaggaggaggggtaaaggtcacgatgggttgtaccaaggattgagcacagccactaaagatacctatgatgcgctccacatgcaggccctgccgccaagacgcgccaagagaagcggatctggcgtgaagcagaccctgaatttcgacctgctgaagctggctggcgacgtggaatccaacccaggcccttctagaggccatatgaccgagtacaagcccacggtgcgcctcgccacccgcgacgacgtccccagggccgtacgcaccctcgccgccgcgttcgccgactaccccgccacgcgccacaccgtcgatccggaccgccacatcgagcgggtcaccgagctgcaagaactcttcctcacgcgcgtcgggctcgacatcggcaaggtgtgggtcgcggacgacggcgccgcggtggcggtctggaccacgccggagagcgtcgaagcgggggcggtgttcgccgagatcggcccgcgcatggccgagttgagcggttcccggctggccgcgcagcaacagatggaaggcctcctggcgccgcaccggcccaaggagcccgcgtggttcctggccaccgtcggcgtctcgcccgaccaccagggcaagggtctgggcagcgccgtcgtgctccccggagtggaggcggccgagcgcgccggggtgcccgccttcctggagacctccgcgccccgcaacctccccttctacgagcggctcggcttcaccgtcaccgccgacgtcgaggtgcccgaaggaccgcgcacctggtgcatgacccgcaagcccggtgcctga

SEQ ID NO: 6160 - DNA, 3276 bp, Artificial Sequence
  Synthetic Polynucloetide
atggccttaccagtgaccgccttgctcctgccgctggccttgctgctccacgccgccaggccggacatccagatgacacagagccctagcagcctgtctgccagcgtgggagacagagtgaccatcacatgcaaggccagcgaccacatcaacaactggctggcctggtatcagcagaagcctggacaggcccctaagctgctgatctacggcgctaccacactggaaacaggcgtgcccagcagattttctggcagcggctctggcaccgactacaccctgacaatatccagcctccagcctgaggacttcgccacctactactgtcagcagagctggaacaccccttggacattcggccagggcaccaagctggaaatcaagagactcgaggacctgaagaacgtgttcccacctgaggtggccgtgttcgagcctagcgaggccgagatcagccacacccagaaagccaccctcgtgtgcctggctaccggcttctaccccgaccatgtggaactgtcttggtgggtcaacggcaaagaggtgcacagcggcgtgtctaccgacccccagccactgaaagaacagcccgccctgaacgacagccggtactgcctgagcagcagactgagagtgtccgccaccttctggcagaacccccggaaccacttcagatgccaggtgcagttctacggcctgagcgagaacgacgagtggacccaggacagagccaagcccgtgacccagatcgtgtctgccgaagcctggggcagagccgattgcggatcccagagcttcggcctgctggaccccaagctgtgctacctgctggatggcatcctgttcatctacggcgtgatcctgaccgccctgttcctgagagtgaagttcagcagaagcgccgacgcccctgcctaccagcagggacagaaccaactgtacaacgagctgaacctgggcagacgggaagagtacgacgtgctggacaagcggagaggcagggaccctgagatgggcggaaagccccagcggagaaagaacccccaggaaggactgtataacgaactccagaaagacaagatggccgaagcctacagcgagatcggcatgaagggcgagcggagaagaggcaagggccacgatggcctgtaccagggcctgagcaccgccaccaaggacacctatgacgccctgcacatgcaggccctgcctccaagaagggccaagcgatctggatctggagcaacaaacttctcactactcaaacaagcaggtgacgtggaggagaatcccgggcctactagtatggactggatttggcgcatccttttccttgtcggcgctgctaccggcgcccattcccagctccagttgcaagagagcggccctggcttggtaaaaccttccgagacccttagcctcacatgcacggttagtgggggcagcatttcctcaggtgattactattggggatggattcggcaacccccgggtaaaggattggagtggattggtcatatttattatagtggagcgacgtactacaacccaagtctcaaatccagggttacaatatccgtcgatacgagcaggaaccaattcagcttgaaactttctagtgtcaccgcagcagacacagccgtctattactgtacgcgggatgactccagtaattggcggtcccgagggcaagggacactggtcacggtctcctcatctggaggcggtggaagcggtggaggaggatctgaagtgcagctggttgaatctggcggaggactggttcagcctggcggatctctgagactgtcttgtgccgcctctggcttcgccagcgactactatatcatcggctggttcagacaggcccctggcaaagagagagagggcgtcagctgtatcagcagcagatacgccaacaccaactacgccgacagcgtgaagggcagattcaccatcagccgggacaacgccaagaacaccgtgtacctccagatgaacagcctgaagcctgaggacaccgccgtgtactactgtgccgccgacaccagaagatacacctgtcctgacattgccaccatgcaccggaacttcgattcttggggccagggcacactggtcaccgtttcttctggatccggcggcggaggatctggcggaggcggatctgggggcggaggctctttcgaacaagttcagcttcaacagcctggcgctgagctggtcaaacctggcgcttctgtgaagatgagctgcaaagccagcggctacgccttcagcagctactggatcaactggatgaagcagaaacccggccagggactcgaatggatcggccaaatctatcccggcgacggcgacaccaactacaacggcaagttcaagggcagagccacactgaccgccgatacctctagcagcacagcctacatgcagctgagcagcctgaccagcgaagatagcgccgtgtacttctgtgcccggtccatcacaacagtcgtgggctgcgctatggactattggggccagggaacaagcgtgaccgtgtctagtacgcgtatccagaaccctgatcctgccgtgtaccagctgcgggatagcaagagcagcgacaagagcgtgtgtctgttcaccgacttcgacagccagaccaacgtgtcccagagcaaggactccgacgtgtacatcaccgataagaccgtgctggacatgcggagcatggacttcaagagcaactccgccgtggcctggtccaacaagtccgatttcgcctgcgccaacgccttcaacaacagcattatccccgaggacacattcttcccaagccccgagagcagctgcggtacccagagttttgggttgttggaccctaaattgtgctatctgttggacggaatcctgttcatttacggagtgatcctgaccgcattgttcctgcgggttaagttttccagatccgcagacgcacccgcttaccaacaagggcagaaccaactctacaatgaacttaatttggggcggagggaagagtacgacgttctggacaaaaggaggggacgagatcccgagatgggcggaaagcctcagcgaaggaagaatccgcaagaggggctttataacgaactccagaaagataaaatggcagaagcctatagtgagattgggatgaagggagaaaggaggaggggtaaaggtcacgatgggttgtaccaaggattgagcacagccactaaagatacctatgatgcgctccacatgcaggccctgccgccaaga

SEQ ID NO: 6161 - DNA, 3276 bp, Artificial Sequence
  Synthetic Polynucloetide
atggccttaccagtgaccgccttgctcctgccgctggccttgctgctccacgccgccaggccggacatccagatgacacagagccctagcagcctgtctgccagcgtgggagacagagtgaccatcacatgcaaggccagcgaccacatcaacaactggctggcctggtatcagcagaagcctggacaggcccctaagctgctgatctacggcgctaccacactggaaacaggcgtgcccagcagattttctggcagcggctctggcaccgactacaccctgacaatatccagcctccagcctgaggacttcgccacctactactgtcagcagagctggaacaccccttggacattcggccagggcaccaagctggaaatcaagagactcgaggacctgaagaacgtgttcccacctgaggtggccgtgttcgagcctagcaaggccgagatcgcccacacccagaaagccaccctcgtgtgcctggctaccggcttctaccccgaccatgtggaactgtcttggtgggtcaacggcaaagaggtgcacagcggcgtgtgtaccgacccccagccactgaaagaacagcccgccctgaacgacagccggtactgcctgagcagcagactgagagtgtccgccaccttctggcagaacccccggaaccacttcagatgccaggtgcagttctacggcctgagcgagaacgacgagtggacccaggacagagccaagcccgtgacccagatcgtgtctgccgaagcctggggcagagccgattgcggatcccagagcttcggcctgctggaccccaagctgtgctacctgctggatggcatcctgttcatctacggcgtgatcctgaccgccctgttcctgagagtgaagttcagcagaagcgccgacgcccctgcctaccagcagggacagaaccaactgtacaacgagctgaacctgggcagacgggaagagtacgacgtgctggacaagcggagaggcagggaccctgagatgggcggaaagccccagcggagaaagaacccccaggaaggactgtataacgaactccagaaagacaagatggccgaagcctacagcgagatcggcatgaagggcgagcggagaagaggcaagggccacgatggcctgtaccagggcctgagcaccgccaccaaggacacctatgacgccctgcacatgcaggccctgcctccaagaagggccaagcgatctggatctggagcaacaaacttctcactactcaaacaagcaggtgacgtggaggagaatcccgggcctactagtatggactggatttggcgcatccttttccttgtcggcgctgctaccggcgcccattcccagctccagttgcaagagagcggccctggcttggtaaaaccttccgagacccttagcctcacatgcacggttagtgggggcagcatttcctcaggtgattactattggggatggattcggcaacccccgggtaaaggattggagtggattggtcatatttattatagtggagcgacgtactacaacccaagtctcaaatccagggttacaatatccgtcgatacgagcaggaaccaattcagcttgaaactttctagtgtcaccgcagcagacacagccgtctattactgtacgcgggatgactccagtaattggcggtcccgagggcaagggacactggtcacggtctcctcatctggaggcggtggaagcggtggaggaggatctgaagtgcagctggttgaatctggcggaggactggttcagcctggcggatctctgagactgtcttgtgccgcctctggcttcgccagcgactactatatcatcggctggttcagacaggcccctggcaaagagagagagggcgtcagctgtatcagcagcagatacgccaacaccaactacgccgacagcgtgaagggcagattcaccatcagccgggacaacgccaagaacaccgtgtacctccagatgaacagcctgaagcctgaggacaccgccgtgtactactgtgccgccgacaccagaagatacacctgtcctgacattgccaccatgcaccggaacttcgattcttggggccagggcacactggtcaccgtttcttctggatccggcggcggaggatctggcggaggcggatctgggggcggaggctctttcgaacaagttcagcttcaacagcctggcgctgagctggtcaaacctggcgcttctgtgaagatgagctgcaaagccagcggctacgccttcagcagctactggatcaactggatgaagcagaaacccggccagggactcgaatggatcggccaaatctatcccggcgacggcgacaccaactacaacggcaagttcaagggcagagccacactgaccgccgatacctctagcagcacagcctacatgcagctgagcagcctgaccagcgaagatagcgccgtgtacttctgtgcccggtccatcacaacagtcgtgggctgcgctatggactattggggccagggaacaagcgtgaccgtgtctagtacgcgtatccagaaccctgatcctgccgtgtaccagctgcgggatagcaagagcagcgacaagagcgtgtgtctgttcaccgacttcgacagccagaccaacgtgtcccagagcaaggactccgacgtgtacatcaccgataagtgcgtgctggacatgcggagcatggacttcaagagcaactccgccgtggcctggtccaacaagtccgatttcgcctgcgccaacgccttcaacaacagcattatccccgaggacacattcttcccaagcagcgacgtgccctgcggtacccagagttttgggttgttggaccctaaattgtgctatctgttggacggaatcctgttcatttacggagtgatcctgaccgcattgttcctgcgggttaagttttccagatccgcagacgcacccgcttaccaacaagggcagaaccaactctacaatgaacttaatttggggcggagggaagagtacgacgttctggacaaaaggaggggacgagatcccgagatgggcggaaagcctcagcgaaggaagaatccgcaagaggggctttataacgaactccagaaagataaaatggcagaagcctatagtgagattgggatgaagggagaaaggaggaggggtaaaggtcacgatgggttgtaccaaggattgagcacagccactaaagatacctatgatgcgctccacatgcaggccctgccgccaaga

SEQ ID NO: 6162 - DNA, 3489 bp, Artificial Sequence
  Synthetic Polynucloetide
atggccttaccagtgaccgccttgctcctgccgctggccttgctgctccacgccgccaggccggacatccagatgacacagagccctagcagcctgtctgccagcgtgggagacagagtgaccatcacatgcaaggccagcgaccacatcaacaactggctggcctggtatcagcagaagcctggacaggcccctaagctgctgatctacggcgctaccacactggaaacaggcgtgcccagcagattttctggcagcggctctggcaccgactacaccctgacaatatccagcctccagcctgaggacttcgccacctactactgtcagcagagctggaacaccccttggacattcggccagggcaccaagctggaaatcaagagactcgaggggaaaccaattcccaaccctcttctgggactggattcaaccggcagcggcgaggacctgaagaacgtgttcccacctgaggtggccgtgttcgagcctagcgaggccgagatcagccacacccagaaagccaccctcgtgtgcctggctaccggcttctaccccgaccatgtggaactgtcttggtgggtcaacggcaaagaggtgcacagcggcgtgtctaccgacccccagccactgaaagaacagcccgccctgaacgacagccggtactgcctgagcagcagactgagagtgtccgccaccttctggcagaacccccggaaccacttcagatgccaggtgcagttctacggcctgagcgagaacgacgagtggacccaggacagagccaagcccgtgacccagatcgtgtctgccgaagcctggggcagagccgattgcggatcccagagcttcggcctgctggaccccaagctgtgctacctgctggatggcatcctgttcatctacggcgtgatcctgaccgccctgttcctgagagtgaagttcagcagaagcgccgacgcccctgcctaccagcagggacagaaccaactgtacaacgagctgaacctgggcagacgggaagagtacgacgtgctggacaagcggagaggcagggaccctgagatgggcggaaagccccagcggagaaagaacccccaggaaggactgtataacgaactccagaaagacaagatggccgaagcctacagcgagatcggcatgaagggcgagcggagaagaggcaagggccacgatggcctgtaccagggcctgagcaccgccaccaaggacacctatgacgccctgcacatgcaggccctgcctccaagaagggccaagcgatctggatctggagcaacaaacttctcactactcaaacaagcaggtgacgtggaggagaatcccgggcctactagtatggactggatttggcgcatccttttccttgtcggcgctgctaccggcgcccattcccagctccagttgcaagagagcggccctggcttggtaaaaccttccgagacccttagcctcacatgcacggttagtgggggcagcatttcctcaggtgattactattggggatggattcggcaacccccgggtaaaggattggagtggattggtcatatttattatagtggagcgacgtactacaacccaagtctcaaatccagggttacaatatccgtcgatacgagcaggaaccaattcagcttgaaactttctagtgtcaccgcagcagacacagccgtctattactgtacgcgggatgactccagtaattggcggtcccgagggcaagggacactggtcacggtctcctcatctggaggcggtggaagcggtggaggaggatctgaagtgcagctggttgaatctggcggaggactggttcagcctggcggatctctgagactgtcttgtgccgcctctggcttcgccagcgactactatatcatcggctggttcagacaggcccctggcaaagagagagagggcgtcagctgtatcagcagcagatacgccaacaccaactacgccgacagcgtgaagggcagattcaccatcagccgggacaacgccaagaacaccgtgtacctccagatgaacagcctgaagcctgaggacaccgccgtgtactactgtgccgccgacaccagaagatacacctgtcctgacattgccaccatgcaccggaacttcgattcttggggccagggcacactggtcaccgtttcttctggatccggcggcggaggatctggcggaggcggatctgggggcggaggctctttcgaacaagttcagcttcaacagcctggcgctgagctggtcaaacctggcgcttctgtgaagatgagctgcaaagccagcggctacgccttcagcagctactggatcaactggatgaagcagaaacccggccagggactcgaatggatcggccaaatctatcccggcgacggcgacaccaactacaacggcaagttcaagggcagagccacactgaccgccgatacctctagcagcacagcctacatgcagctgagcagcctgaccagcgaagatagcgccgtgtacttctgtgcccggtccatcacaacagtcgtgggctgcgctatggactattggggccagggaacaagcgtgaccgtgtctagtacgcgtgagcagaaactgatctcggaagaggatgggagcggcatccagaaccctgatcctgccgtgtaccagctgcgggatagcaagagcagcgacaagagcgtgtgtctgttcaccgacttcgacagccagaccaacgtgtcccagagcaaggactccgacgtgtacatcaccgataagaccgtgctggacatgcggagcatggacttcaagagcaactccgccgtggcctggtccaacaagtccgatttcgcctgcgccaacgccttcaacaacagcattatccccgaggacacattcttcccaagccccgagagcagctgcggtacccagagttttgggttgttggaccctaaattgtgctatctgttggacggaatcctgttcatttacggagtgatcctgaccgcattgttcctgaggagcaagcggtcacggctgctccacagcgattacatgaatatgacaccacgaagaccgggtcctactcgcaaacactaccaaccctacgcacctccccgcgactttgcagcgtaccgatctcgggttaagttttccagatccgcagacgcacccgcttaccaacaagggcagaaccaactctacaatgaacttaatttggggcggagggaagagtacgacgttctggacaaaaggaggggacgagatcccgagatgggcggaaagcctcagcgaaggaagaatccgcaagaggggctttataacgaactccagaaagataaaatggcagaagcctatagtgagattgggatgaagggagaaaggaggaggggtaaaggtcacgatgggttgtaccaaggattgagcacagccactaaagatacctatgatgcgctccacatgcaggccctgccgccaaga

SEQ ID NO: 6163 - DNA, 3612 bp, Artificial Sequence
  Synthetic Polynucloetide
atggccttaccagtgaccgccttgctcctgccgctggccttgctgctccacgccgccaggccggacatccagatgacacagagccctagcagcctgtctgccagcgtgggagacagagtgaccatcacatgcaaggccagcgaccacatcaacaactggctggcctggtatcagcagaagcctggacaggcccctaagctgctgatctacggcgctaccacactggaaacaggcgtgcccagcagattttctggcagcggctctggcaccgactacaccctgacaatatccagcctccagcctgaggacttcgccacctactactgtcagcagagctggaacaccccttggacattcggccagggcaccaagctggaaatcaagagactcgaggggaaaccaattcccaaccctcttctgggactggattcaaccggcagcggcgaggacctgaagaacgtgttcccacctgaggtggccgtgttcgagcctagcgaggccgagatcagccacacccagaaagccaccctcgtgtgcctggctaccggcttctaccccgaccatgtggaactgtcttggtgggtcaacggcaaagaggtgcacagcggcgtgtctaccgacccccagccactgaaagaacagcccgccctgaacgacagccggtactgcctgagcagcagactgagagtgtccgccaccttctggcagaacccccggaaccacttcagatgccaggtgcagttctacggcctgagcgagaacgacgagtggacccaggacagagccaagcccgtgacccagatcgtgtctgccgaagcctggggcagagccgattgcggatcccagagcttcggcctgctggaccccaagctgtgctacctgctggatggcatcctgttcatctacggcgtgatcctgaccgccctgttcctgaggagtaagaggagcaggctcctgcacagtgactacatgaacatgactccacgccgccccggacccacccgcaagcattaccagccctatgccccaccacgcgacttcgcagcctatcgctccagagtgaagttcagcagaagcgccgacgcccctgcctaccagcagggacagaaccaactgtacaacgagctgaacctgggcagacgggaagagtacgacgtgctggacaagcggagaggcagggaccctgagatgggcggaaagccccagcggagaaagaacccccaggaaggactgtataacgaactccagaaagacaagatggccgaagcctacagcgagatcggcatgaagggcgagcggagaagaggcaagggccacgatggcctgtaccagggcctgagcaccgccaccaaggacacctatgacgccctgcacatgcaggccctgcctccaagaagggccaagcgatctggatctggagcaacaaacttctcactactcaaacaagcaggtgacgtggaggagaatcccgggcctactagtatggactggatttggcgcatccttttccttgtcggcgctgctaccggcgcccattcccagctccagttgcaagagagcggccctggcttggtaaaaccttccgagacccttagcctcacatgcacggttagtgggggcagcatttcctcaggtgattactattggggatggattcggcaacccccgggtaaaggattggagtggattggtcatatttattatagtggagcgacgtactacaacccaagtctcaaatccagggttacaatatccgtcgatacgagcaggaaccaattcagcttgaaactttctagtgtcaccgcagcagacacagccgtctattactgtacgcgggatgactccagtaattggcggtcccgagggcaagggacactggtcacggtctcctcatctggaggcggtggaagcggtggaggaggatctgaagtgcagctggttgaatctggcggaggactggttcagcctggcggatctctgagactgtcttgtgccgcctctggcttcgccagcgactactatatcatcggctggttcagacaggcccctggcaaagagagagagggcgtcagctgtatcagcagcagatacgccaacaccaactacgccgacagcgtgaagggcagattcaccatcagccgggacaacgccaagaacaccgtgtacctccagatgaacagcctgaagcctgaggacaccgccgtgtactactgtgccgccgacaccagaagatacacctgtcctgacattgccaccatgcaccggaacttcgattcttggggccagggcacactggtcaccgtttcttctggatccggcggcggaggatctggcggaggcggatctgggggcggaggctctttcgaacaagttcagcttcaacagcctggcgctgagctggtcaaacctggcgcttctgtgaagatgagctgcaaagccagcggctacgccttcagcagctactggatcaactggatgaagcagaaacccggccagggactcgaatggatcggccaaatctatcccggcgacggcgacaccaactacaacggcaagttcaagggcagagccacactgaccgccgatacctctagcagcacagcctacatgcagctgagcagcctgaccagcgaagatagcgccgtgtacttctgtgcccggtccatcacaacagtcgtgggctgcgctatggactattggggccagggaacaagcgtgaccgtgtctagtacgcgtgagcagaaactgatctcggaagaggatgggagcggcatccagaaccctgatcctgccgtgtaccagctgcgggatagcaagagcagcgacaagagcgtgtgtctgttcaccgacttcgacagccagaccaacgtgtcccagagcaaggactccgacgtgtacatcaccgataagaccgtgctggacatgcggagcatggacttcaagagcaactccgccgtggcctggtccaacaagtccgatttcgcctgcgccaacgccttcaacaacagcattatccccgaggacacattcttcccaagccccgagagcagctgcggtacccagagttttgggttgttggaccctaaattgtgctatctgttggacggaatcctgttcatttacggagtgatcctgaccgcattgttcctgaggagcaagcggtcacggctgctccacagcgattacatgaatatgacaccacgaagaccgggtcctactcgcaaacactaccaaccctacgcacctccccgcgactttgcagcgtaccgatctcgggttaagttttccagatccgcagacgcacccgcttaccaacaagggcagaaccaactctacaatgaacttaatttggggcggagggaagagtacgacgttctggacaaaaggaggggacgagatcccgagatgggcggaaagcctcagcgaaggaagaatccgcaagaggggctttataacgaactccagaaagataaaatggcagaagcctatagtgagattgggatgaagggagaaaggaggaggggtaaaggtcacgatgggttgtaccaaggattgagcacagccactaaagatacctatgatgcgctccacatgcaggccctgccgccaaga

SEQ ID NO: 6164 - DNA, 3495 bp, Artificial Sequence
  Synthetic Polynucloetide
atggccttaccagtgaccgccttgctcctgccgctggccttgctgctccacgccgccaggccggacatccagatgacacagagccctagcagcctgtctgccagcgtgggagacagagtgaccatcacatgcaaggccagcgaccacatcaacaactggctggcctggtatcagcagaagcctggacaggcccctaagctgctgatctacggcgctaccacactggaaacaggcgtgcccagcagattttctggcagcggctctggcaccgactacaccctgacaatatccagcctccagcctgaggacttcgccacctactactgtcagcagagctggaacaccccttggacattcggccagggcaccaagctggaaatcaagagactcgaggggaaaccaattcccaaccctcttctgggactggattcaaccggcagcggcgaggacctgaagaacgtgttcccacctgaggtggccgtgttcgagcctagcgaggccgagatcagccacacccagaaagccaccctcgtgtgcctggctaccggcttctaccccgaccatgtggaactgtcttggtgggtcaacggcaaagaggtgcacagcggcgtgtctaccgacccccagccactgaaagaacagcccgccctgaacgacagccggtactgcctgagcagcagactgagagtgtccgccaccttctggcagaacccccggaaccacttcagatgccaggtgcagttctacggcctgagcgagaacgacgagtggacccaggacagagccaagcccgtgacccagatcgtgtctgccgaagcctggggcagagccgattgcggatcccagagcttcggcctgctggaccccaagctgtgctacctgctggatggcatcctgttcatctacggcgtgatcctgaccgccctgttcctgagagtgaagttcagcagaagcgccgacgcccctgcctaccagcagggacagaaccaactgtacaacgagctgaacctgggcagacgggaagagtacgacgtgctggacaagcggagaggcagggaccctgagatgggcggaaagccccagcggagaaagaacccccaggaaggactgtataacgaactccagaaagacaagatggccgaagcctacagcgagatcggcatgaagggcgagcggagaagaggcaagggccacgatggcctgtaccagggcctgagcaccgccaccaaggacacctatgacgccctgcacatgcaggccctgcctccaagaagggccaagcgatctggatctggagcaacaaacttctcactactcaaacaagcaggtgacgtggaggagaatcccgggcctactagtatggactggatttggcgcatccttttccttgtcggcgctgctaccggcgcccattcccagctccagttgcaagagagcggccctggcttggtaaaaccttccgagacccttagcctcacatgcacggttagtgggggcagcatttcctcaggtgattactattggggatggattcggcaacccccgggtaaaggattggagtggattggtcatatttattatagtggagcgacgtactacaacccaagtctcaaatccagggttacaatatccgtcgatacgagcaggaaccaattcagcttgaaactttctagtgtcaccgcagcagacacagccgtctattactgtacgcgggatgactccagtaattggcggtcccgagggcaagggacactggtcacggtctcctcatctggaggcggtggaagcggtggaggaggatctgaagtgcagctggttgaatctggcggaggactggttcagcctggcggatctctgagactgtcttgtgccgcctctggcttcgccagcgactactatatcatcggctggttcagacaggcccctggcaaagagagagagggcgtcagctgtatcagcagcagatacgccaacaccaactacgccgacagcgtgaagggcagattcaccatcagccgggacaacgccaagaacaccgtgtacctccagatgaacagcctgaagcctgaggacaccgccgtgtactactgtgccgccgacaccagaagatacacctgtcctgacattgccaccatgcaccggaacttcgattcttggggccagggcacactggtcaccgtttcttctggatccggcggcggaggatctggcggaggcggatctgggggcggaggctctttcgaacaagttcagcttcaacagcctggcgctgagctggtcaaacctggcgcttctgtgaagatgagctgcaaagccagcggctacgccttcagcagctactggatcaactggatgaagcagaaacccggccagggactcgaatggatcggccaaatctatcccggcgacggcgacaccaactacaacggcaagttcaagggcagagccacactgaccgccgatacctctagcagcacagcctacatgcagctgagcagcctgaccagcgaagatagcgccgtgtacttctgtgcccggtccatcacaacagtcgtgggctgcgctatggactattggggccagggaacaagcgtgaccgtgtctagtacgcgtgagcagaaactgatctcggaagaggatctggggagcggcatccagaaccctgatcctgccgtgtaccagctgcgggatagcaagagcagcgacaagagcgtgtgtctgttcaccgacttcgacagccagaccaacgtgtcccagagcaaggactccgacgtgtacatcaccgataagaccgtgctggacatgcggagcatggacttcaagagcaactccgccgtggcctggtccaacaagtccgatttcgcctgcgccaacgccttcaacaacagcattatccccgaggacacattcttcccaagccccgagagcagctgcggtacccagagttttgggttgttggaccctaaattgtgctatctgttggacggaatcctgttcatttacggagtgatcctgaccgcattgttcctgaagagaggccggaagaagctgctgtacatcttcaagcagcctttcatgcggcccgtgcagaccacccaggaagaggacggctgctcctgccggttccccgaggaagaagaaggcggctgcgagctgcgggttaagttttccagatccgcagacgcacccgcttaccaacaagggcagaaccaactctacaatgaacttaatttggggcggagggaagagtacgacgttctggacaaaaggaggggacgagatcccgagatgggcggaaagcctcagcgaaggaagaatccgcaagaggggctttataacgaactccagaaagataaaatggcagaagcctatagtgagattgggatgaagggagaaaggaggaggggtaaaggtcacgatgggttgtaccaaggattgagcacagccactaaagatacctatgatgcgctccacatgcaggccctgccgccaaga

SEQ ID NO: 6165 - DNA, 3621 bp, Artificial Sequence
  Synthetic Polynucloetide
atggccttaccagtgaccgccttgctcctgccgctggccttgctgctccacgccgccaggccggacatccagatgacacagagccctagcagcctgtctgccagcgtgggagacagagtgaccatcacatgcaaggccagcgaccacatcaacaactggctggcctggtatcagcagaagcctggacaggcccctaagctgctgatctacggcgctaccacactggaaacaggcgtgcccagcagattttctggcagcggctctggcaccgactacaccctgacaatatccagcctccagcctgaggacttcgccacctactactgtcagcagagctggaacaccccttggacattcggccagggcaccaagctggaaatcaagagactcgaggggaaaccaattcccaaccctcttctgggactggattcaaccggcagcggcgaggacctgaagaacgtgttcccacctgaggtggccgtgttcgagcctagcgaggccgagatcagccacacccagaaagccaccctcgtgtgcctggctaccggcttctaccccgaccatgtggaactgtcttggtgggtcaacggcaaagaggtgcacagcggcgtgtctaccgacccccagccactgaaagaacagcccgccctgaacgacagccggtactgcctgagcagcagactgagagtgtccgccaccttctggcagaacccccggaaccacttcagatgccaggtgcagttctacggcctgagcgagaacgacgagtggacccaggacagagccaagcccgtgacccagatcgtgtctgccgaagcctggggcagagccgattgcggatcccagagcttcggcctgctggaccccaagctgtgctacctgctggatggcatcctgttcatctacggcgtgatcctgaccgccctgttcctgaaacggggcagaaagaaactcctgtatatattcaaacaaccatttatgagaccagtacaaactactcaagaggaagatggctgtagctgccgatttccagaagaagaagaaggaggatgtgaactgagagtgaagttcagcagaagcgccgacgcccctgcctaccagcagggacagaaccaactgtacaacgagctgaacctgggcagacgggaagagtacgacgtgctggacaagcggagaggcagggaccctgagatgggcggaaagccccagcggagaaagaacccccaggaaggactgtataacgaactccagaaagacaagatggccgaagcctacagcgagatcggcatgaagggcgagcggagaagaggcaagggccacgatggcctgtaccagggcctgagcaccgccaccaaggacacctatgacgccctgcacatgcaggccctgcctccaagaagggccaagcgatctggatctggagcaacaaacttctcactactcaaacaagcaggtgacgtggaggagaatcccgggcctactagtatggactggatttggcgcatccttttccttgtcggcgctgctaccggcgcccattcccagctccagttgcaagagagcggccctggcttggtaaaaccttccgagacccttagcctcacatgcacggttagtgggggcagcatttcctcaggtgattactattggggatggattcggcaacccccgggtaaaggattggagtggattggtcatatttattatagtggagcgacgtactacaacccaagtctcaaatccagggttacaatatccgtcgatacgagcaggaaccaattcagcttgaaactttctagtgtcaccgcagcagacacagccgtctattactgtacgcgggatgactccagtaattggcggtcccgagggcaagggacactggtcacggtctcctcatctggaggcggtggaagcggtggaggaggatctgaagtgcagctggttgaatctggcggaggactggttcagcctggcggatctctgagactgtcttgtgccgcctctggcttcgccagcgactactatatcatcggctggttcagacaggcccctggcaaagagagagagggcgtcagctgtatcagcagcagatacgccaacaccaactacgccgacagcgtgaagggcagattcaccatcagccgggacaacgccaagaacaccgtgtacctccagatgaacagcctgaagcctgaggacaccgccgtgtactactgtgccgccgacaccagaagatacacctgtcctgacattgccaccatgcaccggaacttcgattcttggggccagggcacactggtcaccgtttcttctggatccggcggcggaggatctggcggaggcggatctgggggcggaggctctttcgaacaagttcagcttcaacagcctggcgctgagctggtcaaacctggcgcttctgtgaagatgagctgcaaagccagcggctacgccttcagcagctactggatcaactggatgaagcagaaacccggccagggactcgaatggatcggccaaatctatcccggcgacggcgacaccaactacaacggcaagttcaagggcagagccacactgaccgccgatacctctagcagcacagcctacatgcagctgagcagcctgaccagcgaagatagcgccgtgtacttctgtgcccggtccatcacaacagtcgtgggctgcgctatggactattggggccagggaacaagcgtgaccgtgtctagtacgcgtgagcagaaactgatctcggaagaggatctggggagcggcatccagaaccctgatcctgccgtgtaccagctgcgggatagcaagagcagcgacaagagcgtgtgtctgttcaccgacttcgacagccagaccaacgtgtcccagagcaaggactccgacgtgtacatcaccgataagaccgtgctggacatgcggagcatggacttcaagagcaactccgccgtggcctggtccaacaagtccgatttcgcctgcgccaacgccttcaacaacagcattatccccgaggacacattcttcccaagccccgagagcagctgcggtacccagagttttgggttgttggaccctaaattgtgctatctgttggacggaatcctgttcatttacggagtgatcctgaccgcattgttcctgaagagaggccggaagaagctgctgtacatcttcaagcagcctttcatgcggcccgtgcagaccacccaggaagaggacggctgctcctgccggttccccgaggaagaagaaggcggctgcgagctgcgggttaagttttccagatccgcagacgcacccgcttaccaacaagggcagaaccaactctacaatgaacttaatttggggcggagggaagagtacgacgttctggacaaaaggaggggacgagatcccgagatgggcggaaagcctcagcgaaggaagaatccgcaagaggggctttataacgaactccagaaagataaaatggcagaagcctatagtgagattgggatgaagggagaaaggaggaggggtaaaggtcacgatgggttgtaccaaggattgagcacagccactaaagatacctatgatgcgctccacatgcaggccctgccgccaaga

SEQ ID NO: 6166 - DNA, 3294 bp, Artificial Sequence
  Synthetic Polynucloetide
atggccttaccagtgaccgccttgctcctgccgctggccttgctgctccacgccgccaggccggacatccagatgacacagagccctagcagcctgtctgccagcgtgggagacagagtgaccatcacatgcaaggccagcgaccacatcaacaactggctggcctggtatcagcagaagcctggacaggcccctaagctgctgatctacggcgctaccacactggaaacaggcgtgcccagcagattttctggcagcggctctggcaccgactacaccctgacaatatccagcctccagcctgaggacttcgccacctactactgtcagcagagctggaacaccccttggacattcggccagggcaccaagctggaaatcaagagactcgagcagagcttcggcctgctggaccccaagctgtgctacctgctggatggcatcctgttcatctacggcgtgatcctgaccgccctgttcctgagagtgaagttcagcagaagcgccgacgcccctgcctaccagcagggacagaaccaactgtacaacgagctgaacctgggcagacgggaagagtacgacgtgctggacaagcggagaggcagggaccctgagatgggcggaaagccccagcggagaaagaacccccaggaaggactgtataacgaactccagaaagacaagatggccgaagcctacagcgagatcggcatgaagggcgagcggagaagaggcaagggccacgatggcctgtaccagggcctgagcaccgccaccaaggacacctatgacgccctgcacatgcaggccctgcctccaagaagggccaagcgatctggatctggagcaacaaacttctcactactcaaacaagcaggtgacgtggaggagaatcccgggcctactagtatggactggatttggcgcatccttttccttgtcggcgctgctaccggcgcccattcccagctccagttgcaagagagcggccctggcttggtaaaaccttccgagacccttagcctcacatgcacggttagtgggggcagcatttcctcaggtgattactattggggatggattcggcaacccccgggtaaaggattggagtggattggtcatatttattatagtggagcgacgtactacaacccaagtctcaaatccagggttacaatatccgtcgatacgagcaggaaccaattcagcttgaaactttctagtgtcaccgcagcagacacagccgtctattactgtacgcgggatgactccagtaattggcggtcccgagggcaagggacactggtcacggtctcctcatctggaggcggtggaagcggtggaggaggatctgaagtgcagctggttgaatctggcggaggactggttcagcctggcggatctctgagactgtcttgtgccgcctctggcttcgccagcgactactatatcatcggctggttcagacaggcccctggcaaagagagagagggcgtcagctgtatcagcagcagatacgccaacaccaactacgccgacagcgtgaagggcagattcaccatcagccgggacaacgccaagaacaccgtgtacctccagatgaacagcctgaagcctgaggacaccgccgtgtactactgtgccgccgacaccagaagatacacctgtcctgacattgccaccatgcaccggaacttcgattcttggggccagggcacactggtcaccgtttcttctggatccggcggcggaggatctggcggaggcggatctgggggcggaggctctttcgaacaagttcagcttcaacagcctggcgctgagctggtcaaacctggcgcttctgtgaagatgagctgcaaagccagcggctacgccttcagcagctactggatcaactggatgaagcagaaacccggccagggactcgaatggatcggccaaatctatcccggcgacggcgacaccaactacaacggcaagttcaagggcagagccacactgaccgccgatacctctagcagcacagcctacatgcagctgagcagcctgaccagcgaagatagcgccgtgtacttctgtgcccggtccatcacaacagtcgtgggctgcgctatggactattggggccagggaacaagcgtgaccgtgtctagtacgcgtcagagttttgggttgttggaccctaaattgtgctatctgttggacggaatcctgttcatttacggagtgatcctgaccgcattgttcctgcgggttaagttttccagatccgcagacgcacccgcttaccaacaagggcagaaccaactctacaatgaacttaatttggggcggagggaagagtacgacgttctggacaaaaggaggggacgagatcccgagatgggcggaaagcctcagcgaaggaagaatccgcaagaggggctttataacgaactccagaaagataaaatggcagaagcctatagtgagattgggatgaagggagaaaggaggaggggtaaaggtcacgatgggttgtaccaaggattgagcacagccactaaagatacctatgatgcgctccacatgcaggccctgccgccaagacgcgccaagagaagcggatctggcgtgaagcagaccctgaatttcgacctgctgaagctggctggcgacgtggaatccaacccaggcccttctagaggccatatgaccgagtacaagcccacggtgcgcctcgccacccgcgacgacgtccccagggccgtacgcaccctcgccgccgcgttcgccgactaccccgccacgcgccacaccgtcgatccggaccgccacatcgagcgggtcaccgagctgcaagaactcttcctcacgcgcgtcgggctcgacatcggcaaggtgtgggtcgcggacgacggcgccgcggtggcggtctggaccacgccggagagcgtcgaagcgggggcggtgttcgccgagatcggcccgcgcatggccgagttgagcggttcccggctggccgcgcagcaacagatggaaggcctcctggcgccgcaccggcccaaggagcccgcgtggttcctggccaccgtcggcgtctcgcccgaccaccagggcaagggtctgggcagcgccgtcgtgctccccggagtggaggcggccgagcgcgccggggtgcccgccttcctggagacctccgcgccccgcaacctccccttctacgagcggctcggcttcaccgtcaccgccgacgtcgaggtgcccgaaggaccgcgcacctggtgcatgacccgcaagcccggtgcctga

SEQ ID NO: 6167 - DNA, 2766 bp, Artificial Sequence
  Synthetic Polynucloetide
atggccttaccagtgaccgccttgctcctgccgctggccttgctgctccacgccgccaggccggacatccagatgacacagagccctagcagcctgtctgccagcgtgggagacagagtgaccatcacatgcaaggccagcgaccacatcaacaactggctggcctggtatcagcagaagcctggacaggcccctaagctgctgatctacggcgctaccacactggaaacaggcgtgcccagcagattttctggcagcggctctggcaccgactacaccctgacaatatccagcctccagcctgaggacttcgccacctactactgtcagcagagctggaacaccccttggacattcggccagggcaccaagctggaaatcaagagactcgagggacagcctaaggccaatcctaccgtgacactgttccctccaagcagcgaagaactccaggccaacaaggccacacttgtgtgcctgatctccgacttctaccctggggctgtgacagtggcttggaaggccgatggatctcctgtgaaagccggcgtggaaaccaccaagccatccaagcagagcaacaacaaatacgccgccagctcctacctgagcctgacacctgagcagtggaagtcccacagatcctacagctgccaagtgacccacgaaggcagcaccgtggaaaagacagtggcccctacagagtgcagccccatcaagaccgatgtgattacaatggaccccaaggacaactgctccaaggacgccaacgataccctgctgctccagctgaccaacaccagcgcctactacatgtacttgttgctgctgctgaagtccgtggtgtacttcgccatcatcacatgctgcctgctgcggagaaccgccttctgctgcaacggcgagaagtctagggccaagcgatctggatctggagcaacaaacttctcactactcaaacaagcaggtgacgtggaggagaatcccgggcctactagtatggactggatttggcgcatccttttccttgtcggcgctgctaccggcgcccattcccagctccagttgcaagagagcggccctggcttggtaaaaccttccgagacccttagcctcacatgcacggttagtgggggcagcatttcctcaggtgattactattggggatggattcggcaacccccgggtaaaggattggagtggattggtcatatttattatagtggagcgacgtactacaacccaagtctcaaatccagggttacaatatccgtcgatacgagcaggaaccaattcagcttgaaactttctagtgtcaccgcagcagacacagccgtctattactgtacgcgggatgactccagtaattggcggtcccgagggcaagggacactggtcacggtctcctcatctggaggcggtggaagcggtggaggaggatctgaagtgcagctggttgaatctggcggaggactggttcagcctggcggatctctgagactgtcttgtgccgcctctggcttcgccagcgactactatatcatcggctggttcagacaggcccctggcaaagagagagagggcgtcagctgtatcagcagcagatacgccaacaccaactacgccgacagcgtgaagggcagattcaccatcagccgggacaacgccaagaacaccgtgtacctccagatgaacagcctgaagcctgaggacaccgccgtgtactactgtgccgccgacaccagaagatacacctgtcctgacattgccaccatgcaccggaacttcgattcttggggccagggcacactggtcaccgtttcttctggatccggcggcggaggatctggcggaggcggatctgggggcggaggctctttcgaacaagttcagcttcaacagcctggcgctgagctggtcaaacctggcgcttctgtgaagatgagctgcaaagccagcggctacgccttcagcagctactggatcaactggatgaagcagaaacccggccagggactcgaatggatcggccaaatctatcccggcgacggcgacaccaactacaacggcaagttcaagggcagagccacactgaccgccgatacctctagcagcacagcctacatgcagctgagcagcctgaccagcgaagatagcgccgtgtacttctgtgcccggtccatcacaacagtcgtgggctgcgctatggactattggggccagggaacaagcgtgaccgtgtctagtacgcgtgcctctacaaagggaccctccgtgtttcctctggctcccagcagcaagtctacaagcggaggaacagccgctctgggctgcctggtcaaggattactttcccgagcctgtgaccgtgtcctggaatagcggagcactgacaagcggcgtgcacacctttccagccgtgctgcaaagcagcggcctgtactctctgagcagcgtggtcacagtgcctagctctagcctgggcacccagacctacatctgcaatgtgaaccacaagcctagcaacaccaaggtggacaagagagtggaacccaagagctgtgaagtgaaaaccgactccaccgaccacgtgaagcccaaagagacagagaacaccaagcagcccagcaagagctgccacaagcccaaggccatcgtgcacaccgagaaagtgaacatgatgagcctgaccgtgctgggcctgcggatgctgttcgccaaaaccgtggccgtgaacttcctgctgaccgccaagctgttcttcctc

SEQ ID NO: 6168 - DNA, 2700 bp, Artificial Sequence
  Synthetic Polynucloetide
atggccttaccagtgaccgccttgctcctgccgctggccttgctgctccacgccgccaggccggacatccagatgacacagagccctagcagcctgtctgccagcgtgggagacagagtgaccatcacatgcaaggccagcgaccacatcaacaactggctggcctggtatcagcagaagcctggacaggcccctaagctgctgatctacggcgctaccacactggaaacaggcgtgcccagcagattttctggcagcggctctggcaccgactacaccctgacaatatccagcctccagcctgaggacttcgccacctactactgtcagcagagctggaacaccccttggacattcggccagggcaccaagctggaaatcaagagactcgagggacagcctaaggccaatcctaccgtgacactgttccctccaagcagcgaagaactccaggccaacaaggccacacttgtgtgcctgatctccgacttctaccctggggctgtgacagtggcttggaaggccgatggatctcctgtgaaagccggcgtggaaaccaccaagccatccaagcagagcaacaacaaatacgccgccagctcctacctgagcctgacacctgagcagtggaagtcccacagatcctacagctgccaagtgacccacgaaggcagcaccgtggaaaagacagtggcccctacagagtgcagcggcagagccgattgcggcatcaccagcgccagctaccaccagggcgtgctgagcgccaccatcctgtacgagatcctgctgggcaaggccaccctgtacgccgtgctggtgtctgccctggtgctgatggctatggtcaagcggaaggacagccggggaagggccaagcgatctggatctggagcaacaaacttctcactactcaaacaagcaggtgacgtggaggagaatcccgggcctactagtatggactggatttggcgcatccttttccttgtcggcgctgctaccggcgcccattcccagctccagttgcaagagagcggccctggcttggtaaaaccttccgagacccttagcctcacatgcacggttagtgggggcagcatttcctcaggtgattactattggggatggattcggcaacccccgggtaaaggattggagtggattggtcatatttattatagtggagcgacgtactacaacccaagtctcaaatccagggttacaatatccgtcgatacgagcaggaaccaattcagcttgaaactttctagtgtcaccgcagcagacacagccgtctattactgtacgcgggatgactccagtaattggcggtcccgagggcaagggacactggtcacggtctcctcatctggaggcggtggaagcggtggaggaggatctgaagtgcagctggttgaatctggcggaggactggttcagcctggcggatctctgagactgtcttgtgccgcctctggcttcgccagcgactactatatcatcggctggttcagacaggcccctggcaaagagagagagggcgtcagctgtatcagcagcagatacgccaacaccaactacgccgacagcgtgaagggcagattcaccatcagccgggacaacgccaagaacaccgtgtacctccagatgaacagcctgaagcctgaggacaccgccgtgtactactgtgccgccgacaccagaagatacacctgtcctgacattgccaccatgcaccggaacttcgattcttggggccagggcacactggtcaccgtttcttctggatccggcggcggaggatctggcggaggcggatctgggggcggaggctctttcgaacaagttcagcttcaacagcctggcgctgagctggtcaaacctggcgcttctgtgaagatgagctgcaaagccagcggctacgccttcagcagctactggatcaactggatgaagcagaaacccggccagggactcgaatggatcggccaaatctatcccggcgacggcgacaccaactacaacggcaagttcaagggcagagccacactgaccgccgatacctctagcagcacagcctacatgcagctgagcagcctgaccagcgaagatagcgccgtgtacttctgtgcccggtccatcacaacagtcgtgggctgcgctatggactattggggccagggaacaagcgtgaccgtgtctagtacgcgtgcctctacaaagggaccctccgtgtttcctctggctcccagcagcaagtctacaagcggaggaacagccgctctgggctgcctggtcaaggattactttcccgagcctgtgaccgtgtcctggaatagcggagcactgacaagcggcgtgcacacctttccagccgtgctgcaaagcagcggcctgtactctctgagcagcgtggtcacagtgcctagctctagcctgggcacccagacctacatctgcaatgtgaaccacaagcctagcaacaccaaggtggacaagagagtggaacccaagagctgtatccccgaggacacattcttcccaagcagcgacgtgccctgcgacgtgaagctggtggaaaagagcttcgagacagacaccaacctgaacttccagaacctgagcgtgatcggcttcagaatcctgctgctgaaagtggccggctttaacctgctgatgaccctgcggctgtggtccagc

SEQ ID NO: 6169 - DNA, 2700 bp, Artificial Sequence
  Synthetic Polynucloetide
atggccttaccagtgaccgccttgctcctgccgctggccttgctgctccacgccgccaggccggacatccagatgacacagagccctagcagcctgtctgccagcgtgggagacagagtgaccatcacatgcaaggccagcgaccacatcaacaactggctggcctggtatcagcagaagcctggacaggcccctaagctgctgatctacggcgctaccacactggaaacaggcgtgcccagcagattttctggcagcggctctggcaccgactacaccctgacaatatccagcctccagcctgaggacttcgccacctactactgtcagcagagctggaacaccccttggacattcggccagggcaccaagctggaaatcaagagactcgagggacagcctaaggccaatcctaccgtgacactgttccctccaagcagcgaagaactccaggccaacaaggccacacttgtgtgcctgatctccgacttctaccctggggctgtgacagtggcttggaaggccgatggatctcctgtgaaagccggcgtggaaaccaccaagccatccaagcagagcaacaacaaatacgccgccagctcctacctgagcctgacacctgagcagtggaagtcccacagatcctacagctgccaagtgacccacgaaggcagcaccgtggaaaagacagtggcccctacagagtgcagcggcagagccgattgcggctttaccagcgagagctaccagcagggcgtgctgagcgccaccatcctgtacgagatcctgctgggcaaggccaccctgtacgccgtgctggtgtctgccctggtgctgatggctatggtcaagcggaaggacagccggggaagggccaagcgatctggatctggagcaacaaacttctcactactcaaacaagcaggtgacgtggaggagaatcccgggcctactagtatggactggatttggcgcatccttttccttgtcggcgctgctaccggcgcccattcccagctccagttgcaagagagcggccctggcttggtaaaaccttccgagacccttagcctcacatgcacggttagtgggggcagcatttcctcaggtgattactattggggatggattcggcaacccccgggtaaaggattggagtggattggtcatatttattatagtggagcgacgtactacaacccaagtctcaaatccagggttacaatatccgtcgatacgagcaggaaccaattcagcttgaaactttctagtgtcaccgcagcagacacagccgtctattactgtacgcgggatgactccagtaattggcggtcccgagggcaagggacactggtcacggtctcctcatctggaggcggtggaagcggtggaggaggatctgaagtgcagctggttgaatctggcggaggactggttcagcctggcggatctctgagactgtcttgtgccgcctctggcttcgccagcgactactatatcatcggctggttcagacaggcccctggcaaagagagagagggcgtcagctgtatcagcagcagatacgccaacaccaactacgccgacagcgtgaagggcagattcaccatcagccgggacaacgccaagaacaccgtgtacctccagatgaacagcctgaagcctgaggacaccgccgtgtactactgtgccgccgacaccagaagatacacctgtcctgacattgccaccatgcaccggaacttcgattcttggggccagggcacactggtcaccgtttcttctggatccggcggcggaggatctggcggaggcggatctgggggcggaggctctttcgaacaagttcagcttcaacagcctggcgctgagctggtcaaacctggcgcttctgtgaagatgagctgcaaagccagcggctacgccttcagcagctactggatcaactggatgaagcagaaacccggccagggactcgaatggatcggccaaatctatcccggcgacggcgacaccaactacaacggcaagttcaagggcagagccacactgaccgccgatacctctagcagcacagcctacatgcagctgagcagcctgaccagcgaagatagcgccgtgtacttctgtgcccggtccatcacaacagtcgtgggctgcgctatggactattggggccagggaacaagcgtgaccgtgtctagtacgcgtgcctctacaaagggaccctccgtgtttcctctggctcccagcagcaagtctacaagcggaggaacagccgctctgggctgcctggtcaaggattactttcccgagcctgtgaccgtgtcctggaatagcggagcactgacaagcggcgtgcacacctttccagccgtgctgcaaagcagcggcctgtactctctgagcagcgtggtcacagtgcctagctctagcctgggcacccagacctacatctgcaatgtgaaccacaagcctagcaacaccaaggtggacaagagagtggaacccaagagctgtatccccgaggacacattcttcccaagccccgagagcagctgcgacgtgaagctggtggaaaagagcttcgagacagacaccaacctgaacttccagaacctgagcgtgatcggcttcagaatcctgctgctgaaagtggccggctttaacctgctgatgaccctgcggctgtggtccagc

SEQ ID NO: 6170 - DNA, 2190 bp, Artificial Sequence
  Synthetic Polynucloetide
atggactggatttggcgcatccttttccttgtcggcgctgctaccggcgcccattcccagctccagttgcaagagagcggccctggcttggtaaaaccttccgagacccttagcctcacatgcacggttagtgggggcagcatttcctcaggtgattactattggggatggattcggcaacccccgggtaaaggattggagtggattggtcatatttattatagtggagcgacgtactacaacccaagtctcaaatccagggttacaatatccgtcgatacgagcaggaaccaattcagcttgaaactttctagtgtcaccgcagcagacacagccgtctattactgtacgcgggatgactccagtaattggcggtcccgagggcaagggacactggtcacggtctcctcatctggaggcggtggaagcggtggaggaggatctgaagtgcagctggttgaatctggcggaggactggttcagcctggcggatctctgagactgtcttgtgccgcctctggcttcgccagcgactactatatcatcggctggttcagacaggcccctggcaaagagagagagggcgtcagctgtatcagcagcagatacgccaacaccaactacgccgacagcgtgaagggcagattcaccatcagccgggacaacgccaagaacaccgtgtacctccagatgaacagcctgaagcctgaggacaccgccgtgtactactgtgccgccgacaccagaagatacacctgtcctgacattgccaccatgcaccggaacttcgattcttggggccagggcacactggtcaccgtttcttctggatccggcggcggaggatctggcggaggcggatctgggggcggaggctctttcgaacaagttcagcttcaacagcctggcgctgagctggtcaaacctggcgcttctgtgaagatgagctgcaaagccagcggctacgccttcagcagctactggatcaactggatgaagcagaaacccggccagggactcgaatggatcggccaaatctatcccggcgacggcgacaccaactacaacggcaagttcaagggcagagccacactgaccgccgatacctctagcagcacagcctacatgcagctgagcagcctgaccagcgaagatagcgccgtgtacttctgtgcccggtccatcacaacagtcgtgggctgcgctatggactattggggccagggaacaagcgtgaccgtgtctagtggcggaggcggaagtggaggcggaggatctggcggcggaggctctgacatccagatgacacagagccctagcagcctgtctgccagcgtgggagacagagtgaccatcacatgcaaggccagcgaccacatcaacaactggctggcctggtatcagcagaagcctggacaggcccctaagctgctgatctacggcgctaccacactggaaacaggcgtgcccagcagattttctggcagcggctctggcaccgactacaccctgacaatatccagcctccagcctgaggacttcgccacctactactgtcagcagagctggaacaccccttggacattcggccagggcaccaagctggaaatcaagagaacgcgtggcggaggcagcgacggtaacgaggagatgggaggaatcactcaaaccccttacaaagtctcaatttcaggaacaactgttatccttacatgtccccagtatcctggcagcgagatcctttggcagcataacgacaagaatatagggggagatgaagacgataagaatatcggatctgacgaggatcacttgagcctgaaagagttctccgagcttgaacaaagcggatattatgtgtgctatccgcgcgggtcaaagccggaagacgctaacttttacctttatctccgagccagagtgtgcgaaaattgcatggaaatggacgttatgtccgttgctacaatagttatcgtagatatatgcatcacgggtggactgcttctgctggtttattattggtccaagaatagaaaggccaaagctaaacccgtgaccagaggcgctggcgcaggcggaaggcaaaggggacaaaacaaagaacggccaccaccagtgccaaatccagattatgagcctattcggaaaggacagagggacctgtactctggcctgaatcagagaagaatc

SEQ ID NO: 6171 - DNA, 2085 bp, Artificial Sequence
  Synthetic Polynucloetide
atggactggatttggcgcatccttttccttgtcggcgctgctaccggcgcccattcccagctccagttgcaagagagcggccctggcttggtaaaaccttccgagacccttagcctcacatgcacggttagtgggggcagcatttcctcaggtgattactattggggatggattcggcaacccccgggtaaaggattggagtggattggtcatatttattatagtggagcgacgtactacaacccaagtctcaaatccagggttacaatatccgtcgatacgagcaggaaccaattcagcttgaaactttctagtgtcaccgcagcagacacagccgtctattactgtacgcgggatgactccagtaattggcggtcccgagggcaagggacactggtcacggtctcctcatctggaggcggtggaagcggtggaggaggatctgaagtgcagctggttgaatctggcggaggactggttcagcctggcggatctctgagactgtcttgtgccgcctctggcttcgccagcgactactatatcatcggctggttcagacaggcccctggcaaagagagagagggcgtcagctgtatcagcagcagatacgccaacaccaactacgccgacagcgtgaagggcagattcaccatcagccgggacaacgccaagaacaccgtgtacctccagatgaacagcctgaagcctgaggacaccgccgtgtactactgtgccgccgacaccagaagatacacctgtcctgacattgccaccatgcaccggaacttcgattcttggggccagggcacactggtcaccgtttcttctggatccggcggcggaggatctggcggaggcggatctgggggcggaggctctttcgaacaagttcagcttcaacagcctggcgctgagctggtcaaacctggcgcttctgtgaagatgagctgcaaagccagcggctacgccttcagcagctactggatcaactggatgaagcagaaacccggccagggactcgaatggatcggccaaatctatcccggcgacggcgacaccaactacaacggcaagttcaagggcagagccacactgaccgccgatacctctagcagcacagcctacatgcagctgagcagcctgaccagcgaagatagcgccgtgtacttctgtgcccggtccatcacaacagtcgtgggctgcgctatggactattggggccagggaacaagcgtgaccgtgtctagtggcggaggcggaagtggaggcggaggatctggcggcggaggctctgacatccagatgacacagagccctagcagcctgtctgccagcgtgggagacagagtgaccatcacatgcaaggccagcgaccacatcaacaactggctggcctggtatcagcagaagcctggacaggcccctaagctgctgatctacggcgctaccacactggaaacaggcgtgcccagcagattttctggcagcggctctggcaccgactacaccctgacaatatccagcctccagcctgaggacttcgccacctactactgtcagcagagctggaacaccccttggacattcggccagggcaccaagctggaaatcaagagaacgcgtggcggaggcagcttcaagatccccatcgaggaactggaagatcgggtgttcgtgaactgcaacacctctatcacctgggtggaaggcaccgtgggaacactgctgagcgacatcaccagactggacctcggcaagcggattctggaccctcggggcatctacagatgcaacggcaccgacatctacaaggacaaagaaagcaccgtgcaggtccactacagaatgtgccagtcctgcgtggaactggaccctgctacagtggccggcatcatcgtgaccgatgtgatcgctactctgctgctggctctgggagtgttctgcttcgccggacacgaaacaggcagactgtctggcgctgccgatacacaggccctgctgagaaacgaccaagtgtatcagcccctgcgcgacagagatgatgcccagtattctcacctcggcggcaactgggctagaaacaag

SEQ ID NO: 6172 - DNA, 2115 bp, Artificial Sequence
  Synthetic Polynucloetide
atggactggatttggcgcatccttttccttgtcggcgctgctaccggcgcccattcccagctccagttgcaagagagcggccctggcttggtaaaaccttccgagacccttagcctcacatgcacggttagtgggggcagcatttcctcaggtgattactattggggatggattcggcaacccccgggtaaaggattggagtggattggtcatatttattatagtggagcgacgtactacaacccaagtctcaaatccagggttacaatatccgtcgatacgagcaggaaccaattcagcttgaaactttctagtgtcaccgcagcagacacagccgtctattactgtacgcgggatgactccagtaattggcggtcccgagggcaagggacactggtcacggtctcctcatctggaggcggtggaagcggtggaggaggatctgaagtgcagctggttgaatctggcggaggactggttcagcctggcggatctctgagactgtcttgtgccgcctctggcttcgccagcgactactatatcatcggctggttcagacaggcccctggcaaagagagagagggcgtcagctgtatcagcagcagatacgccaacaccaactacgccgacagcgtgaagggcagattcaccatcagccgggacaacgccaagaacaccgtgtacctccagatgaacagcctgaagcctgaggacaccgccgtgtactactgtgccgccgacaccagaagatacacctgtcctgacattgccaccatgcaccggaacttcgattcttggggccagggcacactggtcaccgtttcttctggatccggcggcggaggatctggcggaggcggatctgggggcggaggctctttcgaacaagttcagcttcaacagcctggcgctgagctggtcaaacctggcgcttctgtgaagatgagctgcaaagccagcggctacgccttcagcagctactggatcaactggatgaagcagaaacccggccagggactcgaatggatcggccaaatctatcccggcgacggcgacaccaactacaacggcaagttcaagggcagagccacactgaccgccgatacctctagcagcacagcctacatgcagctgagcagcctgaccagcgaagatagcgccgtgtacttctgtgcccggtccatcacaacagtcgtgggctgcgctatggactattggggccagggaacaagcgtgaccgtgtctagtggcggaggcggaagtggaggcggaggatctggcggcggaggctctgacatccagatgacacagagccctagcagcctgtctgccagcgtgggagacagagtgaccatcacatgcaaggccagcgaccacatcaacaactggctggcctggtatcagcagaagcctggacaggcccctaagctgctgatctacggcgctaccacactggaaacaggcgtgcccagcagattttctggcagcggctctggcaccgactacaccctgacaatatccagcctccagcctgaggacttcgccacctactactgtcagcagagctggaacaccccttggacattcggccagggcaccaagctggaaatcaagagaacgcgtggcggaggcagccagagcatcaagggcaaccacctggtcaaggtgtacgactaccaagaggacggcagcgtgctgctgacatgtgatgccgaggccaagaacatcacctggtttaaggacggcaagatgatcggcttcctgaccgaggacaagaagaagtggaacctgggcagcaacgctaaggaccccagaggcatgtatcagtgcaagggcagccagaacaagagcaagcccctccaggtgtactaccggatgtgccagaactgcatcgagctgaacgccgctaccatcagcggctttctgttcgccgagatcgtgtccatcttcgtgctggccgtgggcgtgtactttatcgctggacaggatggcgtgcggcagagcagagcttccgataagcaaaccctgctgcctaacgaccagctgtaccagcctctgaaggacagagaggacgaccagtacagccacctccagggcaatcagctgagaagaaac

SEQ ID NO: 6173 - DNA, 2064 bp, Artificial Sequence
  Synthetic Polynucloetide
atggactggatttggcgcatccttttccttgtcggcgctgctaccggcgcccattcccagctccagttgcaagagagcggccctggcttggtaaaaccttccgagacccttagcctcacatgcacggttagtgggggcagcatttcctcaggtgattactattggggatggattcggcaacccccgggtaaaggattggagtggattggtcatatttattatagtggagcgacgtactacaacccaagtctcaaatccagggttacaatatccgtcgatacgagcaggaaccaattcagcttgaaactttctagtgtcaccgcagcagacacagccgtctattactgtacgcgggatgactccagtaattggcggtcccgagggcaagggacactggtcacggtctcctcatctggaggcggtggaagcggtggaggaggatctgaagtgcagctggttgaatctggcggaggactggttcagcctggcggatctctgagactgtcttgtgccgcctctggcttcgccagcgactactatatcatcggctggttcagacaggcccctggcaaagagagagagggcgtcagctgtatcagcagcagatacgccaacaccaactacgccgacagcgtgaagggcagattcaccatcagccgggacaacgccaagaacaccgtgtacctccagatgaacagcctgaagcctgaggacaccgccgtgtactactgtgccgccgacaccagaagatacacctgtcctgacattgccaccatgcaccggaacttcgattcttggggccagggcacactggtcaccgtttcttctggatccggcggcggaggatctggcggaggcggatctgggggcggaggctctttcgaacaagttcagcttcaacagcctggcgctgagctggtcaaacctggcgcttctgtgaagatgagctgcaaagccagcggctacgccttcagcagctactggatcaactggatgaagcagaaacccggccagggactcgaatggatcggccaaatctatcccggcgacggcgacaccaactacaacggcaagttcaagggcagagccacactgaccgccgatacctctagcagcacagcctacatgcagctgagcagcctgaccagcgaagatagcgccgtgtacttctgtgcccggtccatcacaacagtcgtgggctgcgctatggactattggggccagggaacaagcgtgaccgtgtctagtggcggaggcggaagtggaggcggaggatctggcggcggaggctctgacatccagatgacacagagccctagcagcctgtctgccagcgtgggagacagagtgaccatcacatgcaaggccagcgaccacatcaacaactggctggcctggtatcagcagaagcctggacaggcccctaagctgctgatctacggcgctaccacactggaaacaggcgtgcccagcagattttctggcagcggctctggcaccgactacaccctgacaatatccagcctccagcctgaggacttcgccacctactactgtcagcagagctggaacaccccttggacattcggccagggcaccaagctggaaatcaagagaacgcgtggcggaggcagccagagttttgggttgttggaccctaaattgtgctatctgttggacggaatcctgttcatttacggagtgatcctgaccgcattgttcctgcgggttaagttttccagatccgcagacgcacccgcttaccaacaagggcagaaccaactctacaatgaacttaatttggggcggagggaagagtacgacgttctggacaaaaggaggggacgagatcccgagatgggcggaaagcctcagcgaaggaagaatccgcaagaggggctttataacgaactccagaaagataaaatggcagaagcctatagtgagattgggatgaagggagaaaggaggaggggtaaaggtcacgatgggttgtaccaaggattgagcacagccactaaagatacctatgatgcgctccacatgcaggccctgccgccaaga

SEQ ID NO: 6174 - DNA, 2175 bp, Artificial Sequence
  Synthetic Polynucloetide
atggactggatttggcgcatccttttccttgtcggcgctgctaccggcgcccattcccagctccagttgcaagagagcggccctggcttggtaaaaccttccgagacccttagcctcacatgcacggttagtgggggcagcatttcctcaggtgattactattggggatggattcggcaacccccgggtaaaggattggagtggattggtcatatttattatagtggagcgacgtactacaacccaagtctcaaatccagggttacaatatccgtcgatacgagcaggaaccaattcagcttgaaactttctagtgtcaccgcagcagacacagccgtctattactgtacgcgggatgactccagtaattggcggtcccgagggcaagggacactggtcacggtctcctcatctggaggcggtggaagcggtggaggaggatctgaagtgcagctggttgaatctggcggaggactggttcagcctggcggatctctgagactgtcttgtgccgcctctggcttcgccagcgactactatatcatcggctggttcagacaggcccctggcaaagagagagagggcgtcagctgtatcagcagcagatacgccaacaccaactacgccgacagcgtgaagggcagattcaccatcagccgggacaacgccaagaacaccgtgtacctccagatgaacagcctgaagcctgaggacaccgccgtgtactactgtgccgccgacaccagaagatacacctgtcctgacattgccaccatgcaccggaacttcgattcttggggccagggcacactggtcaccgtttcttctggatccggcggcggaggatctggcggaggcggatctgggggcggaggctctttcgaacaagttcagcttcaacagcctggcgctgagctggtcaaacctggcgcttctgtgaagatgagctgcaaagccagcggctacgccttcagcagctactggatcaactggatgaagcagaaacccggccagggactcgaatggatcggccaaatctatcccggcgacggcgacaccaactacaacggcaagttcaagggcagagccacactgaccgccgatacctctagcagcacagcctacatgcagctgagcagcctgaccagcgaagatagcgccgtgtacttctgtgcccggtccatcacaacagtcgtgggctgcgctatggactattggggccagggaacaagcgtgaccgtgtctagtacgcgtatccagaaccctgatcctgccgtgtaccagctgcgggatagcaagagcagcgacaagagcgtgtgtctgttcaccgacttcgacagccagaccaacgtgtcccagagcaaggactccgacgtgtacatcaccgataagaccgtgctggacatgcggagcatggacttcaagagcaactccgccgtggcctggtccaacaagtccgatttcgcctgcgccaacgccttcaacaacagcattatccccgaggacacattcttcccaagccccgagagcagctgcgacgtgaagctggtggaaaagagcttcgagacagacaccaacctgaacttccagaacctgagcgtgatcggcttcagaatcctgctgctgaaagtggccggctttaacctgctgatgaccctgcggctgtggtccagccgcgccaagagaagcggatctggcgtgaagcagaccctgaatttcgacctgctgaagctggctggcgacgtggaatccaacccaggcccttctagaggccatatggccaagcctttgtctcaagaagaatccaccctcattgaaagagcaacggctacaatcaacagcatccccatctctgaagactacagcgtcgccagcgcagctctctctagcgacggccgcatcttcactggtgtcaatgtatatcattttactgggggaccttgtgcagaactcgtggtgctgggcactgctgctgctgcggcagctggcaacctgacttgtatcgtcgcgatcggaaatgagaacaggggcatcttgagcccctgcggacggtgccgacaggtgcttctcgatctgcatcctgggatcaaagccatagtgaaggacagtgatggacagccgacggcagttgggattcgtgaattgctgccctctggttatgtgtgggagggctga

SEQ ID NO: 6175 - DNA, 1674 bp, Artificial Sequence
  Synthetic Polynucloetide
atggactggatttggcgcatccttttccttgtcggcgctgctaccggcgcccattcccagctccagttgcaagagagcggccctggcttggtaaaaccttccgagacccttagcctcacatgcacggttagtgggggcagcatttcctcaggtgattactattggggatggattcggcaacccccgggtaaaggattggagtggattggtcatatttattatagtggagcgacgtactacaacccaagtctcaaatccagggttacaatatccgtcgatacgagcaggaaccaattcagcttgaaactttctagtgtcaccgcagcagacacagccgtctattactgtacgcgggatgactccagtaattggcggtcccgagggcaagggacactggtcacggtctcctcatctggaggcggtggaagcggtggaggaggatctgaagtgcagctggttgaatctggcggaggactggttcagcctggcggatctctgagactgtcttgtgccgcctctggcttcgccagcgactactatatcatcggctggttcagacaggcccctggcaaagagagagagggcgtcagctgtatcagcagcagatacgccaacaccaactacgccgacagcgtgaagggcagattcaccatcagccgggacaacgccaagaacaccgtgtacctccagatgaacagcctgaagcctgaggacaccgccgtgtactactgtgccgccgacaccagaagatacacctgtcctgacattgccaccatgcaccggaacttcgattcttggggccagggcacactggtcaccgtttcttctggatccggcggcggaggatctggcggaggcggatctgggggcggaggctctttcgaacaagttcagcttcaacagcctggcgctgagctggtcaaacctggcgcttctgtgaagatgagctgcaaagccagcggctacgccttcagcagctactggatcaactggatgaagcagaaacccggccagggactcgaatggatcggccaaatctatcccggcgacggcgacaccaactacaacggcaagttcaagggcagagccacactgaccgccgatacctctagcagcacagcctacatgcagctgagcagcctgaccagcgaagatagcgccgtgtacttctgtgcccggtccatcacaacagtcgtgggctgcgctatggactattggggccagggaacaagcgtgaccgtgtctagtacgcgtatccagaaccctgatcctgccgtgtaccagctgcgggatagcaagagcagcgacaagagcgtgtgtctgttcaccgacttcgacagccagaccaacgtgtcccagagcaaggactccgacgtgtacatcaccgataagaccgtgctggacatgcggagcatggacttcaagagcaactccgccgtggcctggtccaacaagtccgatttcgcctgcgccaacgccttcaacaacagcattatccccgaggacacattcttcccaagccccgagagcagctgcgacgtgaagctggtggaaaagagcttcgagacagacaccaacctgaacttccagaacctgagcgtgatcggcttcagaatcctgctgctgaaagtggccggctttaacctgctgatgaccctgcggctgtggtccagc

SEQ ID NO: 6176 - DNA, 2211 bp, Artificial Sequence
  Synthetic Polynucloetide
atggactggatttggcgcatccttttccttgtcggcgctgctaccggcgcccattcccagctccagttgcaagagagcggccctggcttggtaaaaccttccgagacccttagcctcacatgcacggttagtgggggcagcatttcctcaggtgattactattggggatggattcggcaacccccgggtaaaggattggagtggattggtcatatttattatagtggagcgacgtactacaacccaagtctcaaatccagggttacaatatccgtcgatacgagcaggaaccaattcagcttgaaactttctagtgtcaccgcagcagacacagccgtctattactgtacgcgggatgactccagtaattggcggtcccgagggcaagggacactggtcacggtctcctcatctggaggcggtggaagcggtggaggaggatctgaagtgcagctggttgaatctggcggaggactggttcagcctggcggatctctgagactgtcttgtgccgcctctggcttcgccagcgactactatatcatcggctggttcagacaggcccctggcaaagagagagagggcgtcagctgtatcagcagcagatacgccaacaccaactacgccgacagcgtgaagggcagattcaccatcagccgggacaacgccaagaacaccgtgtacctccagatgaacagcctgaagcctgaggacaccgccgtgtactactgtgccgccgacaccagaagatacacctgtcctgacattgccaccatgcaccggaacttcgattcttggggccagggcacactggtcaccgtttcttctggatccggcggcggaggatctggcggaggcggatctgggggcggaggctctttcgaacaagttcagcttcaacagcctggcgctgagctggtcaaacctggcgcttctgtgaagatgagctgcaaagccagcggctacgccttcagcagctactggatcaactggatgaagcagaaacccggccagggactcgaatggatcggccaaatctatcccggcgacggcgacaccaactacaacggcaagttcaagggcagagccacactgaccgccgatacctctagcagcacagcctacatgcagctgagcagcctgaccagcgaagatagcgccgtgtacttctgtgcccggtccatcacaacagtcgtgggctgcgctatggactattggggccagggaacaagcgtgaccgtgtctagtacgcgtgagcagaaactgatctcggaagaggatgggagcggcatccagaaccctgatcctgccgtgtaccagctgcgggatagcaagagcagcgacaagagcgtgtgtctgttcaccgacttcgacagccagaccaacgtgtcccagagcaaggactccgacgtgtacatcaccgataagtgcgtgctggacatgcggagcatggacttcaagagcaactccgccgtggcctggtccaacaagtccgatttcgcctgcgccaacgccttcaacaacagcattatccccgaggacacattcttcccaagccccgagagcagctgcgacgtgaagctggtggaaaagagcttcgagacagacaccaacctgaacttccagaacctgagcgtgatcggcttcagaatcctgctgctgaaagtggccggctttaacctgctgatgaccctgcggctgtggtccagccgcgccaagagaagcggatctggcgtgaagcagaccctgaatttcgacctgctgaagctggctggcgacgtggaatccaacccaggcccttctagaggccatatggccaagcctttgtctcaagaagaatccaccctcattgaaagagcaacggctacaatcaacagcatccccatctctgaagactacagcgtcgccagcgcagctctctctagcgacggccgcatcttcactggtgtcaatgtatatcattttactgggggaccttgtgcagaactcgtggtgctgggcactgctgctgctgcggcagctggcaacctgacttgtatcgtcgcgatcggaaatgagaacaggggcatcttgagcccctgcggacggtgccgacaggtgcttctcgatctgcatcctgggatcaaagccatagtgaaggacagtgatggacagccgacggcagttgggattcgtgaattgctgccctctggttatgtgtgggagggctga

SEQ ID NO: 6177 - DNA, 1713 bp, Artificial Sequence
  Synthetic Polynucloetide
atggactggatttggcgcatccttttccttgtcggcgctgctaccggcgcccattcccagctccagttgcaagagagcggccctggcttggtaaaaccttccgagacccttagcctcacatgcacggttagtgggggcagcatttcctcaggtgattactattggggatggattcggcaacccccgggtaaaggattggagtggattggtcatatttattatagtggagcgacgtactacaacccaagtctcaaatccagggttacaatatccgtcgatacgagcaggaaccaattcagcttgaaactttctagtgtcaccgcagcagacacagccgtctattactgtacgcgggatgactccagtaattggcggtcccgagggcaagggacactggtcacggtctcctcatctggaggcggtggaagcggtggaggaggatctgaagtgcagctggttgaatctggcggaggactggttcagcctggcggatctctgagactgtcttgtgccgcctctggcttcgccagcgactactatatcatcggctggttcagacaggcccctggcaaagagagagagggcgtcagctgtatcagcagcagatacgccaacaccaactacgccgacagcgtgaagggcagattcaccatcagccgggacaacgccaagaacaccgtgtacctccagatgaacagcctgaagcctgaggacaccgccgtgtactactgtgccgccgacaccagaagatacacctgtcctgacattgccaccatgcaccggaacttcgattcttggggccagggcacactggtcaccgtttcttctggatccggcggcggaggatctggcggaggcggatctgggggcggaggctctttcgaacaagttcagcttcaacagcctggcgctgagctggtcaaacctggcgcttctgtgaagatgagctgcaaagccagcggctacgccttcagcagctactggatcaactggatgaagcagaaacccggccagggactcgaatggatcggccaaatctatcccggcgacggcgacaccaactacaacggcaagttcaagggcagagccacactgaccgccgatacctctagcagcacagcctacatgcagctgagcagcctgaccagcgaagatagcgccgtgtacttctgtgcccggtccatcacaacagtcgtgggctgcgctatggactattggggccagggaacaagcgtgaccgtgtctagtacgcgtgagcagaaactgatctcggaagaggatgggagcggcatccagaaccctgatcctgccgtgtaccagctgcgggatagcaagagcagcgacaagagcgtgtgtctgttcaccgacttcgacagccagaccaacgtgtcccagagcaaggactccgacgtgtacatcaccgataagtgcgtgctggacatgcggagcatggacttcaagagcaactccgccgtggcctggtccaacaagtccgatttcgcctgcgccaacgccttcaacaacagcattatccccgaggacacattcttcccaagccccgagagcagctgcgacgtgaagctggtggaaaagagcttcgagacagacaccaacctgaacttccagaacctgagcgtgatcggcttcagaatcctgctgctgaaagtggccggctttaacctgctgatgaccctgcggctgtggtccagctga

SEQ ID NO: 6178 - DNA, 4209 bp, Artificial Sequence
  Synthetic Polynucloetide
atggccttaccagtgaccgccttgctcctgccgctggccttgctgctccacgccgccaggccggaggttcagctgcttgagtctggcggaggactggttcaacctggcggaagcctgagactgtcttgtgccgccagcggcttcacctttagcagctacgccatgagctgggtccgacaggctcctggcaaaggactggaatgggtgtccagcatcagcggcagcggcgactacatctactacgccgatagcgtgaagggcagattcaccatcagccgggacatcagcaagaacaccctgtacctccagatgaacagcctgagagccgaggacaccgccgtgtactactgtgccaaagaaggcaccggcgctaacagcagcctggccgattatagaggccagggcacactggtcaccgtgtctagtggcggaggaagcggcggaggatctgaagtgcaactggtggaatctggaggctctctggtgcagccagggggaagcctgagactgtcttgtgccgcttccggcttcaccttcgacgactacgccatgagctgggtgcgccaggtgccaggcaaaggcctggaatgggtgtccagcatcaactggagcggcacccacaccgattacgccgactccgtgaaaggcagattcacaatcagcagaaacaacgccaacaataccctgtacctgcagatgaactccctgaagtctgaggatacagcagtgtattattgcgccaagaactggcgggacgccggcaccacttggtttgagaaaagcggctctgccggacagggaacccaagtgacagtgtcctccggtaccggcggaggcggatctggcggcggaggtagcggtggcggaggatctgaattcgacatccagatgacacagagccctagcagcctgtctgccagcgtgggagacagagtgaccatcacatgcaaggccagcgaccacatcaacaactggctggcctggtatcagcagaagcctggacaggcccctaagctgctgatctacggcgctaccacactggaaacaggcgtgcccagcagattttctggcagcggctctggcaccgactacaccctgacaatatccagcctccagcctgaggacttcgccacctactactgtcagcagagctggaacaccccttggacattcggccagggcaccaagctggaaatcaagagactcgagatccagaaccctgatcctgccgtgtaccagctgcgggatagcaagagcagcgacaagagcgtgtgtctgttcaccgacttcgacagccagaccaacgtgtcccagagcaaggactccgacgtgtacatcaccgataagtgcgtgctggacatgcggagcatggacttcaagagcaactccgccgtggcctggtccaacaagtccgatttcgcctgcgccaacgccttcaacaacagcattatccccgaggacacattcttcccaagcagcgacgtgccctgcgacgtgaagctggtggaaaagagcttcgagacagacaccaacctgaacttccagaacctgagcgtgatcggcttcagaatcctgctgctgaaagtggccggctttaacctgctgatgaccctgcggctgtggtccagccgcgccaagagaagcggatctggcgtgaagcagaccctgaatttcgacctgctgaagctggctggcgacgtggaatccaacccaggccctactagtatggactggatttggcgcatccttttccttgtcggcgctgctaccggcgcccattcccagctccagttgcaagagagcggccctggcttggtaaaaccttccgagacccttagcctcacatgcacggttagtgggggcagcatttcctcaggtgattactattggggatggattcggcaacccccgggtaaaggattggagtggattggtcatatttattatagtggagcgacgtactacaacccaagtctcaaatccagggttacaatatccgtcgatacgagcaggaaccaattcagcttgaaactttctagtgtcaccgcagcagacacagccgtctattactgtacgcgggatgactccagtaattggcggtcccgagggcaagggacactggtcacggtctcctcatctggaggcggtggaagcggtggaggaggatctgaagtgcagctggttgaatctggcggaggactggttcagcctggcggatctctgagactgtcttgtgccgcctctggcttcgccagcgactactatatcatcggctggttcagacaggcccctggcaaagagagagagggcgtcagctgtatcagcagcagatacgccaacaccaactacgccgacagcgtgaagggcagattcaccatcagccgggacaacgccaagaacaccgtgtacctccagatgaacagcctgaagcctgaggacaccgccgtgtactactgtgccgccgacaccagaagatacacctgtcctgacattgccaccatgcaccggaacttcgattcttggggccagggcacactggtcaccgtttcttctggatccggcggcggaggatctggcggaggcggatctgggggcggaggctctttcgaacaagttcagcttcaacagcctggcgctgagctggtcaaacctggcgcttctgtgaagatgagctgcaaagccagcggctacgccttcagcagctactggatcaactggatgaagcagaaacccggccagggactcgaatggatcggccaaatctatcccggcgacggcgacaccaactacaacggcaagttcaagggcagagccacactgaccgccgatacctctagcagcacagcctacatgcagctgagcagcctgaccagcgaagatagcgccgtgtacttctgtgcccggtccatcacaacagtcgtgggctgcgctatggactattggggccagggaacaagcgtgaccgtgtctagtacgcgtgaggacctgaagaacgtgttcccacctgaggtggccgtgttcgagcctagcaaggccgagatcgcccacacccagaaagccaccctcgtgtgcctggctaccggcttctaccccgaccatgtggaactgtcttggtgggtcaacggcaaagaggtgcacagcggcgtgtgtaccgacccccagccactgaaagaacagcccgccctgaacgacagccggtactgcctgagcagcagactgagagtgtccgccaccttctggcagaacccccggaaccacttcagatgccaggtgcagttctacggcctgagcgagaacgacgagtggacccaggacagagccaagcccgtgacccagatcgtgtctgccgaagcctggggcagagccgattgcggcatcaccagcgccagctaccaccagggcgtgctgagcgccaccatcctgtacgagatcctgctgggcaaggccaccctgtacgccgtgctggtgtctgccctggtgctgatggctatggtcaagcggaaggacagccggggaagggccaagcgatctggatctggagcaacaaacttctcactactcaaacaagcaggtgacgtggaggagaatcccgggccttctagaggccatatgaccgagtacaagcccacggtgcgcctcgccacccgcgacgacgtccccagggccgtacgcaccctcgccgccgcgttcgccgactaccccgccacgcgccacaccgtcgatccggaccgccacatcgagcgggtcaccgagctgcaagaactcttcctcacgcgcgtcgggctcgacatcggcaaggtgtgggtcgcggacgacggcgccgcggtggcggtctggaccacgccggagagcgtcgaagcgggggcggtgttcgccgagatcggcccgcgcatggccgagttgagcggttcccggctggccgcgcagcaacagatggaaggcctcctggcgccgcaccggcccaaggagcccgcgtggttcctggccaccgtcggcgtctcgcccgaccaccagggcaagggtctgggcagcgccgtcgtgctccccggagtggaggcggccgagcgcgccggggtgcccgccttcctggagacctccgcgccccgcaacctccccttctacgagcggctcggcttcaccgtcaccgccgacgtcgaggtgcccgaaggaccgcgcacctggtgcatgacccgcaagcccggtgcctga

SEQ ID NO: 6179 - DNA, 4206 bp, Artificial Sequence
  Synthetic Polynucloetide
atggccttaccagtgaccgccttgctcctgccgctggccttgctgctccacgccgccaggccggaggttcagctgcttgagtctggcggaggactggttcaacctggcggaagcctgagactgtcttgtgccgccagcggcttcacctttagcagctacgccatgagctgggtccgacaggctcctggcaaaggactggaatgggtgtccagcatcagcggcagcggcgactacatctactacgccgatagcgtgaagggcagattcaccatcagccgggacatcagcaagaacaccctgtacctccagatgaacagcctgagagccgaggacaccgccgtgtactactgtgccaaagaaggcaccggcgctaacagcagcctggccgattatagaggccagggcacactggtcaccgtgtctagtggcggaggaagcggcggaggatctgaagtgcaactggtggaatctggaggctctctggtgcagccagggggaagcctgagactgtcttgtgccgcttccggcttcaccttcgacgactacgccatgagctgggtgcgccaggtgccaggcaaaggcctggaatgggtgtccagcatcaactggagcggcacccacaccgattacgccgactccgtgaaaggcagattcacaatcagcagaaacaacgccaacaataccctgtacctgcagatgaactccctgaagtctgaggatacagcagtgtattattgcgccaagaactggcgggacgccggcaccacttggtttgagaaaagcggctctgccggacagggaacccaagtgacagtgtcctccggtaccggcggaggcggatctggcggcggaggtagcggtggcggaggatctgaattcgacatccagatgacacagagccctagcagcctgtctgccagcgtgggagacagagtgaccatcacatgcaaggccagcgaccacatcaacaactggctggcctggtatcagcagaagcctggacaggcccctaagctgctgatctacggcgctaccacactggaaacaggcgtgcccagcagattttctggcagcggctctggcaccgactacaccctgacaatatccagcctccagcctgaggacttcgccacctactactgtcagcagagctggaacaccccttggacattcggccagggcaccaagctggaaatcaagagactcgaggacctgaagaacgtgttcccacctgaggtggccgtgttcgagcctagcaaggccgagatcgcccacacccagaaagccaccctcgtgtgcctggctaccggcttctaccccgaccatgtggaactgtcttggtgggtcaacggcaaagaggtgcacagcggcgtgtgtaccgacccccagccactgaaagaacagcccgccctgaacgacagccggtactgcctgagcagcagactgagagtgtccgccaccttctggcagaacccccggaaccacttcagatgccaggtgcagttctacggcctgagcgagaacgacgagtggacccaggacagagccaagcccgtgacccagatcgtgtctgccgaagcctggggcagagccgattgcggcatcaccagcgccagctaccaccagggcgtgctgagcgccaccatcctgtacgagatcctgctgggcaaggccaccctgtacgccgtgctggtgtctgccctggtgctgatggctatggtcaagcggaaggacagccggggaagggccaagcgatctggatctggagcaacaaacttctcactactcaaacaagcaggtgacgtggaggagaatcccgggcctactagtatggactggatttggcgcatccttttccttgtcggcgctgctaccggcgcccattcccagctccagttgcaagagagcggccctggcttggtaaaaccttccgagacccttagcctcacatgcacggttagtgggggcagcatttcctcaggtgattactattggggatggattcggcaacccccgggtaaaggattggagtggattggtcatatttattatagtggagcgacgtactacaacccaagtctcaaatccagggttacaatatccgtcgatacgagcaggaaccaattcagcttgaaactttctagtgtcaccgcagcagacacagccgtctattactgtacgcgggatgactccagtaattggcggtcccgagggcaagggacactggtcacggtctcctcatctggaggcggtggaagcggtggaggaggatctgaagtgcagctggttgaatctggcggaggactggttcagcctggcggatctctgagactgtcttgtgccgcctctggcttcgccagcgactactatatcatcggctggttcagacaggcccctggcaaagagagagagggcgtcagctgtatcagcagcagatacgccaacaccaactacgccgacagcgtgaagggcagattcaccatcagccgggacaacgccaagaacaccgtgtacctccagatgaacagcctgaagcctgaggacaccgccgtgtactactgtgccgccgacaccagaagatacacctgtcctgacattgccaccatgcaccggaacttcgattcttggggccagggcacactggtcaccgtttcttctggatccggcggcggaggatctggcggaggcggatctgggggcggaggctctttcgaacaagttcagcttcaacagcctggcgctgagctggtcaaacctggcgcttctgtgaagatgagctgcaaagccagcggctacgccttcagcagctactggatcaactggatgaagcagaaacccggccagggactcgaatggatcggccaaatctatcccggcgacggcgacaccaactacaacggcaagttcaagggcagagccacactgaccgccgatacctctagcagcacagcctacatgcagctgagcagcctgaccagcgaagatagcgccgtgtacttctgtgcccggtccatcacaacagtcgtgggctgcgctatggactattggggccagggaacaagcgtgaccgtgtctagtacgcgtatccagaaccctgatcctgccgtgtaccagctgcgggatagcaagagcagcgacaagagcgtgtgtctgttcaccgacttcgacagccagaccaacgtgtcccagagcaaggactccgacgtgtacatcaccgataagtgcgtgctggacatgcggagcatggacttcaagagcaactccgccgtggcctggtccaacaagtccgatttcgcctgcgccaacgccttcaacaacagcattatccccgaggacacattcttcccaagcagcgacgtgccctgcgacgtgaagctggtggaaaagagcttcgagacagacaccaacctgaacttccagaacctgagcgtgatcggcttcagaatcctgctgctgaaagtggccggctttaacctgctgatgaccctgcggctgtggtccagccgcgccaagagaagcggatctggcgtgaagcagaccctgaatttcgacctgctgaagctggctggcgacgtggaatccaacccaggcccttctagaggccatatgaccgagtacaagcccacggtgcgcctcgccacccgcgacgacgtccccagggccgtacgcaccctcgccgccgcgttcgccgactaccccgccacgcgccacaccgtcgatccggaccgccacatcgagcgggtcaccgagctgcaagaactcttcctcacgcgcgtcgggctcgacatcggcaaggtgtgggtcgcggacgacggcgccgcggtggcggtctggaccacgccggagagcgtcgaagcgggggcggtgttcgccgagatcggcccgcgcatggccgagttgagcggttcccggctggccgcgcagcaacagatggaaggcctcctggcgccgcaccggcccaaggagcccgcgtggttcctggccaccgtcggcgtctcgcccgaccaccagggcaagggtctgggcagcgccgtcgtgctccccggagtggaggcggccgagcgcgccggggtgcccgccttcctggagacctccgcgccccgcaacctccccttctacgagcggctcggcttcaccgtcaccgccgacgtcgaggtgcccgaaggaccgcgcacctggtgcatgacccgcaagcccggtgcctga

SEQ ID NO: 6180 - DNA, 4206 bp, Artificial Sequence
  Synthetic Polynucloetide
atggccttaccagtgaccgccttgctcctgccgctggccttgctgctccacgccgccaggccggaggttcagctgcttgagtctggcggaggactggttcaacctggcggaagcctgagactgtcttgtgccgccagcggcttcacctttagcagctacgccatgagctgggtccgacaggctcctggcaaaggactggaatgggtgtccagcatcagcggcagcggcgactacatctactacgccgatagcgtgaagggcagattcaccatcagccgggacatcagcaagaacaccctgtacctccagatgaacagcctgagagccgaggacaccgccgtgtactactgtgccaaagaaggcaccggcgctaacagcagcctggccgattatagaggccagggcacactggtcaccgtgtctagtggcggaggaagcggcggaggatctgaagtgcaactggtggaatctggaggctctctggtgcagccagggggaagcctgagactgtcttgtgccgcttccggcttcaccttcgacgactacgccatgagctgggtgcgccaggtgccaggcaaaggcctggaatgggtgtccagcatcaactggagcggcacccacaccgattacgccgactccgtgaaaggcagattcacaatcagcagaaacaacgccaacaataccctgtacctgcagatgaactccctgaagtctgaggatacagcagtgtattattgcgccaagaactggcgggacgccggcaccacttggtttgagaaaagcggctctgccggacagggaacccaagtgacagtgtcctccggtaccggcggaggcggatctggcggcggaggtagcggtggcggaggatctgaattcgacatccagatgacacagagccctagcagcctgtctgccagcgtgggagacagagtgaccatcacatgcaaggccagcgaccacatcaacaactggctggcctggtatcagcagaagcctggacaggcccctaagctgctgatctacggcgctaccacactggaaacaggcgtgcccagcagattttctggcagcggctctggcaccgactacaccctgacaatatccagcctccagcctgaggacttcgccacctactactgtcagcagagctggaacaccccttggacattcggccagggcaccaagctggaaatcaagagactcgaggacctgaagaacgtgttcccacctgaggtggccgtgttcgagcctagcgaggccgagatcagccacacccagaaagccaccctcgtgtgcctggctaccggcttctaccccgaccatgtggaactgtcttggtgggtcaacggcaaagaggtgcacagcggcgtgtgtaccgacccccagccactgaaagaacagcccgccctgaacgacagccggtactgcctgagcagcagactgagagtgtccgccaccttctggcagaacccccggaaccacttcagatgccaggtgcagttctacggcctgagcgagaacgacgagtggacccaggacagagccaagcccgtgacccagatcgtgtctgccgaagcctggggcagagccgattgcggctttaccagcgagagctaccagcagggcgtgctgagcgccaccatcctgtacgagatcctgctgggcaaggccaccctgtacgccgtgctggtgtctgccctggtgctgatggctatggtcaagcggaaggacagccggggaagggccaagcgatctggatctggagcaacaaacttctcactactcaaacaagcaggtgacgtggaggagaatcccgggcctactagtatggactggatttggcgcatccttttccttgtcggcgctgctaccggcgcccattcccagctccagttgcaagagagcggccctggcttggtaaaaccttccgagacccttagcctcacatgcacggttagtgggggcagcatttcctcaggtgattactattggggatggattcggcaacccccgggtaaaggattggagtggattggtcatatttattatagtggagcgacgtactacaacccaagtctcaaatccagggttacaatatccgtcgatacgagcaggaaccaattcagcttgaaactttctagtgtcaccgcagcagacacagccgtctattactgtacgcgggatgactccagtaattggcggtcccgagggcaagggacactggtcacggtctcctcatctggaggcggtggaagcggtggaggaggatctgaagtgcagctggttgaatctggcggaggactggttcagcctggcggatctctgagactgtcttgtgccgcctctggcttcgccagcgactactatatcatcggctggttcagacaggcccctggcaaagagagagagggcgtcagctgtatcagcagcagatacgccaacaccaactacgccgacagcgtgaagggcagattcaccatcagccgggacaacgccaagaacaccgtgtacctccagatgaacagcctgaagcctgaggacaccgccgtgtactactgtgccgccgacaccagaagatacacctgtcctgacattgccaccatgcaccggaacttcgattcttggggccagggcacactggtcaccgtttcttctggatccggcggcggaggatctggcggaggcggatctgggggcggaggctctttcgaacaagttcagcttcaacagcctggcgctgagctggtcaaacctggcgcttctgtgaagatgagctgcaaagccagcggctacgccttcagcagctactggatcaactggatgaagcagaaacccggccagggactcgaatggatcggccaaatctatcccggcgacggcgacaccaactacaacggcaagttcaagggcagagccacactgaccgccgatacctctagcagcacagcctacatgcagctgagcagcctgaccagcgaagatagcgccgtgtacttctgtgcccggtccatcacaacagtcgtgggctgcgctatggactattggggccagggaacaagcgtgaccgtgtctagtacgcgtatccagaaccctgatcctgccgtgtaccagctgcgggatagcaagagcagcgacaagagcgtgtgtctgttcaccgacttcgacagccagaccaacgtgtcccagagcaaggactccgacgtgtacatcaccgataagtgcgtgctggacatgcggagcatggacttcaagagcaactccgccgtggcctggtccaacaagtccgatttcgcctgcgccaacgccttcaacaacagcattatccccgaggacacattcttcccaagccccgagagcagctgcgacgtgaagctggtggaaaagagcttcgagacagacaccaacctgaacttccagaacctgagcgtgatcggcttcagaatcctgctgctgaaagtggccggctttaacctgctgatgaccctgcggctgtggtccagccgcgccaagagaagcggatctggcgtgaagcagaccctgaatttcgacctgctgaagctggctggcgacgtggaatccaacccaggcccttctagaggccatatgaccgagtacaagcccacggtgcgcctcgccacccgcgacgacgtccccagggccgtacgcaccctcgccgccgcgttcgccgactaccccgccacgcgccacaccgtcgatccggaccgccacatcgagcgggtcaccgagctgcaagaactcttcctcacgcgcgtcgggctcgacatcggcaaggtgtgggtcgcggacgacggcgccgcggtggcggtctggaccacgccggagagcgtcgaagcgggggcggtgttcgccgagatcggcccgcgcatggccgagttgagcggttcccggctggccgcgcagcaacagatggaaggcctcctggcgccgcaccggcccaaggagcccgcgtggttcctggccaccgtcggcgtctcgcccgaccaccagggcaagggtctgggcagcgccgtcgtgctccccggagtggaggcggccgagcgcgccggggtgcccgccttcctggagacctccgcgccccgcaacctccccttctacgagcggctcggcttcaccgtcaccgccgacgtcgaggtgcccgaaggaccgcgcacctggtgcatgacccgcaagcccggtgcctga

SEQ ID NO: 6181 - DNA, 3504 bp, Artificial Sequence
  Synthetic Polynucloetide
atggccttaccagtgaccgccttgctcctgccgctggccttgctgctccacgccgccaggccggaggttcagctgcttgagtctggcggaggactggttcaacctggcggaagcctgagactgtcttgtgccgccagcggcttcacctttagcagctacgccatgagctgggtccgacaggctcctggcaaaggactggaatgggtgtccagcatcagcggcagcggcgactacatctactacgccgatagcgtgaagggcagattcaccatcagccgggacatcagcaagaacaccctgtacctccagatgaacagcctgagagccgaggacaccgccgtgtactactgtgccaaagaaggcaccggcgctaacagcagcctggccgattatagaggccagggcacactggtcaccgtgtctagtggcggaggaagcggcggaggatctgaagtgcaactggtggaatctggaggctctctggtgcagccagggggaagcctgagactgtcttgtgccgcttccggcttcaccttcgacgactacgccatgagctgggtgcgccaggtgccaggcaaaggcctggaatgggtgtccagcatcaactggagcggcacccacaccgattacgccgactccgtgaaaggcagattcacaatcagcagaaacaacgccaacaataccctgtacctgcagatgaactccctgaagtctgaggatacagcagtgtattattgcgccaagaactggcgggacgccggcaccacttggtttgagaaaagcggctctgccggacagggaacccaagtgacagtgtcctccggtaccggcggaggcggatctggcggcggaggtagcggtggcggaggatctgaattcgacatccagatgacacagagccctagcagcctgtctgccagcgtgggagacagagtgaccatcacatgcaaggccagcgaccacatcaacaactggctggcctggtatcagcagaagcctggacaggcccctaagctgctgatctacggcgctaccacactggaaacaggcgtgcccagcagattttctggcagcggctctggcaccgactacaccctgacaatatccagcctccagcctgaggacttcgccacctactactgtcagcagagctggaacaccccttggacattcggccagggcaccaagctggaaatcaagagactcgaggacctgaagaacgtgttcccacctgaggtggccgtgttcgagcctagcgaggccgagatcagccacacccagaaagccaccctcgtgtgcctggctaccggcttctaccccgaccatgtggaactgtcttggtgggtcaacggcaaagaggtgcacagcggcgtgtgtaccgacccccagccactgaaagaacagcccgccctgaacgacagccggtactgcctgagcagcagactgagagtgtccgccaccttctggcagaacccccggaaccacttcagatgccaggtgcagttctacggcctgagcgagaacgacgagtggacccaggacagagccaagcccgtgacccagatcgtgtctgccgaagcctggggcagagccgattgcggctttaccagcgagagctaccagcagggcgtgctgagcgccaccatcctgtacgagatcctgctgggcaaggccaccctgtacgccgtgctggtgtctgccctggtgctgatggctatggtcaagcggaaggacagccggggaagggccaagcgatctggatctggagcaacaaacttctcactactcaaacaagcaggtgacgtggaggagaatcccgggcctactagtatggactggatttggcgcatccttttccttgtcggcgctgctaccggcgcccattcccagctccagttgcaagagagcggccctggcttggtaaaaccttccgagacccttagcctcacatgcacggttagtgggggcagcatttcctcaggtgattactattggggatggattcggcaacccccgggtaaaggattggagtggattggtcatatttattatagtggagcgacgtactacaacccaagtctcaaatccagggttacaatatccgtcgatacgagcaggaaccaattcagcttgaaactttctagtgtcaccgcagcagacacagccgtctattactgtacgcgggatgactccagtaattggcggtcccgagggcaagggacactggtcacggtctcctcatctggaggcggtggaagcggtggaggaggatctgaagtgcagctggttgaatctggcggaggactggttcagcctggcggatctctgagactgtcttgtgccgcctctggcttcgccagcgactactatatcatcggctggttcagacaggcccctggcaaagagagagagggcgtcagctgtatcagcagcagatacgccaacaccaactacgccgacagcgtgaagggcagattcaccatcagccgggacaacgccaagaacaccgtgtacctccagatgaacagcctgaagcctgaggacaccgccgtgtactactgtgccgccgacaccagaagatacacctgtcctgacattgccaccatgcaccggaacttcgattcttggggccagggcacactggtcaccgtttcttctggatccggcggcggaggatctggcggaggcggatctgggggcggaggctctttcgaacaagttcagcttcaacagcctggcgctgagctggtcaaacctggcgcttctgtgaagatgagctgcaaagccagcggctacgccttcagcagctactggatcaactggatgaagcagaaacccggccagggactcgaatggatcggccaaatctatcccggcgacggcgacaccaactacaacggcaagttcaagggcagagccacactgaccgccgatacctctagcagcacagcctacatgcagctgagcagcctgaccagcgaagatagcgccgtgtacttctgtgcccggtccatcacaacagtcgtgggctgcgctatggactattggggccagggaacaagcgtgaccgtgtctagtacgcgtatccagaaccctgatcctgccgtgtaccagctgcgggatagcaagagcagcgacaagagcgtgtgtctgttcaccgacttcgacagccagaccaacgtgtcccagagcaaggactccgacgtgtacatcaccgataagtgcgtgctggacatgcggagcatggacttcaagagcaactccgccgtggcctggtccaacaagtccgatttcgcctgcgccaacgccttcaacaacagcattatccccgaggacacattcttcccaagccccgagagcagctgcgacgtgaagctggtggaaaagagcttcgagacagacaccaacctgaacttccagaacctgagcgtgatcggcttcagaatcctgctgctgaaagtggccggctttaacctgctgatgaccctgcggctgtggtccagc

SEQ ID NO: 6182 - DNA, 4179 bp, Artificial Sequence
  Synthetic Polynucloetide
atggccttaccagtgaccgccttgctcctgccgctggccttgctgctccacgccgccaggccggaggttcagctgcttgagtctggcggaggactggttcaacctggcggaagcctgagactgtcttgtgccgccagcggcttcacctttagcagctacgccatgagctgggtccgacaggctcctggcaaaggactggaatgggtgtccagcatcagcggcagcggcgactacatctactacgccgatagcgtgaagggcagattcaccatcagccgggacatcagcaagaacaccctgtacctccagatgaacagcctgagagccgaggacaccgccgtgtactactgtgccaaagaaggcaccggcgctaacagcagcctggccgattatagaggccagggcacactggtcaccgtgtctagtggcggaggaagcggcggaggatctgaagtgcaactggtggaatctggaggctctctggtgcagccagggggaagcctgagactgtcttgtgccgcttccggcttcaccttcgacgactacgccatgagctgggtgcgccaggtgccaggcaaaggcctggaatgggtgtccagcatcaactggagcggcacccacaccgattacgccgactccgtgaaaggcagattcacaatcagcagaaacaacgccaacaataccctgtacctgcagatgaactccctgaagtctgaggatacagcagtgtattattgcgccaagaactggcgggacgccggcaccacttggtttgagaaaagcggctctgccggacagggaacccaagtgacagtgtcctccggtaccggcggaggcggatctggcggcggaggtagcggtggcggaggatctgaattcgacatccagatgacacagagccctagcagcctgtctgccagcgtgggagacagagtgaccatcacatgcaaggccagcgaccacatcaacaactggctggcctggtatcagcagaagcctggacaggcccctaagctgctgatctacggcgctaccacactggaaacaggcgtgcccagcagattttctggcagcggctctggcaccgactacaccctgacaatatccagcctccagcctgaggacttcgccacctactactgtcagcagagctggaacaccccttggacattcggccagggcaccaagctggaaatcaagagactcgaggacctgaagaacgtgttcccacctgaggtggccgtgttcgagcctagcgaggccgagatcagccacacccagaaagccaccctcgtgtgcctggctaccggcttctaccccgaccatgtggaactgtcttggtgggtcaacggcaaagaggtgcacagcggcgtgtgtaccgacccccagccactgaaagaacagcccgccctgaacgacagccggtactgcctgagcagcagactgagagtgtccgccaccttctggcagaacccccggaaccacttcagatgccaggtgcagttctacggcctgagcgagaacgacgagtggacccaggacagagccaagcccgtgacccagatcgtgtctgccgaagcctggggcagagccgattgcggctttaccagcgagagctaccagcagggcgtgctgagcgccaccatcctgtacgagatcctgctgggcaaggccaccctgtacgccgtgctggtgtctgccctggtgctgatggctatggtcaagcggaaggacagccggggaagggccaagcgatctggatctggagcaacaaacttctcactactcaaacaagcaggtgacgtggaggagaatcccgggcctactagtatggactggatttggcgcatccttttccttgtcggcgctgctaccggcgcccattcccagctccagttgcaagagagcggccctggcttggtaaaaccttccgagacccttagcctcacatgcacggttagtgggggcagcatttcctcaggtgattactattggggatggattcggcaacccccgggtaaaggattggagtggattggtcatatttattatagtggagcgacgtactacaacccaagtctcaaatccagggttacaatatccgtcgatacgagcaggaaccaattcagcttgaaactttctagtgtcaccgcagcagacacagccgtctattactgtacgcgggatgactccagtaattggcggtcccgagggcaagggacactggtcacggtctcctcatctggaggcggtggaagcggtggaggaggatctgaagtgcagctggttgaatctggcggaggactggttcagcctggcggatctctgagactgtcttgtgccgcctctggcttcgccagcgactactatatcatcggctggttcagacaggcccctggcaaagagagagagggcgtcagctgtatcagcagcagatacgccaacaccaactacgccgacagcgtgaagggcagattcaccatcagccgggacaacgccaagaacaccgtgtacctccagatgaacagcctgaagcctgaggacaccgccgtgtactactgtgccgccgacaccagaagatacacctgtcctgacattgccaccatgcaccggaacttcgattcttggggccagggcacactggtcaccgtttcttctggatccggcggcggaggatctggcggaggcggatctgggggcggaggctctttcgaacaagttcagcttcaacagcctggcgctgagctggtcaaacctggcgcttctgtgaagatgagctgcaaagccagcggctacgccttcagcagctactggatcaactggatgaagcagaaacccggccagggactcgaatggatcggccaaatctatcccggcgacggcgacaccaactacaacggcaagttcaagggcagagccacactgaccgccgatacctctagcagcacagcctacatgcagctgagcagcctgaccagcgaagatagcgccgtgtacttctgtgcccggtccatcacaacagtcgtgggctgcgctatggactattggggccagggaacaagcgtgaccgtgtctagtacgcgtatccagaaccctgatcctgccgtgtaccagctgcgggatagcaagagcagcgacaagagcgtgtgtctgttcaccgacttcgacagccagaccaacgtgtcccagagcaaggactccgacgtgtacatcaccgataagtgcgtgctggacatgcggagcatggacttcaagagcaactccgccgtggcctggtccaacaagtccgatttcgcctgcgccaacgccttcaacaacagcattatccccgaggacacattcttcccaagccccgagagcagctgcgacgtgaagctggtggaaaagagcttcgagacagacaccaacctgaacttccagaacctgagcgtgatcggcttcagaatcctgctgctgaaagtggccggctttaacctgctgatgaccctgcggctgtggtccagccgcgccaagagaagcggatctggcgtgaagcagaccctgaatttcgacctgctgaagctggctggcgacgtggaatccaacccaggcccttctagaggcgggatccacaccatggctacctacgaggtgctgtgcgaggtggcaagaaagctgggcaccgacgacagagaagtggtgctgttcctgctgaacgtgttcatccctcagcctacactggcccagctgatcggtgcactgagagccctgaaagaggaaggccggctgacctttcctctgctggccgaatgcctgttcagagccggaagaagggatctgctgcgggacctgctgcatctggaccccagatttctggaaagacacctggccggcaccatgagctacttcagcccttaccagctgaccgtgctgcacgttgacggcgaactgtgcgccagagatattcggagcctgatcttcctgagcaaggacaccatcggcagccggtctacccctcagacatttctgcactgggtgtactgcatggaaaacctggacctgctcggccccacagatgtggatgccctgatgtccatgctgagaagcctgagcagagtggacctccagagacaggtgcagacactgatgggactgcacctgagcggacctagccacagccagcactacagacacacccct

SEQ ID NO: 6183 - DNA, 3516 bp, Artificial Sequence
  Synthetic Polynucloetide
atggccttaccagtgaccgccttgctcctgccgctggccttgctgctccacgccgccaggccggaggttcagctgcttgagtctggcggaggactggttcaacctggcggaagcctgagactgtcttgtgccgccagcggcttcacctttagcagctacgccatgagctgggtccgacaggctcctggcaaaggactggaatgggtgtccagcatcagcggcagcggcgactacatctactacgccgatagcgtgaagggcagattcaccatcagccgggacatcagcaagaacaccctgtacctccagatgaacagcctgagagccgaggacaccgccgtgtactactgtgccaaagaaggcaccggcgctaacagcagcctggccgattatagaggccagggcacactggtcaccgtgtctagtggcggaggaagcggcggaggatctgaagtgcaactggtggaatctggaggctctctggtgcagccagggggaagcctgagactgtcttgtgccgcttccggcttcaccttcgacgactacgccatgagctgggtgcgccaggtgccaggcaaaggcctggaatgggtgtccagcatcaactggagcggcacccacaccgattacgccgactccgtgaaaggcagattcacaatcagcagaaacaacgccaacaataccctgtacctgcagatgaactccctgaagtctgaggatacagcagtgtattattgcgccaagaactggcgggacgccggcaccacttggtttgagaaaagcggctctgccggacagggaacccaagtgacagtgtcctccggtaccggcggaggcggatctggcggcggaggtagcggtggcggaggatctgaattcgacatccagatgacacagagccctagcagcctgtctgccagcgtgggagacagagtgaccatcacatgcaaggccagcgaccacatcaacaactggctggcctggtatcagcagaagcctggacaggcccctaagctgctgatctacggcgctaccacactggaaacaggcgtgcccagcagattttctggcagcggctctggcaccgactacaccctgacaatatccagcctccagcctgaggacttcgccacctactactgtcagcagagctggaacaccccttggacattcggccagggcaccaagctggaaatcaagagactcgagatccagaaccctgatcctgccgtgtaccagctgcgggatagcaagagcagcgacaagagcgtgtgtctgttcaccgacttcgacagccagaccaacgtgtcccagagcaaggactccgacgtgtacatcaccgataagtgcgtgctggacatgcggagcatggacttcaagagcaactccgccgtggcctggtccaacaagtccgatttcgcctgcgccaacgccttcaacaacagcattatccccgaggacacattcttcccaagccccgagagcagctgcgacgtgaagctggtggaaaagagcttcgagacagacaccaacctgaacttccagaacctgagcgtgatcggcttcagaatcctgctgctgaaagtggccggctttaacctgctgatgaccctgcggctgtggtccagccgcgccaagagaagcggatctggcgtgaagcagaccctgaatttcgacctgctgaagctggctggcgacgtggaatccaacccaggccctactagtatggactggatttggcgcatccttttccttgtcggcgctgctaccggcgcccattcccagctccagttgcaagagagcggccctggcttggtaaaaccttccgagacccttagcctcacatgcacggttagtgggggcagcatttcctcaggtgattactattggggatggattcggcaacccccgggtaaaggattggagtggattggtcatatttattatagtggagcgacgtactacaacccaagtctcaaatccagggttacaatatccgtcgatacgagcaggaaccaattcagcttgaaactttctagtgtcaccgcagcagacacagccgtctattactgtacgcgggatgactccagtaattggcggtcccgagggcaagggacactggtcacggtctcctcatctggaggcggtggaagcggtggaggaggatctgaagtgcagctggttgaatctggcggaggactggttcagcctggcggatctctgagactgtcttgtgccgcctctggcttcgccagcgactactatatcatcggctggttcagacaggcccctggcaaagagagagagggcgtcagctgtatcagcagcagatacgccaacaccaactacgccgacagcgtgaagggcagattcaccatcagccgggacaacgccaagaacaccgtgtacctccagatgaacagcctgaagcctgaggacaccgccgtgtactactgtgccgccgacaccagaagatacacctgtcctgacattgccaccatgcaccggaacttcgattcttggggccagggcacactggtcaccgtttcttctggatccggcggcggaggatctggcggaggcggatctgggggcggaggctctttcgaacaagttcagcttcaacagcctggcgctgagctggtcaaacctggcgcttctgtgaagatgagctgcaaagccagcggctacgccttcagcagctactggatcaactggatgaagcagaaacccggccagggactcgaatggatcggccaaatctatcccggcgacggcgacaccaactacaacggcaagttcaagggcagagccacactgaccgccgatacctctagcagcacagcctacatgcagctgagcagcctgaccagcgaagatagcgccgtgtacttctgtgcccggtccatcacaacagtcgtgggctgcgctatggactattggggccagggaacaagcgtgaccgtgtctagtacgcgtgaggacctgaagaacgtgttcccacctgaggtggccgtgttcgagcctagcgaggccgagatcagccacacccagaaagccaccctcgtgtgcctggctaccggcttctaccccgaccatgtggaactgtcttggtgggtcaacggcaaagaggtgcacagcggcgtgtgtaccgacccccagccactgaaagaacagcccgccctgaacgacagccggtactgcctgagcagcagactgagagtgtccgccaccttctggcagaacccccggaaccacttcagatgccaggtgcagttctacggcctgagcgagaacgacgagtggacccaggacagagccaagcccgtgacccagatcgtgtctgccgaagcctggggcagagccgattgcggctttaccagcgagagctaccagcagggcgtgctgagcgccaccatcctgtacgagatcctgctgggcaaggccaccctgtacgccgtgctggtgtctgccctggtgctgatggctatggtcaagcggaaggacagccgggga

SEQ ID NO: 6184 - DNA, 4182 bp, Artificial Sequence
  Synthetic Polynucloetide
atggccttaccagtgaccgccttgctcctgccgctggccttgctgctccacgccgccaggccggaggttcagctgcttgagtctggcggaggactggttcaacctggcggaagcctgagactgtcttgtgccgccagcggcttcacctttagcagctacgccatgagctgggtccgacaggctcctggcaaaggactggaatgggtgtccagcatcagcggcagcggcgactacatctactacgccgatagcgtgaagggcagattcaccatcagccgggacatcagcaagaacaccctgtacctccagatgaacagcctgagagccgaggacaccgccgtgtactactgtgccaaagaaggcaccggcgctaacagcagcctggccgattatagaggccagggcacactggtcaccgtgtctagtggcggaggaagcggcggaggatctgaagtgcaactggtggaatctggaggctctctggtgcagccagggggaagcctgagactgtcttgtgccgcttccggcttcaccttcgacgactacgccatgagctgggtgcgccaggtgccaggcaaaggcctggaatgggtgtccagcatcaactggagcggcacccacaccgattacgccgactccgtgaaaggcagattcacaatcagcagaaacaacgccaacaataccctgtacctgcagatgaactccctgaagtctgaggatacagcagtgtattattgcgccaagaactggcgggacgccggcaccacttggtttgagaaaagcggctctgccggacagggaacccaagtgacagtgtcctccggtaccggcggaggcggatctggcggcggaggtagcggtggcggaggatctgaattcgacatccagatgacacagagccctagcagcctgtctgccagcgtgggagacagagtgaccatcacatgcaaggccagcgaccacatcaacaactggctggcctggtatcagcagaagcctggacaggcccctaagctgctgatctacggcgctaccacactggaaacaggcgtgcccagcagattttctggcagcggctctggcaccgactacaccctgacaatatccagcctccagcctgaggacttcgccacctactactgtcagcagagctggaacaccccttggacattcggccagggcaccaagctggaaatcaagagactcgagatccagaaccctgatcctgccgtgtaccagctgcgggatagcaagagcagcgacaagagcgtgtgtctgttcaccgacttcgacagccagaccaacgtgtcccagagcaaggactccgacgtgtacatcaccgataagtgcgtgctggacatgcggagcatggacttcaagagcaactccgccgtggcctggtccaacaagtccgatttcgcctgcgccaacgccttcaacaacagcattatccccgaggacacattcttcccaagccccgagagcagctgcgacgtgaagctggtggaaaagagcttcgagacagacaccaacctgaacttccagaacctgagcgtgatcggcttcagaatcctgctgctgaaagtggccggctttaacctgctgatgaccctgcggctgtggtccagccgcgccaagagaagcggatctggcgtgaagcagaccctgaatttcgacctgctgaagctggctggcgacgtggaatccaacccaggccctactagtatggactggatttggcgcatccttttccttgtcggcgctgctaccggcgcccattcccagctccagttgcaagagagcggccctggcttggtaaaaccttccgagacccttagcctcacatgcacggttagtgggggcagcatttcctcaggtgattactattggggatggattcggcaacccccgggtaaaggattggagtggattggtcatatttattatagtggagcgacgtactacaacccaagtctcaaatccagggttacaatatccgtcgatacgagcaggaaccaattcagcttgaaactttctagtgtcaccgcagcagacacagccgtctattactgtacgcgggatgactccagtaattggcggtcccgagggcaagggacactggtcacggtctcctcatctggaggcggtggaagcggtggaggaggatctgaagtgcagctggttgaatctggcggaggactggttcagcctggcggatctctgagactgtcttgtgccgcctctggcttcgccagcgactactatatcatcggctggttcagacaggcccctggcaaagagagagagggcgtcagctgtatcagcagcagatacgccaacaccaactacgccgacagcgtgaagggcagattcaccatcagccgggacaacgccaagaacaccgtgtacctccagatgaacagcctgaagcctgaggacaccgccgtgtactactgtgccgccgacaccagaagatacacctgtcctgacattgccaccatgcaccggaacttcgattcttggggccagggcacactggtcaccgtttcttctggatccggcggcggaggatctggcggaggcggatctgggggcggaggctctttcgaacaagttcagcttcaacagcctggcgctgagctggtcaaacctggcgcttctgtgaagatgagctgcaaagccagcggctacgccttcagcagctactggatcaactggatgaagcagaaacccggccagggactcgaatggatcggccaaatctatcccggcgacggcgacaccaactacaacggcaagttcaagggcagagccacactgaccgccgatacctctagcagcacagcctacatgcagctgagcagcctgaccagcgaagatagcgccgtgtacttctgtgcccggtccatcacaacagtcgtgggctgcgctatggactattggggccagggaacaagcgtgaccgtgtctagtacgcgtgaggacctgaagaacgtgttcccacctgaggtggccgtgttcgagcctagcgaggccgagatcagccacacccagaaagccaccctcgtgtgcctggctaccggcttctaccccgaccatgtggaactgtcttggtgggtcaacggcaaagaggtgcacagcggcgtgtgtaccgacccccagccactgaaagaacagcccgccctgaacgacagccggtactgcctgagcagcagactgagagtgtccgccaccttctggcagaacccccggaaccacttcagatgccaggtgcagttctacggcctgagcgagaacgacgagtggacccaggacagagccaagcccgtgacccagatcgtgtctgccgaagcctggggcagagccgattgcggctttaccagcgagagctaccagcagggcgtgctgagcgccaccatcctgtacgagatcctgctgggcaaggccaccctgtacgccgtgctggtgtctgccctggtgctgatggctatggtcaagcggaaggacagccggggaagggccaagcgatctggatctggagcaacaaacttctcactactcaaacaagcaggtgacgtggaggagaatcccgggccttctagaggcgggatccacaccatggctacctacgaggtgctgtgcgaggtggcaagaaagctgggcaccgacgacagagaagtggtgctgttcctgctgaacgtgttcatccctcagcctacactggcccagctgatcggtgcactgagagccctgaaagaggaaggccggctgacctttcctctgctggccgaatgcctgttcagagccggaagaagggatctgctgcgggacctgctgcatctggaccccagatttctggaaagacacctggccggcaccatgagctacttcagcccttaccagctgaccgtgctgcacgttgacggcgaactgtgcgccagagatattcggagcctgatcttcctgagcaaggacaccatcggcagccggtctacccctcagacatttctgcactgggtgtactgcatggaaaacctggacctgctcggccccacagatgtggatgccctgatgtccatgctgagaagcctgagcagagtggacctccagagacaggtgcagacactgatgggactgcacctgagcggacctagccacagccagcactacagacacacccct

SEQ ID NO: 6185 - DNA, 4206 bp, Artificial Sequence
  Synthetic Polynucloetide
atggccttaccagtgaccgccttgctcctgccgctggccttgctgctccacgccgccaggccggaggttcagctgcttgagtctggcggaggactggttcaacctggcggaagcctgagactgtcttgtgccgccagcggcttcacctttagcagctacgccatgagctgggtccgacaggctcctggcaaaggactggaatgggtgtccagcatcagcggcagcggcgactacatctactacgccgatagcgtgaagggcagattcaccatcagccgggacatcagcaagaacaccctgtacctccagatgaacagcctgagagccgaggacaccgccgtgtactactgtgccaaagaaggcaccggcgctaacagcagcctggccgattatagaggccagggcacactggtcaccgtgtctagtggcggaggaagcggcggaggatctgaagtgcaactggtggaatctggaggctctctggtgcagccagggggaagcctgagactgtcttgtgccgcttccggcttcaccttcgacgactacgccatgagctgggtgcgccaggtgccaggcaaaggcctggaatgggtgtccagcatcaactggagcggcacccacaccgattacgccgactccgtgaaaggcagattcacaatcagcagaaacaacgccaacaataccctgtacctgcagatgaactccctgaagtctgaggatacagcagtgtattattgcgccaagaactggcgggacgccggcaccacttggtttgagaaaagcggctctgccggacagggaacccaagtgacagtgtcctccggtaccggcggaggcggatctggcggcggaggtagcggtggcggaggatctgaattcgacatccagatgacacagagccctagcagcctgtctgccagcgtgggagacagagtgaccatcacatgcaaggccagcgaccacatcaacaactggctggcctggtatcagcagaagcctggacaggcccctaagctgctgatctacggcgctaccacactggaaacaggcgtgcccagcagattttctggcagcggctctggcaccgactacaccctgacaatatccagcctccagcctgaggacttcgccacctactactgtcagcagagctggaacaccccttggacattcggccagggcaccaagctggaaatcaagagactcgaggacctgaagaacgtgttcccacctgaggtggccgtgttcgagcctagcgaggccgagatcagccacacccagaaagccaccctcgtgtgcctggctaccggcttctaccccgaccatgtggaactgtcttggtgggtcaacggcaaagaggtgcacagcggcgtgtctaccgacccccagccactgaaagaacagcccgccctgaacgacagccggtactgcctgagcagcagactgagagtgtccgccaccttctggcagaacccccggaaccacttcagatgccaggtgcagttctacggcctgagcgagaacgacgagtggacccaggacagagccaagcccgtgacccagatcgtgtctgccgaagcctggggcagagccgattgcggctttaccagcgagagctaccagcagggcgtgctgagcgccaccatcctgtacgagatcctgctgggcaaggccaccctgtacgccgtgctggtgtctgccctggtgctgatggctatggtcaagcggaaggacagccggggaagggccaagcgatctggatctggagcaacaaacttctcactactcaaacaagcaggtgacgtggaggagaatcccgggcctactagtatggactggatttggcgcatccttttccttgtcggcgctgctaccggcgcccattcccagctccagttgcaagagagcggccctggcttggtaaaaccttccgagacccttagcctcacatgcacggttagtgggggcagcatttcctcaggtgattactattggggatggattcggcaacccccgggtaaaggattggagtggattggtcatatttattatagtggagcgacgtactacaacccaagtctcaaatccagggttacaatatccgtcgatacgagcaggaaccaattcagcttgaaactttctagtgtcaccgcagcagacacagccgtctattactgtacgcgggatgactccagtaattggcggtcccgagggcaagggacactggtcacggtctcctcatctggaggcggtggaagcggtggaggaggatctgaagtgcagctggttgaatctggcggaggactggttcagcctggcggatctctgagactgtcttgtgccgcctctggcttcgccagcgactactatatcatcggctggttcagacaggcccctggcaaagagagagagggcgtcagctgtatcagcagcagatacgccaacaccaactacgccgacagcgtgaagggcagattcaccatcagccgggacaacgccaagaacaccgtgtacctccagatgaacagcctgaagcctgaggacaccgccgtgtactactgtgccgccgacaccagaagatacacctgtcctgacattgccaccatgcaccggaacttcgattcttggggccagggcacactggtcaccgtttcttctggatccggcggcggaggatctggcggaggcggatctgggggcggaggctctttcgaacaagttcagcttcaacagcctggcgctgagctggtcaaacctggcgcttctgtgaagatgagctgcaaagccagcggctacgccttcagcagctactggatcaactggatgaagcagaaacccggccagggactcgaatggatcggccaaatctatcccggcgacggcgacaccaactacaacggcaagttcaagggcagagccacactgaccgccgatacctctagcagcacagcctacatgcagctgagcagcctgaccagcgaagatagcgccgtgtacttctgtgcccggtccatcacaacagtcgtgggctgcgctatggactattggggccagggaacaagcgtgaccgtgtctagtacgcgtatccagaaccctgatcctgccgtgtaccagctgcgggatagcaagagcagcgacaagagcgtgtgtctgttcaccgacttcgacagccagaccaacgtgtcccagagcaaggactccgacgtgtacatcaccgataagaccgtgctggacatgcggagcatggacttcaagagcaactccgccgtggcctggtccaacaagtccgatttcgcctgcgccaacgccttcaacaacagcattatccccgaggacacattcttcccaagccccgagagcagctgcgacgtgaagctggtggaaaagagcttcgagacagacaccaacctgaacttccagaacctgagcgtgatcggcttcagaatcctgctgctgaaagtggccggctttaacctgctgatgaccctgcggctgtggtccagccgcgccaagagaagcggatctggcgtgaagcagaccctgaatttcgacctgctgaagctggctggcgacgtggaatccaacccaggcccttctagaggccatatgaccgagtacaagcccacggtgcgcctcgccacccgcgacgacgtccccagggccgtacgcaccctcgccgccgcgttcgccgactaccccgccacgcgccacaccgtcgatccggaccgccacatcgagcgggtcaccgagctgcaagaactcttcctcacgcgcgtcgggctcgacatcggcaaggtgtgggtcgcggacgacggcgccgcggtggcggtctggaccacgccggagagcgtcgaagcgggggcggtgttcgccgagatcggcccgcgcatggccgagttgagcggttcccggctggccgcgcagcaacagatggaaggcctcctggcgccgcaccggcccaaggagcccgcgtggttcctggccaccgtcggcgtctcgcccgaccaccagggcaagggtctgggcagcgccgtcgtgctccccggagtggaggcggccgagcgcgccggggtgcccgccttcctggagacctccgcgccccgcaacctccccttctacgagcggctcggcttcaccgtcaccgccgacgtcgaggtgcccgaaggaccgcgcacctggtgcatgacccgcaagcccggtgcctga

SEQ ID NO: 6186 - DNA, 4452 bp, Artificial Sequence
  Synthetic Polynucloetide
atggccttaccagtgaccgccttgctcctgccgctggccttgctgctccacgccgccaggccggaggttcagctgcttgagtctggcggaggactggttcaacctggcggaagcctgagactgtcttgtgccgccagcggcttcacctttagcagctacgccatgagctgggtccgacaggctcctggcaaaggactggaatgggtgtccagcatcagcggcagcggcgactacatctactacgccgatagcgtgaagggcagattcaccatcagccgggacatcagcaagaacaccctgtacctccagatgaacagcctgagagccgaggacaccgccgtgtactactgtgccaaagaaggcaccggcgctaacagcagcctggccgattatagaggccagggcacactggtcaccgtgtctagtggcggaggaagcggcggaggatctgaagtgcaactggtggaatctggaggctctctggtgcagccagggggaagcctgagactgtcttgtgccgcttccggcttcaccttcgacgactacgccatgagctgggtgcgccaggtgccaggcaaaggcctggaatgggtgtccagcatcaactggagcggcacccacaccgattacgccgactccgtgaaaggcagattcacaatcagcagaaacaacgccaacaataccctgtacctgcagatgaactccctgaagtctgaggatacagcagtgtattattgcgccaagaactggcgggacgccggcaccacttggtttgagaaaagcggctctgccggacagggaacccaagtgacagtgtcctccggtaccggcggaggcggatctggcggcggaggtagcggtggcggaggatctgaattcgacatccagatgacacagagccctagcagcctgtctgccagcgtgggagacagagtgaccatcacatgcaaggccagcgaccacatcaacaactggctggcctggtatcagcagaagcctggacaggcccctaagctgctgatctacggcgctaccacactggaaacaggcgtgcccagcagattttctggcagcggctctggcaccgactacaccctgacaatatccagcctccagcctgaggacttcgccacctactactgtcagcagagctggaacaccccttggacattcggccagggcaccaagctggaaatcaagagactcgaggacctgaagaacgtgttcccacctgaggtggccgtgttcgagcctagcgaggccgagatcagccacacccagaaagccaccctcgtgtgcctggctaccggcttctaccccgaccatgtggaactgtcttggtgggtcaacggcaaagaggtgcacagcggcgtgtctaccgacccccagccactgaaagaacagcccgccctgaacgacagccggtactgcctgagcagcagactgagagtgtccgccaccttctggcagaacccccggaaccacttcagatgccaggtgcagttctacggcctgagcgagaacgacgagtggacccaggacagagccaagcccgtgacccagatcgtgtctgccgaagcctggggcagagccgattgcggctttaccagcgagagctaccagcagggcgtgctgagcgccaccatcctgtacgagatcctgctgggcaaggccaccctgtacgccgtgctggtgtctgccctggtgctgatggctatggtcaagcggaaggacagccggggaagggccaagcgatctggatctggagcaacaaacttctcactactcaaacaagcaggtgacgtggaggagaatcccgggcctactagtatggactggatttggcgcatccttttccttgtcggcgctgctaccggcgcccattcccagctccagttgcaagagagcggccctggcttggtaaaaccttccgagacccttagcctcacatgcacggttagtgggggcagcatttcctcaggtgattactattggggatggattcggcaacccccgggtaaaggattggagtggattggtcatatttattatagtggagcgacgtactacaacccaagtctcaaatccagggttacaatatccgtcgatacgagcaggaaccaattcagcttgaaactttctagtgtcaccgcagcagacacagccgtctattactgtacgcgggatgactccagtaattggcggtcccgagggcaagggacactggtcacggtctcctcatctggaggcggtggaagcggtggaggaggatctgaagtgcagctggttgaatctggcggaggactggttcagcctggcggatctctgagactgtcttgtgccgcctctggcttcgccagcgactactatatcatcggctggttcagacaggcccctggcaaagagagagagggcgtcagctgtatcagcagcagatacgccaacaccaactacgccgacagcgtgaagggcagattcaccatcagccgggacaacgccaagaacaccgtgtacctccagatgaacagcctgaagcctgaggacaccgccgtgtactactgtgccgccgacaccagaagatacacctgtcctgacattgccaccatgcaccggaacttcgattcttggggccagggcacactggtcaccgtttcttctggatccggcggcggaggatctggcggaggcggatctgggggcggaggctctttcgaacaagttcagcttcaacagcctggcgctgagctggtcaaacctggcgcttctgtgaagatgagctgcaaagccagcggctacgccttcagcagctactggatcaactggatgaagcagaaacccggccagggactcgaatggatcggccaaatctatcccggcgacggcgacaccaactacaacggcaagttcaagggcagagccacactgaccgccgatacctctagcagcacagcctacatgcagctgagcagcctgaccagcgaagatagcgccgtgtacttctgtgcccggtccatcacaacagtcgtgggctgcgctatggactattggggccagggaacaagcgtgaccgtgtctagtacgcgtgagcagaaactgatctcggaagaggatgggagcggcaccccattcccttctctggcccctcccatcatgctgctggtggacggcaagcagcagatggtggtcgtgtgcctggtgctggatgtggccccacctggactggacagccccatctggtttagcgccggcaatggctctgccctggacgcctttacctacggcccaagccctgccaccgatggcacctggacaaatctggcccacctgagcctgcccagcgaggaactggcttcttgggagcctctcgtgtgccacacaggacctggcgctgagggacacagcagatccacccagcctatgcacctgtctggcgaggccagcaccgccagaacctgtcctcaggaacctctgagaggcacccctggcggagcactgtggctgggagtgctgagactgctgctgttcaagctgctgctgtttgacctgctgctgacctgctcctgtctgtgcgatcctgccggccctctgccttctcctgccaccaccacaagactgagagccctgggcagccacagactgcaccctgccacagagacaggcggcagagaggccacaagcagccctagaccccagcccagagacagaagatggggcgataccccccctggcagaaagcctggatctccagtccgcgccaagagaagcggatctggcgtgaagcagaccctgaatttcgacctgctgaagctggctggcgacgtggaatccaacccaggcccttctagaggccatatgaccgagtacaagcccacggtgcgcctcgccacccgcgacgacgtccccagggccgtacgcaccctcgccgccgcgttcgccgactaccccgccacgcgccacaccgtcgatccggaccgccacatcgagcgggtcaccgagctgcaagaactcttcctcacgcgcgtcgggctcgacatcggcaaggtgtgggtcgcggacgacggcgccgcggtggcggtctggaccacgccggagagcgtcgaagcgggggcggtgttcgccgagatcggcccgcgcatggccgagttgagcggttcccggctggccgcgcagcaacagatggaaggcctcctggcgccgcaccggcccaaggagcccgcgtggttcctggccaccgtcggcgtctcgcccgaccaccagggcaagggtctgggcagcgccgtcgtgctccccggagtggaggcggccgagcgcgccggggtgcccgccttcctggagacctccgcgccccgcaacctccccttctacgagcggctcggcttcaccgtcaccgccgacgtcgaggtgcccgaaggaccgcgcacctggtgcatgacccgcaagcccggtgcctga

SEQ ID NO: 6187 - DNA, 4317 bp, Artificial Sequence
  Synthetic Polynucloetide
atggccttaccagtgaccgccttgctcctgccgctggccttgctgctccacgccgccaggccggaggttcagctgcttgagtctggcggaggactggttcaacctggcggaagcctgagactgtcttgtgccgccagcggcttcacctttagcagctacgccatgagctgggtccgacaggctcctggcaaaggactggaatgggtgtccagcatcagcggcagcggcgactacatctactacgccgatagcgtgaagggcagattcaccatcagccgggacatcagcaagaacaccctgtacctccagatgaacagcctgagagccgaggacaccgccgtgtactactgtgccaaagaaggcaccggcgctaacagcagcctggccgattatagaggccagggcacactggtcaccgtgtctagtggcggaggaagcggcggaggatctgaagtgcaactggtggaatctggaggctctctggtgcagccagggggaagcctgagactgtcttgtgccgcttccggcttcaccttcgacgactacgccatgagctgggtgcgccaggtgccaggcaaaggcctggaatgggtgtccagcatcaactggagcggcacccacaccgattacgccgactccgtgaaaggcagattcacaatcagcagaaacaacgccaacaataccctgtacctgcagatgaactccctgaagtctgaggatacagcagtgtattattgcgccaagaactggcgggacgccggcaccacttggtttgagaaaagcggctctgccggacagggaacccaagtgacagtgtcctccggtaccggcggaggcggatctggcggcggaggtagcggtggcggaggatctgaattcgacatccagatgacacagagccctagcagcctgtctgccagcgtgggagacagagtgaccatcacatgcaaggccagcgaccacatcaacaactggctggcctggtatcagcagaagcctggacaggcccctaagctgctgatctacggcgctaccacactggaaacaggcgtgcccagcagattttctggcagcggctctggcaccgactacaccctgacaatatccagcctccagcctgaggacttcgccacctactactgtcagcagagctggaacaccccttggacattcggccagggcaccaagctggaaatcaagagactcgaggggaaaccaattcccaaccctcttctgggactggattcaaccggcagcggcgacaagcagctggacgccgacgtgtcccccaagcctaccatcttcctgccctctatcgccgagacaaagctccagaaggccggcacctacctgtgcctgctggaaaagttcttcccagatgtgattaagatccactggcaggaaaagaagtccaacaccatcctgggcagccaggaaggcaacaccatgaagaccaacgacacctacatgaagttcagctggctgaccgtgcccgagaagtccctggacaaagaacacagatgcatcgtgcggcacgaaaacaacaagaacggcgtggaccaggaaatcatcttcccacccatcaagaccgatgtgattacaatggaccccaaggacaactgctccaaggacgccaacgataccctgctgctccagctgaccaacaccagcgcctactacatgtacttgttgctgctgctgaagtccgtggtgtacttcgccatcatcacatgctgcctgctgcggagaaccgccttctgctgcaacggcgagaagtctagggccaagcgatctggatctggagcaacaaacttctcactactcaaacaagcaggtgacgtggaggagaatcccgggcctactagtatggactggatttggcgcatccttttccttgtcggcgctgctaccggcgcccattcccagctccagttgcaagagagcggccctggcttggtaaaaccttccgagacccttagcctcacatgcacggttagtgggggcagcatttcctcaggtgattactattggggatggattcggcaacccccgggtaaaggattggagtggattggtcatatttattatagtggagcgacgtactacaacccaagtctcaaatccagggttacaatatccgtcgatacgagcaggaaccaattcagcttgaaactttctagtgtcaccgcagcagacacagccgtctattactgtacgcgggatgactccagtaattggcggtcccgagggcaagggacactggtcacggtctcctcatctggaggcggtggaagcggtggaggaggatctgaagtgcagctggttgaatctggcggaggactggttcagcctggcggatctctgagactgtcttgtgccgcctctggcttcgccagcgactactatatcatcggctggttcagacaggcccctggcaaagagagagagggcgtcagctgtatcagcagcagatacgccaacaccaactacgccgacagcgtgaagggcagattcaccatcagccgggacaacgccaagaacaccgtgtacctccagatgaacagcctgaagcctgaggacaccgccgtgtactactgtgccgccgacaccagaagatacacctgtcctgacattgccaccatgcaccggaacttcgattcttggggccagggcacactggtcaccgtttcttctggatccggcggcggaggatctggcggaggcggatctgggggcggaggctctttcgaacaagttcagcttcaacagcctggcgctgagctggtcaaacctggcgcttctgtgaagatgagctgcaaagccagcggctacgccttcagcagctactggatcaactggatgaagcagaaacccggccagggactcgaatggatcggccaaatctatcccggcgacggcgacaccaactacaacggcaagttcaagggcagagccacactgaccgccgatacctctagcagcacagcctacatgcagctgagcagcctgaccagcgaagatagcgccgtgtacttctgtgcccggtccatcacaacagtcgtgggctgcgctatggactattggggccagggaacaagcgtgaccgtgtctagtacgcgtgagcagaaactgatctcggaagaggatgggagcggcagccagcctcacaccaagcccagcgtgttcgtgatgaagaacggcaccaacgtggcctgcctcgtgaaagagttctaccccaaggacatcaggatcaacctggtgtccagcaagaagatcaccgagttcgaccccgccatcgtgatctcccccagcggcaagtacaacgccgtgaagctggggaagtacgaggacagcaacagcgtgacctgctccgtgcagcacgacaacaagaccgtgcacagcaccgactttgaagtgaaaaccgactccaccgaccacgtgaagcccaaagagacagagaacaccaagcagcccagcaagagctgccacaagcccaaggccatcgtgcacaccgagaaagtgaacatgatgagcctgaccgtgctgggcctgcggatgctgttcgccaaaaccgtggccgtgaacttcctgctgaccgccaagctgttcttcctccgcgccaagagaagcggatctggcgtgaagcagaccctgaatttcgacctgctgaagctggctggcgacgtggaatccaacccaggcccttctagaggccatatgaccgagtacaagcccacggtgcgcctcgccacccgcgacgacgtccccagggccgtacgcaccctcgccgccgcgttcgccgactaccccgccacgcgccacaccgtcgatccggaccgccacatcgagcgggtcaccgagctgcaagaactcttcctcacgcgcgtcgggctcgacatcggcaaggtgtgggtcgcggacgacggcgccgcggtggcggtctggaccacgccggagagcgtcgaagcgggggcggtgttcgccgagatcggcccgcgcatggccgagttgagcggttcccggctggccgcgcagcaacagatggaaggcctcctggcgccgcaccggcccaaggagcccgcgtggttcctggccaccgtcggcgtctcgcccgaccaccagggcaagggtctgggcagcgccgtcgtgctccccggagtggaggcggccgagcgcgccggggtgcccgccttcctggagacctccgcgccccgcaacctccccttctacgagcggctcggcttcaccgtcaccgccgacgtcgaggtgcccgaaggaccgcgcacctggtgcatgacccgcaagcccggtgcctga

SEQ ID NO: 6188 - DNA, 3528 bp, Artificial Sequence
  Synthetic Polynucloetide
atggccttaccagtgaccgccttgctcctgccgctggccttgctgctccacgccgccaggccggaggttcagctgcttgagtctggcggaggactggttcaacctggcggaagcctgagactgtcttgtgccgccagcggcttcacctttagcagctacgccatgagctgggtccgacaggctcctggcaaaggactggaatgggtgtccagcatcagcggcagcggcgactacatctactacgccgatagcgtgaagggcagattcaccatcagccgggacatcagcaagaacaccctgtacctccagatgaacagcctgagagccgaggacaccgccgtgtactactgtgccaaagaaggcaccggcgctaacagcagcctggccgattatagaggccagggcacactggtcaccgtgtctagtggcggaggaagcggcggaggatctgaagtgcaactggtggaatctggaggctctctggtgcagccagggggaagcctgagactgtcttgtgccgcttccggcttcaccttcgacgactacgccatgagctgggtgcgccaggtgccaggcaaaggcctggaatgggtgtccagcatcaactggagcggcacccacaccgattacgccgactccgtgaaaggcagattcacaatcagcagaaacaacgccaacaataccctgtacctgcagatgaactccctgaagtctgaggatacagcagtgtattattgcgccaagaactggcgggacgccggcaccacttggtttgagaaaagcggctctgccggacagggaacccaagtgacagtgtcctccggtaccggcggaggcggatctggcggcggaggtagcggtggcggaggatctgaattcgacatccagatgacacagagccctagcagcctgtctgccagcgtgggagacagagtgaccatcacatgcaaggccagcgaccacatcaacaactggctggcctggtatcagcagaagcctggacaggcccctaagctgctgatctacggcgctaccacactggaaacaggcgtgcccagcagattttctggcagcggctctggcaccgactacaccctgacaatatccagcctccagcctgaggacttcgccacctactactgtcagcagagctggaacaccccttggacattcggccagggcaccaagctggaaatcaagagactcgagagccagcctcacaccaagcccagcgtgttcgtgatgaagaacggcaccaacgtggcctgcctcgtgaaagagttctaccccaaggacatcaggatcaacctggtgtccagcaagaagatcaccgagttcgaccccgccatcgtgatctcccccagcggcaagtacaacgccgtgaagctggggaagtacgaggacagcaacagcgtgacctgctccgtgcagcacgacaacaagaccgtgcacagcaccgactttgaagtgaaaaccgactccaccgaccacgtgaagcccaaagagacagagaacaccaagcagcccagcaagagctgccacaagcccaaggccatcgtgcacaccgagaaagtgaacatgatgagcctgaccgtgctgggcctgcggatgctgttcgccaaaaccgtggccgtgaacttcctgctgaccgccaagctgttcttcctcagggccaagcgatctggatctggagcaacaaacttctcactactcaaacaagcaggtgacgtggaggagaatcccgggcctactagtatggactggatttggcgcatccttttccttgtcggcgctgctaccggcgcccattcccagctccagttgcaagagagcggccctggcttggtaaaaccttccgagacccttagcctcacatgcacggttagtgggggcagcatttcctcaggtgattactattggggatggattcggcaacccccgggtaaaggattggagtggattggtcatatttattatagtggagcgacgtactacaacccaagtctcaaatccagggttacaatatccgtcgatacgagcaggaaccaattcagcttgaaactttctagtgtcaccgcagcagacacagccgtctattactgtacgcgggatgactccagtaattggcggtcccgagggcaagggacactggtcacggtctcctcatctggaggcggtggaagcggtggaggaggatctgaagtgcagctggttgaatctggcggaggactggttcagcctggcggatctctgagactgtcttgtgccgcctctggcttcgccagcgactactatatcatcggctggttcagacaggcccctggcaaagagagagagggcgtcagctgtatcagcagcagatacgccaacaccaactacgccgacagcgtgaagggcagattcaccatcagccgggacaacgccaagaacaccgtgtacctccagatgaacagcctgaagcctgaggacaccgccgtgtactactgtgccgccgacaccagaagatacacctgtcctgacattgccaccatgcaccggaacttcgattcttggggccagggcacactggtcaccgtttcttctggatccggcggcggaggatctggcggaggcggatctgggggcggaggctctttcgaacaagttcagcttcaacagcctggcgctgagctggtcaaacctggcgcttctgtgaagatgagctgcaaagccagcggctacgccttcagcagctactggatcaactggatgaagcagaaacccggccagggactcgaatggatcggccaaatctatcccggcgacggcgacaccaactacaacggcaagttcaagggcagagccacactgaccgccgatacctctagcagcacagcctacatgcagctgagcagcctgaccagcgaagatagcgccgtgtacttctgtgcccggtccatcacaacagtcgtgggctgcgctatggactattggggccagggaacaagcgtgaccgtgtctagtacgcgtgacaagcagctggacgccgacgtgtcccccaagcctaccatcttcctgccctctatcgccgagacaaagctccagaaggccggcacctacctgtgcctgctggaaaagttcttcccagatgtgattaagatccactggcaggaaaagaagtccaacaccatcctgggcagccaggaaggcaacaccatgaagaccaacgacacctacatgaagttcagctggctgaccgtgcccgagaagtccctggacaaagaacacagatgcatcgtgcggcacgaaaacaacaagaacggcgtggaccaggaaatcatcttcccacccatcaagaccgatgtgattacaatggaccccaaggacaactgctccaaggacgccaacgataccctgctgctccagctgaccaacaccagcgcctactacatgtacttgttgctgctgctgaagtccgtggtgtacttcgccatcatcacatgctgcctgctgcggagaaccgccttctgctgcaacggcgagaagtct

SEQ ID NO: 6189 - DNA, 4737 bp, Artificial Sequence
  Synthetic Polynucloetide
atggccttaccagtgaccgccttgctcctgccgctggccttgctgctccacgccgccaggccggaggttcagctgcttgagtctggcggaggactggttcaacctggcggaagcctgagactgtcttgtgccgccagcggcttcacctttagcagctacgccatgagctgggtccgacaggctcctggcaaaggactggaatgggtgtccagcatcagcggcagcggcgactacatctactacgccgatagcgtgaagggcagattcaccatcagccgggacatcagcaagaacaccctgtacctccagatgaacagcctgagagccgaggacaccgccgtgtactactgtgccaaagaaggcaccggcgctaacagcagcctggccgattatagaggccagggcacactggtcaccgtgtctagtggcggaggaagcggcggaggatctgaagtgcaactggtggaatctggaggctctctggtgcagccagggggaagcctgagactgtcttgtgccgcttccggcttcaccttcgacgactacgccatgagctgggtgcgccaggtgccaggcaaaggcctggaatgggtgtccagcatcaactggagcggcacccacaccgattacgccgactccgtgaaaggcagattcacaatcagcagaaacaacgccaacaataccctgtacctgcagatgaactccctgaagtctgaggatacagcagtgtattattgcgccaagaactggcgggacgccggcaccacttggtttgagaaaagcggctctgccggacagggaacccaagtgacagtgtcctccggtaccggcggaggcggatctggcggcggaggtagcggtggcggaggatctgaattcgacatccagatgacacagagccctagcagcctgtctgccagcgtgggagacagagtgaccatcacatgcaaggccagcgaccacatcaacaactggctggcctggtatcagcagaagcctggacaggcccctaagctgctgatctacggcgctaccacactggaaacaggcgtgcccagcagattttctggcagcggctctggcaccgactacaccctgacaatatccagcctccagcctgaggacttcgccacctactactgtcagcagagctggaacaccccttggacattcggccagggcaccaagctggaaatcaagagaggacagcctaaggccaatcctaccgtgacactgttccctccaagcagcgaagaactccaggccaacaaggccacacttgtgtgcctgatctccgacttctaccctggggctgtgacagtggcttggaaggccgatggatctcctgtgaaagccggcgtggaaaccaccaagccatccaagcagagcaacaacaaatacgccgccagctcctacctgagcctgacacctgagcagtggaagtcccacagatcctacagctgccaagtgacccacgaaggcagcaccgtggaaaagacagtggcccctacagagtgcagcggatcccagagcttcggcctgctggaccccaagctgtgctacctgctggatggcatcctgttcatctacggcgtgatcctgaccgccctgttcctgagagtgaagttcagcagaagcgccgacgcccctgcctaccagcagggacagaaccaactgtacaacgagctgaacctgggcagacgggaagagtacgacgtgctggacaagcggagaggcagggaccctgagatgggcggaaagccccagcggagaaagaacccccaggaaggactgtataacgaactccagaaagacaagatggccgaagcctacagcgagatcggcatgaagggcgagcggagaagaggcaagggccacgatggcctgtaccagggcctgagcaccgccaccaaggacacctatgacgccctgcacatgcaggccctgcctccaagaagggccaagcgatctggatctggagcaacaaacttctcactactcaaacaagcaggtgacgtggaggagaatcccgggcctactagtatggactggatttggcgcatccttttccttgtcggcgctgctaccggcgcccattcccagctccagttgcaagagagcggccctggcttggtaaaaccttccgagacccttagcctcacatgcacggttagtgggggcagcatttcctcaggtgattactattggggatggattcggcaacccccgggtaaaggattggagtggattggtcatatttattatagtggagcgacgtactacaacccaagtctcaaatccagggttacaatatccgtcgatacgagcaggaaccaattcagcttgaaactttctagtgtcaccgcagcagacacagccgtctattactgtacgcgggatgactccagtaattggcggtcccgagggcaagggacactggtcacggtctcctcatctggaggcggtggaagcggtggaggaggatctgaagtgcagctggttgaatctggcggaggactggttcagcctggcggatctctgagactgtcttgtgccgcctctggcttcgccagcgactactatatcatcggctggttcagacaggcccctggcaaagagagagagggcgtcagctgtatcagcagcagatacgccaacaccaactacgccgacagcgtgaagggcagattcaccatcagccgggacaacgccaagaacaccgtgtacctccagatgaacagcctgaagcctgaggacaccgccgtgtactactgtgccgccgacaccagaagatacacctgtcctgacattgccaccatgcaccggaacttcgattcttggggccagggcacactggtcaccgtttcttctggatccggcggcggaggatctggcggaggcggatctgggggcggaggctctttcgaacaagttcagcttcaacagcctggcgctgagctggtcaaacctggcgcttctgtgaagatgagctgcaaagccagcggctacgccttcagcagctactggatcaactggatgaagcagaaacccggccagggactcgaatggatcggccaaatctatcccggcgacggcgacaccaactacaacggcaagttcaagggcagagccacactgaccgccgatacctctagcagcacagcctacatgcagctgagcagcctgaccagcgaagatagcgccgtgtacttctgtgcccggtccatcacaacagtcgtgggctgcgctatggactattggggccagggaacaagcgtgaccgtgtctagtgcctctacaaagggaccctccgtgtttcctctggctcccagcagcaagtctacaagcggaggaacagccgctctgggctgcctggtcaaggattactttcccgagcctgtgaccgtgtcctggaatagcggagcactgacaagcggcgtgcacacctttccagccgtgctgcaaagcagcggcctgtactctctgagcagcgtggtcacagtgcctagctctagcctgggcacccagacctacatctgcaatgtgaaccacaagcctagcaacaccaaggtggacaagagagtggaacccaagagctgtggtacccagagttttgggttgttggaccctaaattgtgctatctgttggacggaatcctgttcatttacggagtgatcctgaccgcattgttcctgcgggttaagttttccagatccgcagacgcacccgcttaccaacaagggcagaaccaactctacaatgaacttaatttggggcggagggaagagtacgacgttctggacaaaaggaggggacgagatcccgagatgggcggaaagcctcagcgaaggaagaatccgcaagaggggctttataacgaactccagaaagataaaatggcagaagcctatagtgagattgggatgaagggagaaaggaggaggggtaaaggtcacgatgggttgtaccaaggattgagcacagccactaaagatacctatgatgcgctccacatgcaggccctgccgccaagacgcgccaagagaagcggatctggcgtgaagcagaccctgaatttcgacctgctgaagctggctggcgacgtggaatccaacccaggcccttctagaggccatatgaccgagtacaagcccacggtgcgcctcgccacccgcgacgacgtccccagggccgtacgcaccctcgccgccgcgttcgccgactaccccgccacgcgccacaccgtcgatccggaccgccacatcgagcgggtcaccgagctgcaagaactcttcctcacgcgcgtcgggctcgacatcggcaaggtgtgggtcgcggacgacggcgccgcggtggcggtctggaccacgccggagagcgtcgaagcgggggcggtgttcgccgagatcggcccgcgcatggccgagttgagcggttcccggctggccgcgcagcaacagatggaaggcctcctggcgccgcaccggcccaaggagcccgcgtggttcctggccaccgtcggcgtctcgcccgaccaccagggcaagggtctgggcagcgccgtcgtgctccccggagtggaggcggccgagcgcgccggggtgcccgccttcctggagacctccgcgccccgcaacctccccttctacgagcggctcggcttcaccgtcaccgccgacgtcgaggtgcccgaaggaccgcgcacctggtgcatgacccgcaagcccggtgcctga

SEQ ID NO: 6190 - DNA, 4092 bp, Artificial Sequence
  Synthetic Polynucloetide
atggccttaccagtgaccgccttgctcctgccgctggccttgctgctccacgccgccaggccggaggttcagctgcttgagtctggcggaggactggttcaacctggcggaagcctgagactgtcttgtgccgccagcggcttcacctttagcagctacgccatgagctgggtccgacaggctcctggcaaaggactggaatgggtgtccagcatcagcggcagcggcgactacatctactacgccgatagcgtgaagggcagattcaccatcagccgggacatcagcaagaacaccctgtacctccagatgaacagcctgagagccgaggacaccgccgtgtactactgtgccaaagaaggcaccggcgctaacagcagcctggccgattatagaggccagggcacactggtcaccgtgtctagtggcggaggaagcggcggaggatctgaagtgcaactggtggaatctggaggctctctggtgcagccagggggaagcctgagactgtcttgtgccgcttccggcttcaccttcgacgactacgccatgagctgggtgcgccaggtgccaggcaaaggcctggaatgggtgtccagcatcaactggagcggcacccacaccgattacgccgactccgtgaaaggcagattcacaatcagcagaaacaacgccaacaataccctgtacctgcagatgaactccctgaagtctgaggatacagcagtgtattattgcgccaagaactggcgggacgccggcaccacttggtttgagaaaagcggctctgccggacagggaacccaagtgacagtgtcctccggtaccggcggaggcggatctggcggcggaggtagcggtggcggaggatctgaattcgacatccagatgacacagagccctagcagcctgtctgccagcgtgggagacagagtgaccatcacatgcaaggccagcgaccacatcaacaactggctggcctggtatcagcagaagcctggacaggcccctaagctgctgatctacggcgctaccacactggaaacaggcgtgcccagcagattttctggcagcggctctggcaccgactacaccctgacaatatccagcctccagcctgaggacttcgccacctactactgtcagcagagctggaacaccccttggacattcggccagggcaccaagctggaaatcaagagactcgaggacctgaagaacgtgttcccacctgaggtggccgtgttcgagcctagcgaggccgagatcagccacacccagaaagccaccctcgtgtgcctggctaccggcttctaccccgaccatgtggaactgtcttggtgggtcaacggcaaagaggtgcacagcggcgtgtctaccgacccccagccactgaaagaacagcccgccctgaacgacagccggtactgcctgagcagcagactgagagtgtccgccaccttctggcagaacccccggaaccacttcagatgccaggtgcagttctacggcctgagcgagaacgacgagtggacccaggacagagccaagcccgtgacccagatcgtgtctgccgaagcctggggcagagccgattgcggatcccagagcttcggcctgctggaccccaagctgtgctacctgctggatggcatcctgttcatctacggcgtgatcctgaccgccctgttcctgagagtgaagttcagcagaagcgccgacgcccctgcctaccagcagggacagaaccaactgtacaacgagctgaacctgggcagacgggaagagtacgacgtgctggacaagcggagaggcagggaccctgagatgggcggaaagccccagcggagaaagaacccccaggaaggactgtataacgaactccagaaagacaagatggccgaagcctacagcgagatcggcatgaagggcgagcggagaagaggcaagggccacgatggcctgtaccagggcctgagcaccgccaccaaggacacctatgacgccctgcacatgcaggccctgcctccaagaagggccaagcgatctggatctggagcaacaaacttctcactactcaaacaagcaggtgacgtggaggagaatcccgggcctactagtatggactggatttggcgcatccttttccttgtcggcgctgctaccggcgcccattcccagctccagttgcaagagagcggccctggcttggtaaaaccttccgagacccttagcctcacatgcacggttagtgggggcagcatttcctcaggtgattactattggggatggattcggcaacccccgggtaaaggattggagtggattggtcatatttattatagtggagcgacgtactacaacccaagtctcaaatccagggttacaatatccgtcgatacgagcaggaaccaattcagcttgaaactttctagtgtcaccgcagcagacacagccgtctattactgtacgcgggatgactccagtaattggcggtcccgagggcaagggacactggtcacggtctcctcatctggaggcggtggaagcggtggaggaggatctgaagtgcagctggttgaatctggcggaggactggttcagcctggcggatctctgagactgtcttgtgccgcctctggcttcgccagcgactactatatcatcggctggttcagacaggcccctggcaaagagagagagggcgtcagctgtatcagcagcagatacgccaacaccaactacgccgacagcgtgaagggcagattcaccatcagccgggacaacgccaagaacaccgtgtacctccagatgaacagcctgaagcctgaggacaccgccgtgtactactgtgccgccgacaccagaagatacacctgtcctgacattgccaccatgcaccggaacttcgattcttggggccagggcacactggtcaccgtttcttctggatccggcggcggaggatctggcggaggcggatctgggggcggaggctctttcgaacaagttcagcttcaacagcctggcgctgagctggtcaaacctggcgcttctgtgaagatgagctgcaaagccagcggctacgccttcagcagctactggatcaactggatgaagcagaaacccggccagggactcgaatggatcggccaaatctatcccggcgacggcgacaccaactacaacggcaagttcaagggcagagccacactgaccgccgatacctctagcagcacagcctacatgcagctgagcagcctgaccagcgaagatagcgccgtgtacttctgtgcccggtccatcacaacagtcgtgggctgcgctatggactattggggccagggaacaagcgtgaccgtgtctagtacgcgtatccagaaccctgatcctgccgtgtaccagctgcgggatagcaagagcagcgacaagagcgtgtgtctgttcaccgacttcgacagccagaccaacgtgtcccagagcaaggactccgacgtgtacatcaccgataagaccgtgctggacatgcggagcatggacttcaagagcaactccgccgtggcctggtccaacaagtccgatttcgcctgcgccaacgccttcaacaacagcattatccccgaggacacattcttcccaagccccgagagcagctgcggtacccagagttttgggttgttggaccctaaattgtgctatctgttggacggaatcctgttcatttacggagtgatcctgaccgcattgttcctgcgggttaagttttccagatccgcagacgcacccgcttaccaacaagggcagaaccaactctacaatgaacttaatttggggcggagggaagagtacgacgttctggacaaaaggaggggacgagatcccgagatgggcggaaagcctcagcgaaggaagaatccgcaagaggggctttataacgaactccagaaagataaaatggcagaagcctatagtgagattgggatgaagggagaaaggaggaggggtaaaggtcacgatgggttgtaccaaggattgagcacagccactaaagatacctatgatgcgctccacatgcaggccctgccgccaaga

SEQ ID NO: 6191 - DNA, 4092 bp, Artificial Sequence
  Synthetic Polynucloetide
atggccttaccagtgaccgccttgctcctgccgctggccttgctgctccacgccgccaggccggaggttcagctgcttgagtctggcggaggactggttcaacctggcggaagcctgagactgtcttgtgccgccagcggcttcacctttagcagctacgccatgagctgggtccgacaggctcctggcaaaggactggaatgggtgtccagcatcagcggcagcggcgactacatctactacgccgatagcgtgaagggcagattcaccatcagccgggacatcagcaagaacaccctgtacctccagatgaacagcctgagagccgaggacaccgccgtgtactactgtgccaaagaaggcaccggcgctaacagcagcctggccgattatagaggccagggcacactggtcaccgtgtctagtggcggaggaagcggcggaggatctgaagtgcaactggtggaatctggaggctctctggtgcagccagggggaagcctgagactgtcttgtgccgcttccggcttcaccttcgacgactacgccatgagctgggtgcgccaggtgccaggcaaaggcctggaatgggtgtccagcatcaactggagcggcacccacaccgattacgccgactccgtgaaaggcagattcacaatcagcagaaacaacgccaacaataccctgtacctgcagatgaactccctgaagtctgaggatacagcagtgtattattgcgccaagaactggcgggacgccggcaccacttggtttgagaaaagcggctctgccggacagggaacccaagtgacagtgtcctccggtaccggcggaggcggatctggcggcggaggtagcggtggcggaggatctgaattcgacatccagatgacacagagccctagcagcctgtctgccagcgtgggagacagagtgaccatcacatgcaaggccagcgaccacatcaacaactggctggcctggtatcagcagaagcctggacaggcccctaagctgctgatctacggcgctaccacactggaaacaggcgtgcccagcagattttctggcagcggctctggcaccgactacaccctgacaatatccagcctccagcctgaggacttcgccacctactactgtcagcagagctggaacaccccttggacattcggccagggcaccaagctggaaatcaagagactcgaggacctgaagaacgtgttcccacctgaggtggccgtgttcgagcctagcaaggccgagatcgcccacacccagaaagccaccctcgtgtgcctggctaccggcttctaccccgaccatgtggaactgtcttggtgggtcaacggcaaagaggtgcacagcggcgtgtgtaccgacccccagccactgaaagaacagcccgccctgaacgacagccggtactgcctgagcagcagactgagagtgtccgccaccttctggcagaacccccggaaccacttcagatgccaggtgcagttctacggcctgagcgagaacgacgagtggacccaggacagagccaagcccgtgacccagatcgtgtctgccgaagcctggggcagagccgattgcggatcccagagcttcggcctgctggaccccaagctgtgctacctgctggatggcatcctgttcatctacggcgtgatcctgaccgccctgttcctgagagtgaagttcagcagaagcgccgacgcccctgcctaccagcagggacagaaccaactgtacaacgagctgaacctgggcagacgggaagagtacgacgtgctggacaagcggagaggcagggaccctgagatgggcggaaagccccagcggagaaagaacccccaggaaggactgtataacgaactccagaaagacaagatggccgaagcctacagcgagatcggcatgaagggcgagcggagaagaggcaagggccacgatggcctgtaccagggcctgagcaccgccaccaaggacacctatgacgccctgcacatgcaggccctgcctccaagaagggccaagcgatctggatctggagcaacaaacttctcactactcaaacaagcaggtgacgtggaggagaatcccgggcctactagtatggactggatttggcgcatccttttccttgtcggcgctgctaccggcgcccattcccagctccagttgcaagagagcggccctggcttggtaaaaccttccgagacccttagcctcacatgcacggttagtgggggcagcatttcctcaggtgattactattggggatggattcggcaacccccgggtaaaggattggagtggattggtcatatttattatagtggagcgacgtactacaacccaagtctcaaatccagggttacaatatccgtcgatacgagcaggaaccaattcagcttgaaactttctagtgtcaccgcagcagacacagccgtctattactgtacgcgggatgactccagtaattggcggtcccgagggcaagggacactggtcacggtctcctcatctggaggcggtggaagcggtggaggaggatctgaagtgcagctggttgaatctggcggaggactggttcagcctggcggatctctgagactgtcttgtgccgcctctggcttcgccagcgactactatatcatcggctggttcagacaggcccctggcaaagagagagagggcgtcagctgtatcagcagcagatacgccaacaccaactacgccgacagcgtgaagggcagattcaccatcagccgggacaacgccaagaacaccgtgtacctccagatgaacagcctgaagcctgaggacaccgccgtgtactactgtgccgccgacaccagaagatacacctgtcctgacattgccaccatgcaccggaacttcgattcttggggccagggcacactggtcaccgtttcttctggatccggcggcggaggatctggcggaggcggatctgggggcggaggctctttcgaacaagttcagcttcaacagcctggcgctgagctggtcaaacctggcgcttctgtgaagatgagctgcaaagccagcggctacgccttcagcagctactggatcaactggatgaagcagaaacccggccagggactcgaatggatcggccaaatctatcccggcgacggcgacaccaactacaacggcaagttcaagggcagagccacactgaccgccgatacctctagcagcacagcctacatgcagctgagcagcctgaccagcgaagatagcgccgtgtacttctgtgcccggtccatcacaacagtcgtgggctgcgctatggactattggggccagggaacaagcgtgaccgtgtctagtacgcgtatccagaaccctgatcctgccgtgtaccagctgcgggatagcaagagcagcgacaagagcgtgtgtctgttcaccgacttcgacagccagaccaacgtgtcccagagcaaggactccgacgtgtacatcaccgataagtgcgtgctggacatgcggagcatggacttcaagagcaactccgccgtggcctggtccaacaagtccgatttcgcctgcgccaacgccttcaacaacagcattatccccgaggacacattcttcccaagcagcgacgtgccctgcggtacccagagttttgggttgttggaccctaaattgtgctatctgttggacggaatcctgttcatttacggagtgatcctgaccgcattgttcctgcgggttaagttttccagatccgcagacgcacccgcttaccaacaagggcagaaccaactctacaatgaacttaatttggggcggagggaagagtacgacgttctggacaaaaggaggggacgagatcccgagatgggcggaaagcctcagcgaaggaagaatccgcaagaggggctttataacgaactccagaaagataaaatggcagaagcctatagtgagattgggatgaagggagaaaggaggaggggtaaaggtcacgatgggttgtaccaaggattgagcacagccactaaagatacctatgatgcgctccacatgcaggccctgccgccaaga

SEQ ID NO: 6192 - DNA, 4305 bp, Artificial Sequence
  Synthetic Polynucloetide
atggccttaccagtgaccgccttgctcctgccgctggccttgctgctccacgccgccaggccggaggttcagctgcttgagtctggcggaggactggttcaacctggcggaagcctgagactgtcttgtgccgccagcggcttcacctttagcagctacgccatgagctgggtccgacaggctcctggcaaaggactggaatgggtgtccagcatcagcggcagcggcgactacatctactacgccgatagcgtgaagggcagattcaccatcagccgggacatcagcaagaacaccctgtacctccagatgaacagcctgagagccgaggacaccgccgtgtactactgtgccaaagaaggcaccggcgctaacagcagcctggccgattatagaggccagggcacactggtcaccgtgtctagtggcggaggaagcggcggaggatctgaagtgcaactggtggaatctggaggctctctggtgcagccagggggaagcctgagactgtcttgtgccgcttccggcttcaccttcgacgactacgccatgagctgggtgcgccaggtgccaggcaaaggcctggaatgggtgtccagcatcaactggagcggcacccacaccgattacgccgactccgtgaaaggcagattcacaatcagcagaaacaacgccaacaataccctgtacctgcagatgaactccctgaagtctgaggatacagcagtgtattattgcgccaagaactggcgggacgccggcaccacttggtttgagaaaagcggctctgccggacagggaacccaagtgacagtgtcctccggtaccggcggaggcggatctggcggcggaggtagcggtggcggaggatctgaattcgacatccagatgacacagagccctagcagcctgtctgccagcgtgggagacagagtgaccatcacatgcaaggccagcgaccacatcaacaactggctggcctggtatcagcagaagcctggacaggcccctaagctgctgatctacggcgctaccacactggaaacaggcgtgcccagcagattttctggcagcggctctggcaccgactacaccctgacaatatccagcctccagcctgaggacttcgccacctactactgtcagcagagctggaacaccccttggacattcggccagggcaccaagctggaaatcaagagactcgaggggaaaccaattcccaaccctcttctgggactggattcaaccggcagcggcgaggacctgaagaacgtgttcccacctgaggtggccgtgttcgagcctagcgaggccgagatcagccacacccagaaagccaccctcgtgtgcctggctaccggcttctaccccgaccatgtggaactgtcttggtgggtcaacggcaaagaggtgcacagcggcgtgtctaccgacccccagccactgaaagaacagcccgccctgaacgacagccggtactgcctgagcagcagactgagagtgtccgccaccttctggcagaacccccggaaccacttcagatgccaggtgcagttctacggcctgagcgagaacgacgagtggacccaggacagagccaagcccgtgacccagatcgtgtctgccgaagcctggggcagagccgattgcggatcccagagcttcggcctgctggaccccaagctgtgctacctgctggatggcatcctgttcatctacggcgtgatcctgaccgccctgttcctgagagtgaagttcagcagaagcgccgacgcccctgcctaccagcagggacagaaccaactgtacaacgagctgaacctgggcagacgggaagagtacgacgtgctggacaagcggagaggcagggaccctgagatgggcggaaagccccagcggagaaagaacccccaggaaggactgtataacgaactccagaaagacaagatggccgaagcctacagcgagatcggcatgaagggcgagcggagaagaggcaagggccacgatggcctgtaccagggcctgagcaccgccaccaaggacacctatgacgccctgcacatgcaggccctgcctccaagaagggccaagcgatctggatctggagcaacaaacttctcactactcaaacaagcaggtgacgtggaggagaatcccgggcctactagtatggactggatttggcgcatccttttccttgtcggcgctgctaccggcgcccattcccagctccagttgcaagagagcggccctggcttggtaaaaccttccgagacccttagcctcacatgcacggttagtgggggcagcatttcctcaggtgattactattggggatggattcggcaacccccgggtaaaggattggagtggattggtcatatttattatagtggagcgacgtactacaacccaagtctcaaatccagggttacaatatccgtcgatacgagcaggaaccaattcagcttgaaactttctagtgtcaccgcagcagacacagccgtctattactgtacgcgggatgactccagtaattggcggtcccgagggcaagggacactggtcacggtctcctcatctggaggcggtggaagcggtggaggaggatctgaagtgcagctggttgaatctggcggaggactggttcagcctggcggatctctgagactgtcttgtgccgcctctggcttcgccagcgactactatatcatcggctggttcagacaggcccctggcaaagagagagagggcgtcagctgtatcagcagcagatacgccaacaccaactacgccgacagcgtgaagggcagattcaccatcagccgggacaacgccaagaacaccgtgtacctccagatgaacagcctgaagcctgaggacaccgccgtgtactactgtgccgccgacaccagaagatacacctgtcctgacattgccaccatgcaccggaacttcgattcttggggccagggcacactggtcaccgtttcttctggatccggcggcggaggatctggcggaggcggatctgggggcggaggctctttcgaacaagttcagcttcaacagcctggcgctgagctggtcaaacctggcgcttctgtgaagatgagctgcaaagccagcggctacgccttcagcagctactggatcaactggatgaagcagaaacccggccagggactcgaatggatcggccaaatctatcccggcgacggcgacaccaactacaacggcaagttcaagggcagagccacactgaccgccgatacctctagcagcacagcctacatgcagctgagcagcctgaccagcgaagatagcgccgtgtacttctgtgcccggtccatcacaacagtcgtgggctgcgctatggactattggggccagggaacaagcgtgaccgtgtctagtacgcgtgagcagaaactgatctcggaagaggatgggagcggcatccagaaccctgatcctgccgtgtaccagctgcgggatagcaagagcagcgacaagagcgtgtgtctgttcaccgacttcgacagccagaccaacgtgtcccagagcaaggactccgacgtgtacatcaccgataagaccgtgctggacatgcggagcatggacttcaagagcaactccgccgtggcctggtccaacaagtccgatttcgcctgcgccaacgccttcaacaacagcattatccccgaggacacattcttcccaagccccgagagcagctgcggtacccagagttttgggttgttggaccctaaattgtgctatctgttggacggaatcctgttcatttacggagtgatcctgaccgcattgttcctgaggagcaagcggtcacggctgctccacagcgattacatgaatatgacaccacgaagaccgggtcctactcgcaaacactaccaaccctacgcacctccccgcgactttgcagcgtaccgatctcgggttaagttttccagatccgcagacgcacccgcttaccaacaagggcagaaccaactctacaatgaacttaatttggggcggagggaagagtacgacgttctggacaaaaggaggggacgagatcccgagatgggcggaaagcctcagcgaaggaagaatccgcaagaggggctttataacgaactccagaaagataaaatggcagaagcctatagtgagattgggatgaagggagaaaggaggaggggtaaaggtcacgatgggttgtaccaaggattgagcacagccactaaagatacctatgatgcgctccacatgcaggccctgccgccaaga

SEQ ID NO: 6193 - DNA, 4428 bp, Artificial Sequence
  Synthetic Polynucloetide
atggccttaccagtgaccgccttgctcctgccgctggccttgctgctccacgccgccaggccggaggttcagctgcttgagtctggcggaggactggttcaacctggcggaagcctgagactgtcttgtgccgccagcggcttcacctttagcagctacgccatgagctgggtccgacaggctcctggcaaaggactggaatgggtgtccagcatcagcggcagcggcgactacatctactacgccgatagcgtgaagggcagattcaccatcagccgggacatcagcaagaacaccctgtacctccagatgaacagcctgagagccgaggacaccgccgtgtactactgtgccaaagaaggcaccggcgctaacagcagcctggccgattatagaggccagggcacactggtcaccgtgtctagtggcggaggaagcggcggaggatctgaagtgcaactggtggaatctggaggctctctggtgcagccagggggaagcctgagactgtcttgtgccgcttccggcttcaccttcgacgactacgccatgagctgggtgcgccaggtgccaggcaaaggcctggaatgggtgtccagcatcaactggagcggcacccacaccgattacgccgactccgtgaaaggcagattcacaatcagcagaaacaacgccaacaataccctgtacctgcagatgaactccctgaagtctgaggatacagcagtgtattattgcgccaagaactggcgggacgccggcaccacttggtttgagaaaagcggctctgccggacagggaacccaagtgacagtgtcctccggtaccggcggaggcggatctggcggcggaggtagcggtggcggaggatctgaattcgacatccagatgacacagagccctagcagcctgtctgccagcgtgggagacagagtgaccatcacatgcaaggccagcgaccacatcaacaactggctggcctggtatcagcagaagcctggacaggcccctaagctgctgatctacggcgctaccacactggaaacaggcgtgcccagcagattttctggcagcggctctggcaccgactacaccctgacaatatccagcctccagcctgaggacttcgccacctactactgtcagcagagctggaacaccccttggacattcggccagggcaccaagctggaaatcaagagactcgaggggaaaccaattcccaaccctcttctgggactggattcaaccggcagcggcgaggacctgaagaacgtgttcccacctgaggtggccgtgttcgagcctagcgaggccgagatcagccacacccagaaagccaccctcgtgtgcctggctaccggcttctaccccgaccatgtggaactgtcttggtgggtcaacggcaaagaggtgcacagcggcgtgtctaccgacccccagccactgaaagaacagcccgccctgaacgacagccggtactgcctgagcagcagactgagagtgtccgccaccttctggcagaacccccggaaccacttcagatgccaggtgcagttctacggcctgagcgagaacgacgagtggacccaggacagagccaagcccgtgacccagatcgtgtctgccgaagcctggggcagagccgattgcggatcccagagcttcggcctgctggaccccaagctgtgctacctgctggatggcatcctgttcatctacggcgtgatcctgaccgccctgttcctgaggagtaagaggagcaggctcctgcacagtgactacatgaacatgactccacgccgccccggacccacccgcaagcattaccagccctatgccccaccacgcgacttcgcagcctatcgctccagagtgaagttcagcagaagcgccgacgcccctgcctaccagcagggacagaaccaactgtacaacgagctgaacctgggcagacgggaagagtacgacgtgctggacaagcggagaggcagggaccctgagatgggcggaaagccccagcggagaaagaacccccaggaaggactgtataacgaactccagaaagacaagatggccgaagcctacagcgagatcggcatgaagggcgagcggagaagaggcaagggccacgatggcctgtaccagggcctgagcaccgccaccaaggacacctatgacgccctgcacatgcaggccctgcctccaagaagggccaagcgatctggatctggagcaacaaacttctcactactcaaacaagcaggtgacgtggaggagaatcccgggcctactagtatggactggatttggcgcatccttttccttgtcggcgctgctaccggcgcccattcccagctccagttgcaagagagcggccctggcttggtaaaaccttccgagacccttagcctcacatgcacggttagtgggggcagcatttcctcaggtgattactattggggatggattcggcaacccccgggtaaaggattggagtggattggtcatatttattatagtggagcgacgtactacaacccaagtctcaaatccagggttacaatatccgtcgatacgagcaggaaccaattcagcttgaaactttctagtgtcaccgcagcagacacagccgtctattactgtacgcgggatgactccagtaattggcggtcccgagggcaagggacactggtcacggtctcctcatctggaggcggtggaagcggtggaggaggatctgaagtgcagctggttgaatctggcggaggactggttcagcctggcggatctctgagactgtcttgtgccgcctctggcttcgccagcgactactatatcatcggctggttcagacaggcccctggcaaagagagagagggcgtcagctgtatcagcagcagatacgccaacaccaactacgccgacagcgtgaagggcagattcaccatcagccgggacaacgccaagaacaccgtgtacctccagatgaacagcctgaagcctgaggacaccgccgtgtactactgtgccgccgacaccagaagatacacctgtcctgacattgccaccatgcaccggaacttcgattcttggggccagggcacactggtcaccgtttcttctggatccggcggcggaggatctggcggaggcggatctgggggcggaggctctttcgaacaagttcagcttcaacagcctggcgctgagctggtcaaacctggcgcttctgtgaagatgagctgcaaagccagcggctacgccttcagcagctactggatcaactggatgaagcagaaacccggccagggactcgaatggatcggccaaatctatcccggcgacggcgacaccaactacaacggcaagttcaagggcagagccacactgaccgccgatacctctagcagcacagcctacatgcagctgagcagcctgaccagcgaagatagcgccgtgtacttctgtgcccggtccatcacaacagtcgtgggctgcgctatggactattggggccagggaacaagcgtgaccgtgtctagtacgcgtgagcagaaactgatctcggaagaggatgggagcggcatccagaaccctgatcctgccgtgtaccagctgcgggatagcaagagcagcgacaagagcgtgtgtctgttcaccgacttcgacagccagaccaacgtgtcccagagcaaggactccgacgtgtacatcaccgataagaccgtgctggacatgcggagcatggacttcaagagcaactccgccgtggcctggtccaacaagtccgatttcgcctgcgccaacgccttcaacaacagcattatccccgaggacacattcttcccaagccccgagagcagctgcggtacccagagttttgggttgttggaccctaaattgtgctatctgttggacggaatcctgttcatttacggagtgatcctgaccgcattgttcctgaggagcaagcggtcacggctgctccacagcgattacatgaatatgacaccacgaagaccgggtcctactcgcaaacactaccaaccctacgcacctccccgcgactttgcagcgtaccgatctcgggttaagttttccagatccgcagacgcacccgcttaccaacaagggcagaaccaactctacaatgaacttaatttggggcggagggaagagtacgacgttctggacaaaaggaggggacgagatcccgagatgggcggaaagcctcagcgaaggaagaatccgcaagaggggctttataacgaactccagaaagataaaatggcagaagcctatagtgagattgggatgaagggagaaaggaggaggggtaaaggtcacgatgggttgtaccaaggattgagcacagccactaaagatacctatgatgcgctccacatgcaggccctgccgccaaga

SEQ ID NO: 6194 - DNA, 4311 bp, Artificial Sequence
  Synthetic Polynucloetide
atggccttaccagtgaccgccttgctcctgccgctggccttgctgctccacgccgccaggccggaggttcagctgcttgagtctggcggaggactggttcaacctggcggaagcctgagactgtcttgtgccgccagcggcttcacctttagcagctacgccatgagctgggtccgacaggctcctggcaaaggactggaatgggtgtccagcatcagcggcagcggcgactacatctactacgccgatagcgtgaagggcagattcaccatcagccgggacatcagcaagaacaccctgtacctccagatgaacagcctgagagccgaggacaccgccgtgtactactgtgccaaagaaggcaccggcgctaacagcagcctggccgattatagaggccagggcacactggtcaccgtgtctagtggcggaggaagcggcggaggatctgaagtgcaactggtggaatctggaggctctctggtgcagccagggggaagcctgagactgtcttgtgccgcttccggcttcaccttcgacgactacgccatgagctgggtgcgccaggtgccaggcaaaggcctggaatgggtgtccagcatcaactggagcggcacccacaccgattacgccgactccgtgaaaggcagattcacaatcagcagaaacaacgccaacaataccctgtacctgcagatgaactccctgaagtctgaggatacagcagtgtattattgcgccaagaactggcgggacgccggcaccacttggtttgagaaaagcggctctgccggacagggaacccaagtgacagtgtcctccggtaccggcggaggcggatctggcggcggaggtagcggtggcggaggatctgaattcgacatccagatgacacagagccctagcagcctgtctgccagcgtgggagacagagtgaccatcacatgcaaggccagcgaccacatcaacaactggctggcctggtatcagcagaagcctggacaggcccctaagctgctgatctacggcgctaccacactggaaacaggcgtgcccagcagattttctggcagcggctctggcaccgactacaccctgacaatatccagcctccagcctgaggacttcgccacctactactgtcagcagagctggaacaccccttggacattcggccagggcaccaagctggaaatcaagagactcgaggggaaaccaattcccaaccctcttctgggactggattcaaccggcagcggcgaggacctgaagaacgtgttcccacctgaggtggccgtgttcgagcctagcgaggccgagatcagccacacccagaaagccaccctcgtgtgcctggctaccggcttctaccccgaccatgtggaactgtcttggtgggtcaacggcaaagaggtgcacagcggcgtgtctaccgacccccagccactgaaagaacagcccgccctgaacgacagccggtactgcctgagcagcagactgagagtgtccgccaccttctggcagaacccccggaaccacttcagatgccaggtgcagttctacggcctgagcgagaacgacgagtggacccaggacagagccaagcccgtgacccagatcgtgtctgccgaagcctggggcagagccgattgcggatcccagagcttcggcctgctggaccccaagctgtgctacctgctggatggcatcctgttcatctacggcgtgatcctgaccgccctgttcctgagagtgaagttcagcagaagcgccgacgcccctgcctaccagcagggacagaaccaactgtacaacgagctgaacctgggcagacgggaagagtacgacgtgctggacaagcggagaggcagggaccctgagatgggcggaaagccccagcggagaaagaacccccaggaaggactgtataacgaactccagaaagacaagatggccgaagcctacagcgagatcggcatgaagggcgagcggagaagaggcaagggccacgatggcctgtaccagggcctgagcaccgccaccaaggacacctatgacgccctgcacatgcaggccctgcctccaagaagggccaagcgatctggatctggagcaacaaacttctcactactcaaacaagcaggtgacgtggaggagaatcccgggcctactagtatggactggatttggcgcatccttttccttgtcggcgctgctaccggcgcccattcccagctccagttgcaagagagcggccctggcttggtaaaaccttccgagacccttagcctcacatgcacggttagtgggggcagcatttcctcaggtgattactattggggatggattcggcaacccccgggtaaaggattggagtggattggtcatatttattatagtggagcgacgtactacaacccaagtctcaaatccagggttacaatatccgtcgatacgagcaggaaccaattcagcttgaaactttctagtgtcaccgcagcagacacagccgtctattactgtacgcgggatgactccagtaattggcggtcccgagggcaagggacactggtcacggtctcctcatctggaggcggtggaagcggtggaggaggatctgaagtgcagctggttgaatctggcggaggactggttcagcctggcggatctctgagactgtcttgtgccgcctctggcttcgccagcgactactatatcatcggctggttcagacaggcccctggcaaagagagagagggcgtcagctgtatcagcagcagatacgccaacaccaactacgccgacagcgtgaagggcagattcaccatcagccgggacaacgccaagaacaccgtgtacctccagatgaacagcctgaagcctgaggacaccgccgtgtactactgtgccgccgacaccagaagatacacctgtcctgacattgccaccatgcaccggaacttcgattcttggggccagggcacactggtcaccgtttcttctggatccggcggcggaggatctggcggaggcggatctgggggcggaggctctttcgaacaagttcagcttcaacagcctggcgctgagctggtcaaacctggcgcttctgtgaagatgagctgcaaagccagcggctacgccttcagcagctactggatcaactggatgaagcagaaacccggccagggactcgaatggatcggccaaatctatcccggcgacggcgacaccaactacaacggcaagttcaagggcagagccacactgaccgccgatacctctagcagcacagcctacatgcagctgagcagcctgaccagcgaagatagcgccgtgtacttctgtgcccggtccatcacaacagtcgtgggctgcgctatggactattggggccagggaacaagcgtgaccgtgtctagtacgcgtgagcagaaactgatctcggaagaggatctggggagcggcatccagaaccctgatcctgccgtgtaccagctgcgggatagcaagagcagcgacaagagcgtgtgtctgttcaccgacttcgacagccagaccaacgtgtcccagagcaaggactccgacgtgtacatcaccgataagaccgtgctggacatgcggagcatggacttcaagagcaactccgccgtggcctggtccaacaagtccgatttcgcctgcgccaacgccttcaacaacagcattatccccgaggacacattcttcccaagccccgagagcagctgcggtacccagagttttgggttgttggaccctaaattgtgctatctgttggacggaatcctgttcatttacggagtgatcctgaccgcattgttcctgaagagaggccggaagaagctgctgtacatcttcaagcagcctttcatgcggcccgtgcagaccacccaggaagaggacggctgctcctgccggttccccgaggaagaagaaggcggctgcgagctgcgggttaagttttccagatccgcagacgcacccgcttaccaacaagggcagaaccaactctacaatgaacttaatttggggcggagggaagagtacgacgttctggacaaaaggaggggacgagatcccgagatgggcggaaagcctcagcgaaggaagaatccgcaagaggggctttataacgaactccagaaagataaaatggcagaagcctatagtgagattgggatgaagggagaaaggaggaggggtaaaggtcacgatgggttgtaccaaggattgagcacagccactaaagatacctatgatgcgctccacatgcaggccctgccgccaaga

SEQ ID NO: 6195 - DNA, 4437 bp, Artificial Sequence
  Synthetic Polynucloetide
atggccttaccagtgaccgccttgctcctgccgctggccttgctgctccacgccgccaggccggaggttcagctgcttgagtctggcggaggactggttcaacctggcggaagcctgagactgtcttgtgccgccagcggcttcacctttagcagctacgccatgagctgggtccgacaggctcctggcaaaggactggaatgggtgtccagcatcagcggcagcggcgactacatctactacgccgatagcgtgaagggcagattcaccatcagccgggacatcagcaagaacaccctgtacctccagatgaacagcctgagagccgaggacaccgccgtgtactactgtgccaaagaaggcaccggcgctaacagcagcctggccgattatagaggccagggcacactggtcaccgtgtctagtggcggaggaagcggcggaggatctgaagtgcaactggtggaatctggaggctctctggtgcagccagggggaagcctgagactgtcttgtgccgcttccggcttcaccttcgacgactacgccatgagctgggtgcgccaggtgccaggcaaaggcctggaatgggtgtccagcatcaactggagcggcacccacaccgattacgccgactccgtgaaaggcagattcacaatcagcagaaacaacgccaacaataccctgtacctgcagatgaactccctgaagtctgaggatacagcagtgtattattgcgccaagaactggcgggacgccggcaccacttggtttgagaaaagcggctctgccggacagggaacccaagtgacagtgtcctccggtaccggcggaggcggatctggcggcggaggtagcggtggcggaggatctgaattcgacatccagatgacacagagccctagcagcctgtctgccagcgtgggagacagagtgaccatcacatgcaaggccagcgaccacatcaacaactggctggcctggtatcagcagaagcctggacaggcccctaagctgctgatctacggcgctaccacactggaaacaggcgtgcccagcagattttctggcagcggctctggcaccgactacaccctgacaatatccagcctccagcctgaggacttcgccacctactactgtcagcagagctggaacaccccttggacattcggccagggcaccaagctggaaatcaagagactcgaggggaaaccaattcccaaccctcttctgggactggattcaaccggcagcggcgaggacctgaagaacgtgttcccacctgaggtggccgtgttcgagcctagcgaggccgagatcagccacacccagaaagccaccctcgtgtgcctggctaccggcttctaccccgaccatgtggaactgtcttggtgggtcaacggcaaagaggtgcacagcggcgtgtctaccgacccccagccactgaaagaacagcccgccctgaacgacagccggtactgcctgagcagcagactgagagtgtccgccaccttctggcagaacccccggaaccacttcagatgccaggtgcagttctacggcctgagcgagaacgacgagtggacccaggacagagccaagcccgtgacccagatcgtgtctgccgaagcctggggcagagccgattgcggatcccagagcttcggcctgctggaccccaagctgtgctacctgctggatggcatcctgttcatctacggcgtgatcctgaccgccctgttcctgaaacggggcagaaagaaactcctgtatatattcaaacaaccatttatgagaccagtacaaactactcaagaggaagatggctgtagctgccgatttccagaagaagaagaaggaggatgtgaactgagagtgaagttcagcagaagcgccgacgcccctgcctaccagcagggacagaaccaactgtacaacgagctgaacctgggcagacgggaagagtacgacgtgctggacaagcggagaggcagggaccctgagatgggcggaaagccccagcggagaaagaacccccaggaaggactgtataacgaactccagaaagacaagatggccgaagcctacagcgagatcggcatgaagggcgagcggagaagaggcaagggccacgatggcctgtaccagggcctgagcaccgccaccaaggacacctatgacgccctgcacatgcaggccctgcctccaagaagggccaagcgatctggatctggagcaacaaacttctcactactcaaacaagcaggtgacgtggaggagaatcccgggcctactagtatggactggatttggcgcatccttttccttgtcggcgctgctaccggcgcccattcccagctccagttgcaagagagcggccctggcttggtaaaaccttccgagacccttagcctcacatgcacggttagtgggggcagcatttcctcaggtgattactattggggatggattcggcaacccccgggtaaaggattggagtggattggtcatatttattatagtggagcgacgtactacaacccaagtctcaaatccagggttacaatatccgtcgatacgagcaggaaccaattcagcttgaaactttctagtgtcaccgcagcagacacagccgtctattactgtacgcgggatgactccagtaattggcggtcccgagggcaagggacactggtcacggtctcctcatctggaggcggtggaagcggtggaggaggatctgaagtgcagctggttgaatctggcggaggactggttcagcctggcggatctctgagactgtcttgtgccgcctctggcttcgccagcgactactatatcatcggctggttcagacaggcccctggcaaagagagagagggcgtcagctgtatcagcagcagatacgccaacaccaactacgccgacagcgtgaagggcagattcaccatcagccgggacaacgccaagaacaccgtgtacctccagatgaacagcctgaagcctgaggacaccgccgtgtactactgtgccgccgacaccagaagatacacctgtcctgacattgccaccatgcaccggaacttcgattcttggggccagggcacactggtcaccgtttcttctggatccggcggcggaggatctggcggaggcggatctgggggcggaggctctttcgaacaagttcagcttcaacagcctggcgctgagctggtcaaacctggcgcttctgtgaagatgagctgcaaagccagcggctacgccttcagcagctactggatcaactggatgaagcagaaacccggccagggactcgaatggatcggccaaatctatcccggcgacggcgacaccaactacaacggcaagttcaagggcagagccacactgaccgccgatacctctagcagcacagcctacatgcagctgagcagcctgaccagcgaagatagcgccgtgtacttctgtgcccggtccatcacaacagtcgtgggctgcgctatggactattggggccagggaacaagcgtgaccgtgtctagtacgcgtgagcagaaactgatctcggaagaggatctggggagcggcatccagaaccctgatcctgccgtgtaccagctgcgggatagcaagagcagcgacaagagcgtgtgtctgttcaccgacttcgacagccagaccaacgtgtcccagagcaaggactccgacgtgtacatcaccgataagaccgtgctggacatgcggagcatggacttcaagagcaactccgccgtggcctggtccaacaagtccgatttcgcctgcgccaacgccttcaacaacagcattatccccgaggacacattcttcccaagccccgagagcagctgcggtacccagagttttgggttgttggaccctaaattgtgctatctgttggacggaatcctgttcatttacggagtgatcctgaccgcattgttcctgaagagaggccggaagaagctgctgtacatcttcaagcagcctttcatgcggcccgtgcagaccacccaggaagaggacggctgctcctgccggttccccgaggaagaagaaggcggctgcgagctgcgggttaagttttccagatccgcagacgcacccgcttaccaacaagggcagaaccaactctacaatgaacttaatttggggcggagggaagagtacgacgttctggacaaaaggaggggacgagatcccgagatgggcggaaagcctcagcgaaggaagaatccgcaagaggggctttataacgaactccagaaagataaaatggcagaagcctatagtgagattgggatgaagggagaaaggaggaggggtaaaggtcacgatgggttgtaccaaggattgagcacagccactaaagatacctatgatgcgctccacatgcaggccctgccgccaaga

SEQ ID NO: 6196 - DNA, 4110 bp, Artificial Sequence
  Synthetic Polynucloetide
atggccttaccagtgaccgccttgctcctgccgctggccttgctgctccacgccgccaggccggaggttcagctgcttgagtctggcggaggactggttcaacctggcggaagcctgagactgtcttgtgccgccagcggcttcacctttagcagctacgccatgagctgggtccgacaggctcctggcaaaggactggaatgggtgtccagcatcagcggcagcggcgactacatctactacgccgatagcgtgaagggcagattcaccatcagccgggacatcagcaagaacaccctgtacctccagatgaacagcctgagagccgaggacaccgccgtgtactactgtgccaaagaaggcaccggcgctaacagcagcctggccgattatagaggccagggcacactggtcaccgtgtctagtggcggaggaagcggcggaggatctgaagtgcaactggtggaatctggaggctctctggtgcagccagggggaagcctgagactgtcttgtgccgcttccggcttcaccttcgacgactacgccatgagctgggtgcgccaggtgccaggcaaaggcctggaatgggtgtccagcatcaactggagcggcacccacaccgattacgccgactccgtgaaaggcagattcacaatcagcagaaacaacgccaacaataccctgtacctgcagatgaactccctgaagtctgaggatacagcagtgtattattgcgccaagaactggcgggacgccggcaccacttggtttgagaaaagcggctctgccggacagggaacccaagtgacagtgtcctccggtaccggcggaggcggatctggcggcggaggtagcggtggcggaggatctgaattcgacatccagatgacacagagccctagcagcctgtctgccagcgtgggagacagagtgaccatcacatgcaaggccagcgaccacatcaacaactggctggcctggtatcagcagaagcctggacaggcccctaagctgctgatctacggcgctaccacactggaaacaggcgtgcccagcagattttctggcagcggctctggcaccgactacaccctgacaatatccagcctccagcctgaggacttcgccacctactactgtcagcagagctggaacaccccttggacattcggccagggcaccaagctggaaatcaagagactcgagcagagcttcggcctgctggaccccaagctgtgctacctgctggatggcatcctgttcatctacggcgtgatcctgaccgccctgttcctgagagtgaagttcagcagaagcgccgacgcccctgcctaccagcagggacagaaccaactgtacaacgagctgaacctgggcagacgggaagagtacgacgtgctggacaagcggagaggcagggaccctgagatgggcggaaagccccagcggagaaagaacccccaggaaggactgtataacgaactccagaaagacaagatggccgaagcctacagcgagatcggcatgaagggcgagcggagaagaggcaagggccacgatggcctgtaccagggcctgagcaccgccaccaaggacacctatgacgccctgcacatgcaggccctgcctccaagaagggccaagcgatctggatctggagcaacaaacttctcactactcaaacaagcaggtgacgtggaggagaatcccgggcctactagtatggactggatttggcgcatccttttccttgtcggcgctgctaccggcgcccattcccagctccagttgcaagagagcggccctggcttggtaaaaccttccgagacccttagcctcacatgcacggttagtgggggcagcatttcctcaggtgattactattggggatggattcggcaacccccgggtaaaggattggagtggattggtcatatttattatagtggagcgacgtactacaacccaagtctcaaatccagggttacaatatccgtcgatacgagcaggaaccaattcagcttgaaactttctagtgtcaccgcagcagacacagccgtctattactgtacgcgggatgactccagtaattggcggtcccgagggcaagggacactggtcacggtctcctcatctggaggcggtggaagcggtggaggaggatctgaagtgcagctggttgaatctggcggaggactggttcagcctggcggatctctgagactgtcttgtgccgcctctggcttcgccagcgactactatatcatcggctggttcagacaggcccctggcaaagagagagagggcgtcagctgtatcagcagcagatacgccaacaccaactacgccgacagcgtgaagggcagattcaccatcagccgggacaacgccaagaacaccgtgtacctccagatgaacagcctgaagcctgaggacaccgccgtgtactactgtgccgccgacaccagaagatacacctgtcctgacattgccaccatgcaccggaacttcgattcttggggccagggcacactggtcaccgtttcttctggatccggcggcggaggatctggcggaggcggatctgggggcggaggctctttcgaacaagttcagcttcaacagcctggcgctgagctggtcaaacctggcgcttctgtgaagatgagctgcaaagccagcggctacgccttcagcagctactggatcaactggatgaagcagaaacccggccagggactcgaatggatcggccaaatctatcccggcgacggcgacaccaactacaacggcaagttcaagggcagagccacactgaccgccgatacctctagcagcacagcctacatgcagctgagcagcctgaccagcgaagatagcgccgtgtacttctgtgcccggtccatcacaacagtcgtgggctgcgctatggactattggggccagggaacaagcgtgaccgtgtctagtacgcgtcagagttttgggttgttggaccctaaattgtgctatctgttggacggaatcctgttcatttacggagtgatcctgaccgcattgttcctgcgggttaagttttccagatccgcagacgcacccgcttaccaacaagggcagaaccaactctacaatgaacttaatttggggcggagggaagagtacgacgttctggacaaaaggaggggacgagatcccgagatgggcggaaagcctcagcgaaggaagaatccgcaagaggggctttataacgaactccagaaagataaaatggcagaagcctatagtgagattgggatgaagggagaaaggaggaggggtaaaggtcacgatgggttgtaccaaggattgagcacagccactaaagatacctatgatgcgctccacatgcaggccctgccgccaagacgcgccaagagaagcggatctggcgtgaagcagaccctgaatttcgacctgctgaagctggctggcgacgtggaatccaacccaggcccttctagaggccatatgaccgagtacaagcccacggtgcgcctcgccacccgcgacgacgtccccagggccgtacgcaccctcgccgccgcgttcgccgactaccccgccacgcgccacaccgtcgatccggaccgccacatcgagcgggtcaccgagctgcaagaactcttcctcacgcgcgtcgggctcgacatcggcaaggtgtgggtcgcggacgacggcgccgcggtggcggtctggaccacgccggagagcgtcgaagcgggggcggtgttcgccgagatcggcccgcgcatggccgagttgagcggttcccggctggccgcgcagcaacagatggaaggcctcctggcgccgcaccggcccaaggagcccgcgtggttcctggccaccgtcggcgtctcgcccgaccaccagggcaagggtctgggcagcgccgtcgtgctccccggagtggaggcggccgagcgcgccggggtgcccgccttcctggagacctccgcgccccgcaacctccccttctacgagcggctcggcttcaccgtcaccgccgacgtcgaggtgcccgaaggaccgcgcacctggtgcatgacccgcaagcccggtgcctga

SEQ ID NO: 6197 - DNA, 3582 bp, Artificial Sequence
  Synthetic Polynucloetide
atggccttaccagtgaccgccttgctcctgccgctggccttgctgctccacgccgccaggccggaggttcagctgcttgagtctggcggaggactggttcaacctggcggaagcctgagactgtcttgtgccgccagcggcttcacctttagcagctacgccatgagctgggtccgacaggctcctggcaaaggactggaatgggtgtccagcatcagcggcagcggcgactacatctactacgccgatagcgtgaagggcagattcaccatcagccgggacatcagcaagaacaccctgtacctccagatgaacagcctgagagccgaggacaccgccgtgtactactgtgccaaagaaggcaccggcgctaacagcagcctggccgattatagaggccagggcacactggtcaccgtgtctagtggcggaggaagcggcggaggatctgaagtgcaactggtggaatctggaggctctctggtgcagccagggggaagcctgagactgtcttgtgccgcttccggcttcaccttcgacgactacgccatgagctgggtgcgccaggtgccaggcaaaggcctggaatgggtgtccagcatcaactggagcggcacccacaccgattacgccgactccgtgaaaggcagattcacaatcagcagaaacaacgccaacaataccctgtacctgcagatgaactccctgaagtctgaggatacagcagtgtattattgcgccaagaactggcgggacgccggcaccacttggtttgagaaaagcggctctgccggacagggaacccaagtgacagtgtcctccggtaccggcggaggcggatctggcggcggaggtagcggtggcggaggatctgaattcgacatccagatgacacagagccctagcagcctgtctgccagcgtgggagacagagtgaccatcacatgcaaggccagcgaccacatcaacaactggctggcctggtatcagcagaagcctggacaggcccctaagctgctgatctacggcgctaccacactggaaacaggcgtgcccagcagattttctggcagcggctctggcaccgactacaccctgacaatatccagcctccagcctgaggacttcgccacctactactgtcagcagagctggaacaccccttggacattcggccagggcaccaagctggaaatcaagagactcgagggacagcctaaggccaatcctaccgtgacactgttccctccaagcagcgaagaactccaggccaacaaggccacacttgtgtgcctgatctccgacttctaccctggggctgtgacagtggcttggaaggccgatggatctcctgtgaaagccggcgtggaaaccaccaagccatccaagcagagcaacaacaaatacgccgccagctcctacctgagcctgacacctgagcagtggaagtcccacagatcctacagctgccaagtgacccacgaaggcagcaccgtggaaaagacagtggcccctacagagtgcagccccatcaagaccgatgtgattacaatggaccccaaggacaactgctccaaggacgccaacgataccctgctgctccagctgaccaacaccagcgcctactacatgtacttgttgctgctgctgaagtccgtggtgtacttcgccatcatcacatgctgcctgctgcggagaaccgccttctgctgcaacggcgagaagtctagggccaagcgatctggatctggagcaacaaacttctcactactcaaacaagcaggtgacgtggaggagaatcccgggcctactagtatggactggatttggcgcatccttttccttgtcggcgctgctaccggcgcccattcccagctccagttgcaagagagcggccctggcttggtaaaaccttccgagacccttagcctcacatgcacggttagtgggggcagcatttcctcaggtgattactattggggatggattcggcaacccccgggtaaaggattggagtggattggtcatatttattatagtggagcgacgtactacaacccaagtctcaaatccagggttacaatatccgtcgatacgagcaggaaccaattcagcttgaaactttctagtgtcaccgcagcagacacagccgtctattactgtacgcgggatgactccagtaattggcggtcccgagggcaagggacactggtcacggtctcctcatctggaggcggtggaagcggtggaggaggatctgaagtgcagctggttgaatctggcggaggactggttcagcctggcggatctctgagactgtcttgtgccgcctctggcttcgccagcgactactatatcatcggctggttcagacaggcccctggcaaagagagagagggcgtcagctgtatcagcagcagatacgccaacaccaactacgccgacagcgtgaagggcagattcaccatcagccgggacaacgccaagaacaccgtgtacctccagatgaacagcctgaagcctgaggacaccgccgtgtactactgtgccgccgacaccagaagatacacctgtcctgacattgccaccatgcaccggaacttcgattcttggggccagggcacactggtcaccgtttcttctggatccggcggcggaggatctggcggaggcggatctgggggcggaggctctttcgaacaagttcagcttcaacagcctggcgctgagctggtcaaacctggcgcttctgtgaagatgagctgcaaagccagcggctacgccttcagcagctactggatcaactggatgaagcagaaacccggccagggactcgaatggatcggccaaatctatcccggcgacggcgacaccaactacaacggcaagttcaagggcagagccacactgaccgccgatacctctagcagcacagcctacatgcagctgagcagcctgaccagcgaagatagcgccgtgtacttctgtgcccggtccatcacaacagtcgtgggctgcgctatggactattggggccagggaacaagcgtgaccgtgtctagtacgcgtgcctctacaaagggaccctccgtgtttcctctggctcccagcagcaagtctacaagcggaggaacagccgctctgggctgcctggtcaaggattactttcccgagcctgtgaccgtgtcctggaatagcggagcactgacaagcggcgtgcacacctttccagccgtgctgcaaagcagcggcctgtactctctgagcagcgtggtcacagtgcctagctctagcctgggcacccagacctacatctgcaatgtgaaccacaagcctagcaacaccaaggtggacaagagagtggaacccaagagctgtgaagtgaaaaccgactccaccgaccacgtgaagcccaaagagacagagaacaccaagcagcccagcaagagctgccacaagcccaaggccatcgtgcacaccgagaaagtgaacatgatgagcctgaccgtgctgggcctgcggatgctgttcgccaaaaccgtggccgtgaacttcctgctgaccgccaagctgttcttcctc

SEQ ID NO: 6198 - DNA, 3516 bp, Artificial Sequence
  Synthetic Polynucloetide
atggccttaccagtgaccgccttgctcctgccgctggccttgctgctccacgccgccaggccggaggttcagctgcttgagtctggcggaggactggttcaacctggcggaagcctgagactgtcttgtgccgccagcggcttcacctttagcagctacgccatgagctgggtccgacaggctcctggcaaaggactggaatgggtgtccagcatcagcggcagcggcgactacatctactacgccgatagcgtgaagggcagattcaccatcagccgggacatcagcaagaacaccctgtacctccagatgaacagcctgagagccgaggacaccgccgtgtactactgtgccaaagaaggcaccggcgctaacagcagcctggccgattatagaggccagggcacactggtcaccgtgtctagtggcggaggaagcggcggaggatctgaagtgcaactggtggaatctggaggctctctggtgcagccagggggaagcctgagactgtcttgtgccgcttccggcttcaccttcgacgactacgccatgagctgggtgcgccaggtgccaggcaaaggcctggaatgggtgtccagcatcaactggagcggcacccacaccgattacgccgactccgtgaaaggcagattcacaatcagcagaaacaacgccaacaataccctgtacctgcagatgaactccctgaagtctgaggatacagcagtgtattattgcgccaagaactggcgggacgccggcaccacttggtttgagaaaagcggctctgccggacagggaacccaagtgacagtgtcctccggtaccggcggaggcggatctggcggcggaggtagcggtggcggaggatctgaattcgacatccagatgacacagagccctagcagcctgtctgccagcgtgggagacagagtgaccatcacatgcaaggccagcgaccacatcaacaactggctggcctggtatcagcagaagcctggacaggcccctaagctgctgatctacggcgctaccacactggaaacaggcgtgcccagcagattttctggcagcggctctggcaccgactacaccctgacaatatccagcctccagcctgaggacttcgccacctactactgtcagcagagctggaacaccccttggacattcggccagggcaccaagctggaaatcaagagactcgagggacagcctaaggccaatcctaccgtgacactgttccctccaagcagcgaagaactccaggccaacaaggccacacttgtgtgcctgatctccgacttctaccctggggctgtgacagtggcttggaaggccgatggatctcctgtgaaagccggcgtggaaaccaccaagccatccaagcagagcaacaacaaatacgccgccagctcctacctgagcctgacacctgagcagtggaagtcccacagatcctacagctgccaagtgacccacgaaggcagcaccgtggaaaagacagtggcccctacagagtgcagcggcagagccgattgcggcatcaccagcgccagctaccaccagggcgtgctgagcgccaccatcctgtacgagatcctgctgggcaaggccaccctgtacgccgtgctggtgtctgccctggtgctgatggctatggtcaagcggaaggacagccggggaagggccaagcgatctggatctggagcaacaaacttctcactactcaaacaagcaggtgacgtggaggagaatcccgggcctactagtatggactggatttggcgcatccttttccttgtcggcgctgctaccggcgcccattcccagctccagttgcaagagagcggccctggcttggtaaaaccttccgagacccttagcctcacatgcacggttagtgggggcagcatttcctcaggtgattactattggggatggattcggcaacccccgggtaaaggattggagtggattggtcatatttattatagtggagcgacgtactacaacccaagtctcaaatccagggttacaatatccgtcgatacgagcaggaaccaattcagcttgaaactttctagtgtcaccgcagcagacacagccgtctattactgtacgcgggatgactccagtaattggcggtcccgagggcaagggacactggtcacggtctcctcatctggaggcggtggaagcggtggaggaggatctgaagtgcagctggttgaatctggcggaggactggttcagcctggcggatctctgagactgtcttgtgccgcctctggcttcgccagcgactactatatcatcggctggttcagacaggcccctggcaaagagagagagggcgtcagctgtatcagcagcagatacgccaacaccaactacgccgacagcgtgaagggcagattcaccatcagccgggacaacgccaagaacaccgtgtacctccagatgaacagcctgaagcctgaggacaccgccgtgtactactgtgccgccgacaccagaagatacacctgtcctgacattgccaccatgcaccggaacttcgattcttggggccagggcacactggtcaccgtttcttctggatccggcggcggaggatctggcggaggcggatctgggggcggaggctctttcgaacaagttcagcttcaacagcctggcgctgagctggtcaaacctggcgcttctgtgaagatgagctgcaaagccagcggctacgccttcagcagctactggatcaactggatgaagcagaaacccggccagggactcgaatggatcggccaaatctatcccggcgacggcgacaccaactacaacggcaagttcaagggcagagccacactgaccgccgatacctctagcagcacagcctacatgcagctgagcagcctgaccagcgaagatagcgccgtgtacttctgtgcccggtccatcacaacagtcgtgggctgcgctatggactattggggccagggaacaagcgtgaccgtgtctagtacgcgtgcctctacaaagggaccctccgtgtttcctctggctcccagcagcaagtctacaagcggaggaacagccgctctgggctgcctggtcaaggattactttcccgagcctgtgaccgtgtcctggaatagcggagcactgacaagcggcgtgcacacctttccagccgtgctgcaaagcagcggcctgtactctctgagcagcgtggtcacagtgcctagctctagcctgggcacccagacctacatctgcaatgtgaaccacaagcctagcaacaccaaggtggacaagagagtggaacccaagagctgtatccccgaggacacattcttcccaagcagcgacgtgccctgcgacgtgaagctggtggaaaagagcttcgagacagacaccaacctgaacttccagaacctgagcgtgatcggcttcagaatcctgctgctgaaagtggccggctttaacctgctgatgaccctgcggctgtggtccagc

SEQ ID NO: 6199 - DNA, 3516 bp, Artificial Sequence
  Synthetic Polynucloetide
atggccttaccagtgaccgccttgctcctgccgctggccttgctgctccacgccgccaggccggaggttcagctgcttgagtctggcggaggactggttcaacctggcggaagcctgagactgtcttgtgccgccagcggcttcacctttagcagctacgccatgagctgggtccgacaggctcctggcaaaggactggaatgggtgtccagcatcagcggcagcggcgactacatctactacgccgatagcgtgaagggcagattcaccatcagccgggacatcagcaagaacaccctgtacctccagatgaacagcctgagagccgaggacaccgccgtgtactactgtgccaaagaaggcaccggcgctaacagcagcctggccgattatagaggccagggcacactggtcaccgtgtctagtggcggaggaagcggcggaggatctgaagtgcaactggtggaatctggaggctctctggtgcagccagggggaagcctgagactgtcttgtgccgcttccggcttcaccttcgacgactacgccatgagctgggtgcgccaggtgccaggcaaaggcctggaatgggtgtccagcatcaactggagcggcacccacaccgattacgccgactccgtgaaaggcagattcacaatcagcagaaacaacgccaacaataccctgtacctgcagatgaactccctgaagtctgaggatacagcagtgtattattgcgccaagaactggcgggacgccggcaccacttggtttgagaaaagcggctctgccggacagggaacccaagtgacagtgtcctccggtaccggcggaggcggatctggcggcggaggtagcggtggcggaggatctgaattcgacatccagatgacacagagccctagcagcctgtctgccagcgtgggagacagagtgaccatcacatgcaaggccagcgaccacatcaacaactggctggcctggtatcagcagaagcctggacaggcccctaagctgctgatctacggcgctaccacactggaaacaggcgtgcccagcagattttctggcagcggctctggcaccgactacaccctgacaatatccagcctccagcctgaggacttcgccacctactactgtcagcagagctggaacaccccttggacattcggccagggcaccaagctggaaatcaagagactcgagggacagcctaaggccaatcctaccgtgacactgttccctccaagcagcgaagaactccaggccaacaaggccacacttgtgtgcctgatctccgacttctaccctggggctgtgacagtggcttggaaggccgatggatctcctgtgaaagccggcgtggaaaccaccaagccatccaagcagagcaacaacaaatacgccgccagctcctacctgagcctgacacctgagcagtggaagtcccacagatcctacagctgccaagtgacccacgaaggcagcaccgtggaaaagacagtggcccctacagagtgcagcggcagagccgattgcggctttaccagcgagagctaccagcagggcgtgctgagcgccaccatcctgtacgagatcctgctgggcaaggccaccctgtacgccgtgctggtgtctgccctggtgctgatggctatggtcaagcggaaggacagccggggaagggccaagcgatctggatctggagcaacaaacttctcactactcaaacaagcaggtgacgtggaggagaatcccgggcctactagtatggactggatttggcgcatccttttccttgtcggcgctgctaccggcgcccattcccagctccagttgcaagagagcggccctggcttggtaaaaccttccgagacccttagcctcacatgcacggttagtgggggcagcatttcctcaggtgattactattggggatggattcggcaacccccgggtaaaggattggagtggattggtcatatttattatagtggagcgacgtactacaacccaagtctcaaatccagggttacaatatccgtcgatacgagcaggaaccaattcagcttgaaactttctagtgtcaccgcagcagacacagccgtctattactgtacgcgggatgactccagtaattggcggtcccgagggcaagggacactggtcacggtctcctcatctggaggcggtggaagcggtggaggaggatctgaagtgcagctggttgaatctggcggaggactggttcagcctggcggatctctgagactgtcttgtgccgcctctggcttcgccagcgactactatatcatcggctggttcagacaggcccctggcaaagagagagagggcgtcagctgtatcagcagcagatacgccaacaccaactacgccgacagcgtgaagggcagattcaccatcagccgggacaacgccaagaacaccgtgtacctccagatgaacagcctgaagcctgaggacaccgccgtgtactactgtgccgccgacaccagaagatacacctgtcctgacattgccaccatgcaccggaacttcgattcttggggccagggcacactggtcaccgtttcttctggatccggcggcggaggatctggcggaggcggatctgggggcggaggctctttcgaacaagttcagcttcaacagcctggcgctgagctggtcaaacctggcgcttctgtgaagatgagctgcaaagccagcggctacgccttcagcagctactggatcaactggatgaagcagaaacccggccagggactcgaatggatcggccaaatctatcccggcgacggcgacaccaactacaacggcaagttcaagggcagagccacactgaccgccgatacctctagcagcacagcctacatgcagctgagcagcctgaccagcgaagatagcgccgtgtacttctgtgcccggtccatcacaacagtcgtgggctgcgctatggactattggggccagggaacaagcgtgaccgtgtctagtacgcgtgcctctacaaagggaccctccgtgtttcctctggctcccagcagcaagtctacaagcggaggaacagccgctctgggctgcctggtcaaggattactttcccgagcctgtgaccgtgtcctggaatagcggagcactgacaagcggcgtgcacacctttccagccgtgctgcaaagcagcggcctgtactctctgagcagcgtggtcacagtgcctagctctagcctgggcacccagacctacatctgcaatgtgaaccacaagcctagcaacaccaaggtggacaagagagtggaacccaagagctgtatccccgaggacacattcttcccaagccccgagagcagctgcgacgtgaagctggtggaaaagagcttcgagacagacaccaacctgaacttccagaacctgagcgtgatcggcttcagaatcctgctgctgaaagtggccggctttaacctgctgatgaccctgcggctgtggtccagc

SEQ ID NO: 6200 - DNA, 3417 bp, Artificial Sequence
  Synthetic Polynucloetide
atggccttaccagtgaccgccttgctcctgccgctggccttgctgctccacgccgccaggccggaggttcagctgcttgagtctggcggaggactggttcaacctggcggaagcctgagactgtcttgtgccgccagcggcttcacctttagcagctacgccatgagctgggtccgacaggctcctggcaaaggactggaatgggtgtccagcatcagcggcagcggcgactacatctactacgccgatagcgtgaagggcagattcaccatcagccgggacatcagcaagaacaccctgtacctccagatgaacagcctgagagccgaggacaccgccgtgtactactgtgccaaagaaggcaccggcgctaacagcagcctggccgattatagaggccagggcacactggtcaccgtgtctagtggcggaggaagcggcggaggatctgaagtgcaactggtggaatctggaggctctctggtgcagccagggggaagcctgagactgtcttgtgccgcttccggcttcaccttcgacgactacgccatgagctgggtgcgccaggtgccaggcaaaggcctggaatgggtgtccagcatcaactggagcggcacccacaccgattacgccgactccgtgaaaggcagattcacaatcagcagaaacaacgccaacaataccctgtacctgcagatgaactccctgaagtctgaggatacagcagtgtattattgcgccaagaactggcgggacgccggcaccacttggtttgagaaaagcggctctgccggacagggaacccaagtgacagtgtcctccctcgagggacagcctaaggccaatcctaccgtgacactgttccctccaagcagcgaagaactccaggccaacaaggccacacttgtgtgcctgatctccgacttctaccctggggctgtgacagtggcttggaaggccgatggatctcctgtgaaagccggcgtggaaaccaccaagccatccaagcagagcaacaacaaatacgccgccagctcctacctgagcctgacacctgagcagtggaagtcccacagatcctacagctgccaagtgacccacgaaggcagcaccgtggaaaagacagtggcccctacagagtgcagcggcagagccgattgcggctttaccagcgagagctaccagcagggcgtgctgagcgccaccatcctgtacgagatcctgctgggcaaggccaccctgtacgccgtgctggtgtctgccctggtgctgatggctatggtcaagcggaaggacagccggggaagggccaagcgatctggatctggagcaacaaacttctcactactcaaacaagcaggtgacgtggaggagaatcccgggcctactagtatggactggatttggcgcatccttttccttgtcggcgctgctaccggcgcgcattcccagctccagttgcaagagagcggccctggcttggtaaaaccttccgagacccttagcctcacatgcacggttagtgggggcagcatttcctcaggtgattactattggggatggattcggcaacccccgggtaaaggattggagtggattggtcatatttattatagtggagcgacgtactacaacccaagtctcaaatccagggttacaatatccgtcgatacgagcaggaaccaattcagcttgaaactttctagtgtcaccgcagcagacacagccgtctattactgtacgcgggatgactccagtaattggcggtcccgagggcaagggacactggtcacggtctcctcatctggaggcggtggaagcggtggaggaggatctgaagtgcagctggttgaatctggcggaggactggttcagcctggcggatctctgagactgtcttgtgccgcctctggcttcgccagcgactactatatcatcggctggttcagacaggcccctggcaaagagagagagggcgtcagctgtatcagcagcagatacgccaacaccaactacgccgacagcgtgaagggcagattcaccatcagccgggacaacgccaagaacaccgtgtacctccagatgaacagcctgaagcctgaggacaccgccgtgtactactgtgccgccgacaccagaagatacacctgtcctgacattgccaccatgcaccggaacttcgattcttggggccagggcacactggtcaccgtttcttctacgcgtgcctctacaaagggaccctccgtgtttcctctggctcccagcagcaagtctacaagcggaggaacagccgctctgggctgcctggtcaaggattactttcccgagcctgtgaccgtgtcctggaatagcggagcactgacaagcggcgtgcacacctttccagccgtgctgcaaagcagcggcctgtactctctgagcagcgtggtcacagtgcctagctctagcctgggcacccagacctacatctgcaatgtgaaccacaagcctagcaacaccaaggtggacaagagagtggaacccaagagctgtatccccgaggacacattcttcccaagccccgagagcagctgcgacgtgaagctggtggaaaagagcttcgagacagacaccaacctgaacttccagaacctgagcgtgatcggcttcagaatcctgctgctgaaagtggccggctttaacctgctgatgaccctgcggctgtggtccagccgcgccaagagaagcggatctggcgtgaagcagaccctgaatttcgacctgctgaagctggctggcgacgtggaatccaacccaggcccttctagaggccatatgaccgagtacaagcccacggtgcgcctcgccacccgcgacgacgtccccagggccgtacgcaccctcgccgccgcgttcgccgactaccccgccacgcgccacaccgtcgatccggaccgccacatcgagcgggtcaccgagctgcaagaactcttcctcacgcgcgtcgggctcgacatcggcaaggtgtgggtcgcggacgacggcgccgcggtggcggtctggaccacgccggagagcgtcgaagcgggggcggtgttcgccgagatcggcccgcgcatggccgagttgagcggttcccggctggccgcgcagcaacagatggaaggcctcctggcgccgcaccggcccaaggagcccgcgtggttcctggccaccgtcggcgtctcgcccgaccaccagggcaagggtctgggcagcgccgtcgtgctccccggagtggaggcggccgagcgcgccggggtgcccgccttcctggagacctccgcgccccgcaacctccccttctacgagcggctcggcttcaccgtcaccgccgacgtcgaggtgcccgaaggaccgcgcacctggtgcatgacccgcaagcccggtgcctga

SEQ ID NO: 6201 - DNA, 2715 bp, Artificial Sequence
  Synthetic Polynucloetide
atggccttaccagtgaccgccttgctcctgccgctggccttgctgctccacgccgccaggccggaggttcagctgcttgagtctggcggaggactggttcaacctggcggaagcctgagactgtcttgtgccgccagcggcttcacctttagcagctacgccatgagctgggtccgacaggctcctggcaaaggactggaatgggtgtccagcatcagcggcagcggcgactacatctactacgccgatagcgtgaagggcagattcaccatcagccgggacatcagcaagaacaccctgtacctccagatgaacagcctgagagccgaggacaccgccgtgtactactgtgccaaagaaggcaccggcgctaacagcagcctggccgattatagaggccagggcacactggtcaccgtgtctagtggcggaggaagcggcggaggatctgaagtgcaactggtggaatctggaggctctctggtgcagccagggggaagcctgagactgtcttgtgccgcttccggcttcaccttcgacgactacgccatgagctgggtgcgccaggtgccaggcaaaggcctggaatgggtgtccagcatcaactggagcggcacccacaccgattacgccgactccgtgaaaggcagattcacaatcagcagaaacaacgccaacaataccctgtacctgcagatgaactccctgaagtctgaggatacagcagtgtattattgcgccaagaactggcgggacgccggcaccacttggtttgagaaaagcggctctgccggacagggaacccaagtgacagtgtcctccctcgagggacagcctaaggccaatcctaccgtgacactgttccctccaagcagcgaagaactccaggccaacaaggccacacttgtgtgcctgatctccgacttctaccctggggctgtgacagtggcttggaaggccgatggatctcctgtgaaagccggcgtggaaaccaccaagccatccaagcagagcaacaacaaatacgccgccagctcctacctgagcctgacacctgagcagtggaagtcccacagatcctacagctgccaagtgacccacgaaggcagcaccgtggaaaagacagtggcccctacagagtgcagcggcagagccgattgcggctttaccagcgagagctaccagcagggcgtgctgagcgccaccatcctgtacgagatcctgctgggcaaggccaccctgtacgccgtgctggtgtctgccctggtgctgatggctatggtcaagcggaaggacagccggggaagggccaagcgatctggatctggagcaacaaacttctcactactcaaacaagcaggtgacgtggaggagaatcccgggcctactagtatggactggatttggcgcatccttttccttgtcggcgctgctaccggcgcgcattcccagctccagttgcaagagagcggccctggcttggtaaaaccttccgagacccttagcctcacatgcacggttagtgggggcagcatttcctcaggtgattactattggggatggattcggcaacccccgggtaaaggattggagtggattggtcatatttattatagtggagcgacgtactacaacccaagtctcaaatccagggttacaatatccgtcgatacgagcaggaaccaattcagcttgaaactttctagtgtcaccgcagcagacacagccgtctattactgtacgcgggatgactccagtaattggcggtcccgagggcaagggacactggtcacggtctcctcatctggaggcggtggaagcggtggaggaggatctgaagtgcagctggttgaatctggcggaggactggttcagcctggcggatctctgagactgtcttgtgccgcctctggcttcgccagcgactactatatcatcggctggttcagacaggcccctggcaaagagagagagggcgtcagctgtatcagcagcagatacgccaacaccaactacgccgacagcgtgaagggcagattcaccatcagccgggacaacgccaagaacaccgtgtacctccagatgaacagcctgaagcctgaggacaccgccgtgtactactgtgccgccgacaccagaagatacacctgtcctgacattgccaccatgcaccggaacttcgattcttggggccagggcacactggtcaccgtttcttctacgcgtgcctctacaaagggaccctccgtgtttcctctggctcccagcagcaagtctacaagcggaggaacagccgctctgggctgcctggtcaaggattactttcccgagcctgtgaccgtgtcctggaatagcggagcactgacaagcggcgtgcacacctttccagccgtgctgcaaagcagcggcctgtactctctgagcagcgtggtcacagtgcctagctctagcctgggcacccagacctacatctgcaatgtgaaccacaagcctagcaacaccaaggtggacaagagagtggaacccaagagctgtatccccgaggacacattcttcccaagccccgagagcagctgcgacgtgaagctggtggaaaagagcttcgagacagacaccaacctgaacttccagaacctgagcgtgatcggcttcagaatcctgctgctgaaagtggccggctttaacctgctgatgaccctgcggctgtggtccagc

SEQ ID NO: 6202 - DNA, 2802 bp, Artificial Sequence
  Synthetic Polynucloetide
atggccttaccagtgaccgccttgctcctgccgctggccttgctgctccacgccgccaggccggaggttcagctgcttgagtctggcggaggactggttcaacctggcggaagcctgagactgtcttgtgccgccagcggcttcacctttagcagctacgccatgagctgggtccgacaggctcctggcaaaggactggaatgggtgtccagcatcagcggcagcggcgactacatctactacgccgatagcgtgaagggcagattcaccatcagccgggacatcagcaagaacaccctgtacctccagatgaacagcctgagagccgaggacaccgccgtgtactactgtgccaaagaaggcaccggcgctaacagcagcctggccgattatagaggccagggcacactggtcaccgtgtctagtggcggaggaagcggcggaggatctgaagtgcaactggtggaatctggaggctctctggtgcagccagggggaagcctgagactgtcttgtgccgcttccggcttcaccttcgacgactacgccatgagctgggtgcgccaggtgccaggcaaaggcctggaatgggtgtccagcatcaactggagcggcacccacaccgattacgccgactccgtgaaaggcagattcacaatcagcagaaacaacgccaacaataccctgtacctgcagatgaactccctgaagtctgaggatacagcagtgtattattgcgccaagaactggcgggacgccggcaccacttggtttgagaaaagcggctctgccggacagggaacccaagtgacagtgtcctccctcgagggatctggcagagccgattgcggctttaccagcgagagctaccagcagggcgtgctgagcgccaccatcctgtacgagatcctgctgggcaaggccaccctgtacgccgtgctggtgtctgccctggtgctgatggctatggtcaagcggaaggacagccggggaagggccaagcgatctggatctggagcaacaaacttctcactactcaaacaagcaggtgacgtggaggagaatcccgggcctactagtatggactggatttggcgcatccttttccttgtcggcgctgctaccggcgcgcattcccagctccagttgcaagagagcggccctggcttggtaaaaccttccgagacccttagcctcacatgcacggttagtgggggcagcatttcctcaggtgattactattggggatggattcggcaacccccgggtaaaggattggagtggattggtcatatttattatagtggagcgacgtactacaacccaagtctcaaatccagggttacaatatccgtcgatacgagcaggaaccaattcagcttgaaactttctagtgtcaccgcagcagacacagccgtctattactgtacgcgggatgactccagtaattggcggtcccgagggcaagggacactggtcacggtctcctcatctggaggcggtggaagcggtggaggaggatctgaagtgcagctggttgaatctggcggaggactggttcagcctggcggatctctgagactgtcttgtgccgcctctggcttcgccagcgactactatatcatcggctggttcagacaggcccctggcaaagagagagagggcgtcagctgtatcagcagcagatacgccaacaccaactacgccgacagcgtgaagggcagattcaccatcagccgggacaacgccaagaacaccgtgtacctccagatgaacagcctgaagcctgaggacaccgccgtgtactactgtgccgccgacaccagaagatacacctgtcctgacattgccaccatgcaccggaacttcgattcttggggccagggcacactggtcaccgtttcttctacgcgtggcagcatccccgaggacacattcttcccaagccccgagagcagctgcgacgtgaagctggtggaaaagagcttcgagacagacaccaacctgaacttccagaacctgagcgtgatcggcttcagaatcctgctgctgaaagtggccggctttaacctgctgatgaccctgcggctgtggtccagccgcgccaagagaagcggatctggcgtgaagcagaccctgaatttcgacctgctgaagctggctggcgacgtggaatccaacccaggcccttctagaggccatatgaccgagtacaagcccacggtgcgcctcgccacccgcgacgacgtccccagggccgtacgcaccctcgccgccgcgttcgccgactaccccgccacgcgccacaccgtcgatccggaccgccacatcgagcgggtcaccgagctgcaagaactcttcctcacgcgcgtcgggctcgacatcggcaaggtgtgggtcgcggacgacggcgccgcggtggcggtctggaccacgccggagagcgtcgaagcgggggcggtgttcgccgagatcggcccgcgcatggccgagttgagcggttcccggctggccgcgcagcaacagatggaaggcctcctggcgccgcaccggcccaaggagcccgcgtggttcctggccaccgtcggcgtctcgcccgaccaccagggcaagggtctgggcagcgccgtcgtgctccccggagtggaggcggccgagcgcgccggggtgcccgccttcctggagacctccgcgccccgcaacctccccttctacgagcggctcggcttcaccgtcaccgccgacgtcgaggtgcccgaaggaccgcgcacctggtgcatgacccgcaagcccggtgcctga

SEQ ID NO: 6203 - DNA, 2100 bp, Artificial Sequence
  Synthetic Polynucloetide
atggccttaccagtgaccgccttgctcctgccgctggccttgctgctccacgccgccaggccggaggttcagctgcttgagtctggcggaggactggttcaacctggcggaagcctgagactgtcttgtgccgccagcggcttcacctttagcagctacgccatgagctgggtccgacaggctcctggcaaaggactggaatgggtgtccagcatcagcggcagcggcgactacatctactacgccgatagcgtgaagggcagattcaccatcagccgggacatcagcaagaacaccctgtacctccagatgaacagcctgagagccgaggacaccgccgtgtactactgtgccaaagaaggcaccggcgctaacagcagcctggccgattatagaggccagggcacactggtcaccgtgtctagtggcggaggaagcggcggaggatctgaagtgcaactggtggaatctggaggctctctggtgcagccagggggaagcctgagactgtcttgtgccgcttccggcttcaccttcgacgactacgccatgagctgggtgcgccaggtgccaggcaaaggcctggaatgggtgtccagcatcaactggagcggcacccacaccgattacgccgactccgtgaaaggcagattcacaatcagcagaaacaacgccaacaataccctgtacctgcagatgaactccctgaagtctgaggatacagcagtgtattattgcgccaagaactggcgggacgccggcaccacttggtttgagaaaagcggctctgccggacagggaacccaagtgacagtgtcctccctcgagggatctggcagagccgattgcggctttaccagcgagagctaccagcagggcgtgctgagcgccaccatcctgtacgagatcctgctgggcaaggccaccctgtacgccgtgctggtgtctgccctggtgctgatggctatggtcaagcggaaggacagccggggaagggccaagcgatctggatctggagcaacaaacttctcactactcaaacaagcaggtgacgtggaggagaatcccgggcctactagtatggactggatttggcgcatccttttccttgtcggcgctgctaccggcgcgcattcccagctccagttgcaagagagcggccctggcttggtaaaaccttccgagacccttagcctcacatgcacggttagtgggggcagcatttcctcaggtgattactattggggatggattcggcaacccccgggtaaaggattggagtggattggtcatatttattatagtggagcgacgtactacaacccaagtctcaaatccagggttacaatatccgtcgatacgagcaggaaccaattcagcttgaaactttctagtgtcaccgcagcagacacagccgtctattactgtacgcgggatgactccagtaattggcggtcccgagggcaagggacactggtcacggtctcctcatctggaggcggtggaagcggtggaggaggatctgaagtgcagctggttgaatctggcggaggactggttcagcctggcggatctctgagactgtcttgtgccgcctctggcttcgccagcgactactatatcatcggctggttcagacaggcccctggcaaagagagagagggcgtcagctgtatcagcagcagatacgccaacaccaactacgccgacagcgtgaagggcagattcaccatcagccgggacaacgccaagaacaccgtgtacctccagatgaacagcctgaagcctgaggacaccgccgtgtactactgtgccgccgacaccagaagatacacctgtcctgacattgccaccatgcaccggaacttcgattcttggggccagggcacactggtcaccgtttcttctacgcgtggcagcatccccgaggacacattcttcccaagccccgagagcagctgcgacgtgaagctggtggaaaagagcttcgagacagacaccaacctgaacttccagaacctgagcgtgatcggcttcagaatcctgctgctgaaagtggccggctttaacctgctgatgaccctgcggctgtggtccagc

SEQ ID NO: 6204 - DNA, 2829 bp, Artificial Sequence
  Synthetic Polynucloetide
atggccttaccagtgaccgccttgctcctgccgctggccttgctgctccacgccgccaggccggaggttcagctgcttgagtctggcggaggactggttcaacctggcggaagcctgagactgtcttgtgccgccagcggcttcacctttagcagctacgccatgagctgggtccgacaggctcctggcaaaggactggaatgggtgtccagcatcagcggcagcggcgactacatctactacgccgatagcgtgaagggcagattcaccatcagccgggacatcagcaagaacaccctgtacctccagatgaacagcctgagagccgaggacaccgccgtgtactactgtgccaaagaaggcaccggcgctaacagcagcctggccgattatagaggccagggcacactggtcaccgtgtctagtggcggaggaagcggcggaggatctgaagtgcaactggtggaatctggaggctctctggtgcagccagggggaagcctgagactgtcttgtgccgcttccggcttcaccttcgacgactacgccatgagctgggtgcgccaggtgccaggcaaaggcctggaatgggtgtccagcatcaactggagcggcacccacaccgattacgccgactccgtgaaaggcagattcacaatcagcagaaacaacgccaacaataccctgtacctgcagatgaactccctgaagtctgaggatacagcagtgtattattgcgccaagaactggcgggacgccggcaccacttggtttgagaaaagcggctctgccggacagggaacccaagtgacagtgtcctccctcgaggacaaaactcacacatgcccaccgtgcccagcaggcagagccgattgcggctttaccagcgagagctaccagcagggcgtgctgagcgccaccatcctgtacgagatcctgctgggcaaggccaccctgtacgccgtgctggtgtctgccctggtgctgatggctatggtcaagcggaaggacagccggggaagggccaagcgatctggatctggagcaacaaacttctcactactcaaacaagcaggtgacgtggaggagaatcccgggcctactagtatggactggatttggcgcatccttttccttgtcggcgctgctaccggcgcgcattcccagctccagttgcaagagagcggccctggcttggtaaaaccttccgagacccttagcctcacatgcacggttagtgggggcagcatttcctcaggtgattactattggggatggattcggcaacccccgggtaaaggattggagtggattggtcatatttattatagtggagcgacgtactacaacccaagtctcaaatccagggttacaatatccgtcgatacgagcaggaaccaattcagcttgaaactttctagtgtcaccgcagcagacacagccgtctattactgtacgcgggatgactccagtaattggcggtcccgagggcaagggacactggtcacggtctcctcatctggaggcggtggaagcggtggaggaggatctgaagtgcagctggttgaatctggcggaggactggttcagcctggcggatctctgagactgtcttgtgccgcctctggcttcgccagcgactactatatcatcggctggttcagacaggcccctggcaaagagagagagggcgtcagctgtatcagcagcagatacgccaacaccaactacgccgacagcgtgaagggcagattcaccatcagccgggacaacgccaagaacaccgtgtacctccagatgaacagcctgaagcctgaggacaccgccgtgtactactgtgccgccgacaccagaagatacacctgtcctgacattgccaccatgcaccggaacttcgattcttggggccagggcacactggtcaccgtttcttctacgcgtggcagcatccccgaggacacattcttcccaagccccgagagcagctgcgacgtgaagctggtggaaaagagcttcgagacagacaccaacctgaacttccagaacctgagcgtgatcggcttcagaatcctgctgctgaaagtggccggctttaacctgctgatgaccctgcggctgtggtccagccgcgccaagagaagcggatctggcgtgaagcagaccctgaatttcgacctgctgaagctggctggcgacgtggaatccaacccaggcccttctagaggccatatgaccgagtacaagcccacggtgcgcctcgccacccgcgacgacgtccccagggccgtacgcaccctcgccgccgcgttcgccgactaccccgccacgcgccacaccgtcgatccggaccgccacatcgagcgggtcaccgagctgcaagaactcttcctcacgcgcgtcgggctcgacatcggcaaggtgtgggtcgcggacgacggcgccgcggtggcggtctggaccacgccggagagcgtcgaagcgggggcggtgttcgccgagatcggcccgcgcatggccgagttgagcggttcccggctggccgcgcagcaacagatggaaggcctcctggcgccgcaccggcccaaggagcccgcgtggttcctggccaccgtcggcgtctcgcccgaccaccagggcaagggtctgggcagcgccgtcgtgctccccggagtggaggcggccgagcgcgccggggtgcccgccttcctggagacctccgcgccccgcaacctccccttctacgagcggctcggcttcaccgtcaccgccgacgtcgaggtgcccgaaggaccgcgcacctggtgcatgacccgcaagcccggtgcctga

SEQ ID NO: 6205 - DNA, 2829 bp, Artificial Sequence
  Synthetic Polynucloetide
atggccttaccagtgaccgccttgctcctgccgctggccttgctgctccacgccgccaggccggaggttcagctgcttgagtctggcggaggactggttcaacctggcggaagcctgagactgtcttgtgccgccagcggcttcacctttagcagctacgccatgagctgggtccgacaggctcctggcaaaggactggaatgggtgtccagcatcagcggcagcggcgactacatctactacgccgatagcgtgaagggcagattcaccatcagccgggacatcagcaagaacaccctgtacctccagatgaacagcctgagagccgaggacaccgccgtgtactactgtgccaaagaaggcaccggcgctaacagcagcctggccgattatagaggccagggcacactggtcaccgtgtctagtggcggaggaagcggcggaggatctgaagtgcaactggtggaatctggaggctctctggtgcagccagggggaagcctgagactgtcttgtgccgcttccggcttcaccttcgacgactacgccatgagctgggtgcgccaggtgccaggcaaaggcctggaatgggtgtccagcatcaactggagcggcacccacaccgattacgccgactccgtgaaaggcagattcacaatcagcagaaacaacgccaacaataccctgtacctgcagatgaactccctgaagtctgaggatacagcagtgtattattgcgccaagaactggcgggacgccggcaccacttggtttgagaaaagcggctctgccggacagggaacccaagtgacagtgtcctccctcgagggatctggcagagccgattgcggctttaccagcgagagctaccagcagggcgtgctgagcgccaccatcctgtacgagatcctgctgggcaaggccaccctgtacgccgtgctggtgtctgccctggtgctgatggctatggtcaagcggaaggacagccggggaagggccaagcgatctggatctggagcaacaaacttctcactactcaaacaagcaggtgacgtggaggagaatcccgggcctactagtatggactggatttggcgcatccttttccttgtcggcgctgctaccggcgcgcattcccagctccagttgcaagagagcggccctggcttggtaaaaccttccgagacccttagcctcacatgcacggttagtgggggcagcatttcctcaggtgattactattggggatggattcggcaacccccgggtaaaggattggagtggattggtcatatttattatagtggagcgacgtactacaacccaagtctcaaatccagggttacaatatccgtcgatacgagcaggaaccaattcagcttgaaactttctagtgtcaccgcagcagacacagccgtctattactgtacgcgggatgactccagtaattggcggtcccgagggcaagggacactggtcacggtctcctcatctggaggcggtggaagcggtggaggaggatctgaagtgcagctggttgaatctggcggaggactggttcagcctggcggatctctgagactgtcttgtgccgcctctggcttcgccagcgactactatatcatcggctggttcagacaggcccctggcaaagagagagagggcgtcagctgtatcagcagcagatacgccaacaccaactacgccgacagcgtgaagggcagattcaccatcagccgggacaacgccaagaacaccgtgtacctccagatgaacagcctgaagcctgaggacaccgccgtgtactactgtgccgccgacaccagaagatacacctgtcctgacattgccaccatgcaccggaacttcgattcttggggccagggcacactggtcaccgtttcttctacgcgtgataaaactcatacctgtccgccatgcccggcaatccccgaggacacattcttcccaagccccgagagcagctgcgacgtgaagctggtggaaaagagcttcgagacagacaccaacctgaacttccagaacctgagcgtgatcggcttcagaatcctgctgctgaaagtggccggctttaacctgctgatgaccctgcggctgtggtccagccgcgccaagagaagcggatctggcgtgaagcagaccctgaatttcgacctgctgaagctggctggcgacgtggaatccaacccaggcccttctagaggccatatgaccgagtacaagcccacggtgcgcctcgccacccgcgacgacgtccccagggccgtacgcaccctcgccgccgcgttcgccgactaccccgccacgcgccacaccgtcgatccggaccgccacatcgagcgggtcaccgagctgcaagaactcttcctcacgcgcgtcgggctcgacatcggcaaggtgtgggtcgcggacgacggcgccgcggtggcggtctggaccacgccggagagcgtcgaagcgggggcggtgttcgccgagatcggcccgcgcatggccgagttgagcggttcccggctggccgcgcagcaacagatggaaggcctcctggcgccgcaccggcccaaggagcccgcgtggttcctggccaccgtcggcgtctcgcccgaccaccagggcaagggtctgggcagcgccgtcgtgctccccggagtggaggcggccgagcgcgccggggtgcccgccttcctggagacctccgcgccccgcaacctccccttctacgagcggctcggcttcaccgtcaccgccgacgtcgaggtgcccgaaggaccgcgcacctggtgcatgacccgcaagcccggtgcctga

SEQ ID NO: 6206 - DNA, 2856 bp, Artificial Sequence
  Synthetic Polynucloetide
atggccttaccagtgaccgccttgctcctgccgctggccttgctgctccacgccgccaggccggaggttcagctgcttgagtctggcggaggactggttcaacctggcggaagcctgagactgtcttgtgccgccagcggcttcacctttagcagctacgccatgagctgggtccgacaggctcctggcaaaggactggaatgggtgtccagcatcagcggcagcggcgactacatctactacgccgatagcgtgaagggcagattcaccatcagccgggacatcagcaagaacaccctgtacctccagatgaacagcctgagagccgaggacaccgccgtgtactactgtgccaaagaaggcaccggcgctaacagcagcctggccgattatagaggccagggcacactggtcaccgtgtctagtggcggaggaagcggcggaggatctgaagtgcaactggtggaatctggaggctctctggtgcagccagggggaagcctgagactgtcttgtgccgcttccggcttcaccttcgacgactacgccatgagctgggtgcgccaggtgccaggcaaaggcctggaatgggtgtccagcatcaactggagcggcacccacaccgattacgccgactccgtgaaaggcagattcacaatcagcagaaacaacgccaacaataccctgtacctgcagatgaactccctgaagtctgaggatacagcagtgtattattgcgccaagaactggcgggacgccggcaccacttggtttgagaaaagcggctctgccggacagggaacccaagtgacagtgtcctccctcgaggacaaaactcacacatgcccaccgtgcccagcaggcagagccgattgcggctttaccagcgagagctaccagcagggcgtgctgagcgccaccatcctgtacgagatcctgctgggcaaggccaccctgtacgccgtgctggtgtctgccctggtgctgatggctatggtcaagcggaaggacagccggggaagggccaagcgatctggatctggagcaacaaacttctcactactcaaacaagcaggtgacgtggaggagaatcccgggcctactagtatggactggatttggcgcatccttttccttgtcggcgctgctaccggcgcgcattcccagctccagttgcaagagagcggccctggcttggtaaaaccttccgagacccttagcctcacatgcacggttagtgggggcagcatttcctcaggtgattactattggggatggattcggcaacccccgggtaaaggattggagtggattggtcatatttattatagtggagcgacgtactacaacccaagtctcaaatccagggttacaatatccgtcgatacgagcaggaaccaattcagcttgaaactttctagtgtcaccgcagcagacacagccgtctattactgtacgcgggatgactccagtaattggcggtcccgagggcaagggacactggtcacggtctcctcatctggaggcggtggaagcggtggaggaggatctgaagtgcagctggttgaatctggcggaggactggttcagcctggcggatctctgagactgtcttgtgccgcctctggcttcgccagcgactactatatcatcggctggttcagacaggcccctggcaaagagagagagggcgtcagctgtatcagcagcagatacgccaacaccaactacgccgacagcgtgaagggcagattcaccatcagccgggacaacgccaagaacaccgtgtacctccagatgaacagcctgaagcctgaggacaccgccgtgtactactgtgccgccgacaccagaagatacacctgtcctgacattgccaccatgcaccggaacttcgattcttggggccagggcacactggtcaccgtttcttctacgcgtgataaaactcatacctgtccgccatgcccggcaatccccgaggacacattcttcccaagccccgagagcagctgcgacgtgaagctggtggaaaagagcttcgagacagacaccaacctgaacttccagaacctgagcgtgatcggcttcagaatcctgctgctgaaagtggccggctttaacctgctgatgaccctgcggctgtggtccagccgcgccaagagaagcggatctggcgtgaagcagaccctgaatttcgacctgctgaagctggctggcgacgtggaatccaacccaggcccttctagaggccatatgaccgagtacaagcccacggtgcgcctcgccacccgcgacgacgtccccagggccgtacgcaccctcgccgccgcgttcgccgactaccccgccacgcgccacaccgtcgatccggaccgccacatcgagcgggtcaccgagctgcaagaactcttcctcacgcgcgtcgggctcgacatcggcaaggtgtgggtcgcggacgacggcgccgcggtggcggtctggaccacgccggagagcgtcgaagcgggggcggtgttcgccgagatcggcccgcgcatggccgagttgagcggttcccggctggccgcgcagcaacagatggaaggcctcctggcgccgcaccggcccaaggagcccgcgtggttcctggccaccgtcggcgtctcgcccgaccaccagggcaagggtctgggcagcgccgtcgtgctccccggagtggaggcggccgagcgcgccggggtgcccgccttcctggagacctccgcgccccgcaacctccccttctacgagcggctcggcttcaccgtcaccgccgacgtcgaggtgcccgaaggaccgcgcacctggtgcatgacccgcaagcccggtgcctga

SEQ ID NO: 6207 - DNA, 2154 bp, Artificial Sequence
  Synthetic Polynucloetide
atggccttaccagtgaccgccttgctcctgccgctggccttgctgctccacgccgccaggccggaggttcagctgcttgagtctggcggaggactggttcaacctggcggaagcctgagactgtcttgtgccgccagcggcttcacctttagcagctacgccatgagctgggtccgacaggctcctggcaaaggactggaatgggtgtccagcatcagcggcagcggcgactacatctactacgccgatagcgtgaagggcagattcaccatcagccgggacatcagcaagaacaccctgtacctccagatgaacagcctgagagccgaggacaccgccgtgtactactgtgccaaagaaggcaccggcgctaacagcagcctggccgattatagaggccagggcacactggtcaccgtgtctagtggcggaggaagcggcggaggatctgaagtgcaactggtggaatctggaggctctctggtgcagccagggggaagcctgagactgtcttgtgccgcttccggcttcaccttcgacgactacgccatgagctgggtgcgccaggtgccaggcaaaggcctggaatgggtgtccagcatcaactggagcggcacccacaccgattacgccgactccgtgaaaggcagattcacaatcagcagaaacaacgccaacaataccctgtacctgcagatgaactccctgaagtctgaggatacagcagtgtattattgcgccaagaactggcgggacgccggcaccacttggtttgagaaaagcggctctgccggacagggaacccaagtgacagtgtcctccctcgaggacaaaactcacacatgcccaccgtgcccagcaggcagagccgattgcggctttaccagcgagagctaccagcagggcgtgctgagcgccaccatcctgtacgagatcctgctgggcaaggccaccctgtacgccgtgctggtgtctgccctggtgctgatggctatggtcaagcggaaggacagccggggaagggccaagcgatctggatctggagcaacaaacttctcactactcaaacaagcaggtgacgtggaggagaatcccgggcctactagtatggactggatttggcgcatccttttccttgtcggcgctgctaccggcgcgcattcccagctccagttgcaagagagcggccctggcttggtaaaaccttccgagacccttagcctcacatgcacggttagtgggggcagcatttcctcaggtgattactattggggatggattcggcaacccccgggtaaaggattggagtggattggtcatatttattatagtggagcgacgtactacaacccaagtctcaaatccagggttacaatatccgtcgatacgagcaggaaccaattcagcttgaaactttctagtgtcaccgcagcagacacagccgtctattactgtacgcgggatgactccagtaattggcggtcccgagggcaagggacactggtcacggtctcctcatctggaggcggtggaagcggtggaggaggatctgaagtgcagctggttgaatctggcggaggactggttcagcctggcggatctctgagactgtcttgtgccgcctctggcttcgccagcgactactatatcatcggctggttcagacaggcccctggcaaagagagagagggcgtcagctgtatcagcagcagatacgccaacaccaactacgccgacagcgtgaagggcagattcaccatcagccgggacaacgccaagaacaccgtgtacctccagatgaacagcctgaagcctgaggacaccgccgtgtactactgtgccgccgacaccagaagatacacctgtcctgacattgccaccatgcaccggaacttcgattcttggggccagggcacactggtcaccgtttcttctacgcgtgataaaactcatacctgtccgccatgcccggcaatccccgaggacacattcttcccaagccccgagagcagctgcgacgtgaagctggtggaaaagagcttcgagacagacaccaacctgaacttccagaacctgagcgtgatcggcttcagaatcctgctgctgaaagtggccggctttaacctgctgatgaccctgcggctgtggtccagc

SEQ ID NO: 6208 - DNA, 2127 bp, Artificial Sequence
  Synthetic Polynucloetide
atggccttaccagtgaccgccttgctcctgccgctggccttgctgctccacgccgccaggccggaggttcagctgcttgagtctggcggaggactggttcaacctggcggaagcctgagactgtcttgtgccgccagcggcttcacctttagcagctacgccatgagctgggtccgacaggctcctggcaaaggactggaatgggtgtccagcatcagcggcagcggcgactacatctactacgccgatagcgtgaagggcagattcaccatcagccgggacatcagcaagaacaccctgtacctccagatgaacagcctgagagccgaggacaccgccgtgtactactgtgccaaagaaggcaccggcgctaacagcagcctggccgattatagaggccagggcacactggtcaccgtgtctagtggcggaggaagcggcggaggatctgaagtgcaactggtggaatctggaggctctctggtgcagccagggggaagcctgagactgtcttgtgccgcttccggcttcaccttcgacgactacgccatgagctgggtgcgccaggtgccaggcaaaggcctggaatgggtgtccagcatcaactggagcggcacccacaccgattacgccgactccgtgaaaggcagattcacaatcagcagaaacaacgccaacaataccctgtacctgcagatgaactccctgaagtctgaggatacagcagtgtattattgcgccaagaactggcgggacgccggcaccacttggtttgagaaaagcggctctgccggacagggaacccaagtgacagtgtcctccctcgagggatctggcagagccgattgcggctttaccagcgagagctaccagcagggcgtgctgagcgccaccatcctgtacgagatcctgctgggcaaggccaccctgtacgccgtgctggtgtctgccctggtgctgatggctatggtcaagcggaaggacagccggggaagggccaagcgatctggatctggagcaacaaacttctcactactcaaacaagcaggtgacgtggaggagaatcccgggcctactagtatggactggatttggcgcatccttttccttgtcggcgctgctaccggcgcgcattcccagctccagttgcaagagagcggccctggcttggtaaaaccttccgagacccttagcctcacatgcacggttagtgggggcagcatttcctcaggtgattactattggggatggattcggcaacccccgggtaaaggattggagtggattggtcatatttattatagtggagcgacgtactacaacccaagtctcaaatccagggttacaatatccgtcgatacgagcaggaaccaattcagcttgaaactttctagtgtcaccgcagcagacacagccgtctattactgtacgcgggatgactccagtaattggcggtcccgagggcaagggacactggtcacggtctcctcatctggaggcggtggaagcggtggaggaggatctgaagtgcagctggttgaatctggcggaggactggttcagcctggcggatctctgagactgtcttgtgccgcctctggcttcgccagcgactactatatcatcggctggttcagacaggcccctggcaaagagagagagggcgtcagctgtatcagcagcagatacgccaacaccaactacgccgacagcgtgaagggcagattcaccatcagccgggacaacgccaagaacaccgtgtacctccagatgaacagcctgaagcctgaggacaccgccgtgtactactgtgccgccgacaccagaagatacacctgtcctgacattgccaccatgcaccggaacttcgattcttggggccagggcacactggtcaccgtttcttctacgcgtgataaaactcatacctgtccgccatgcccggcaatccccgaggacacattcttcccaagccccgagagcagctgcgacgtgaagctggtggaaaagagcttcgagacagacaccaacctgaacttccagaacctgagcgtgatcggcttcagaatcctgctgctgaaagtggccggctttaacctgctgatgaccctgcggctgtggtccagc

SEQ ID NO: 6209 - DNA, 3483 bp, Artificial Sequence
  Synthetic Polynucloetide
atggccttaccagtgaccgccttgctcctgccgctggccttgctgctccacgccgccaggccggaggttcagctgcttgagtctggcggaggactggttcaacctggcggaagcctgagactgtcttgtgccgccagcggcttcacctttagcagctacgccatgagctgggtccgacaggctcctggcaaaggactggaatgggtgtccagcatcagcggcagcggcgactacatctactacgccgatagcgtgaagggcagattcaccatcagccgggacatcagcaagaacaccctgtacctccagatgaacagcctgagagccgaggacaccgccgtgtactactgtgccaaagaaggcaccggcgctaacagcagcctggccgattatagaggccagggcacactggtcaccgtgtctagtggcggaggaagcggcggaggatctgaagtgcaactggtggaatctggaggctctctggtgcagccagggggaagcctgagactgtcttgtgccgcttccggcttcaccttcgacgactacgccatgagctgggtgcgccaggtgccaggcaaaggcctggaatgggtgtccagcatcaactggagcggcacccacaccgattacgccgactccgtgaaaggcagattcacaatcagcagaaacaacgccaacaataccctgtacctgcagatgaactccctgaagtctgaggatacagcagtgtattattgcgccaagaactggcgggacgccggcaccacttggtttgagaaaagcggctctgccggacagggaacccaagtgacagtgtcctccctcgagggacagcctaaggccaatcctaccgtgacactgttccctccaagcagcgaagaactccaggccaacaaggccacacttgtgtgcctgatctccgacttctaccctggggctgtgacagtggcttggaaggccgatggatctcctgtgaaagccggcgtggaaaccaccaagccatccaagcagagcaacaacaaatacgccgccagctcctacctgagcctgacacctgagcagtggaagtcccacagatcctacagctgccaagtgacccacgaaggcagcaccgtggaaaagacagtggcccctacagagtgcagccccatcaagaccgatgtgattacaatggaccccaaggacaactgctccaaggacgccaacgataccctgctgctccagctgaccaacaccagcgcctactacatgtacttgttgctgctgctgaagtccgtggtgtacttcgccatcatcacatgctgcctgctgcggagaaccgccttctgctgcaacggcgagaagtctagggccaagcgatctggatctggagcaacaaacttctcactactcaaacaagcaggtgacgtggaggagaatcccgggcctactagtatggactggatttggcgcatccttttccttgtcggcgctgctaccggcgcgcattcccagctccagttgcaagagagcggccctggcttggtaaaaccttccgagacccttagcctcacatgcacggttagtgggggcagcatttcctcaggtgattactattggggatggattcggcaacccccgggtaaaggattggagtggattggtcatatttattatagtggagcgacgtactacaacccaagtctcaaatccagggttacaatatccgtcgatacgagcaggaaccaattcagcttgaaactttctagtgtcaccgcagcagacacagccgtctattactgtacgcgggatgactccagtaattggcggtcccgagggcaagggacactggtcacggtctcctcatctggaggcggtggaagcggtggaggaggatctgaagtgcagctggttgaatctggcggaggactggttcagcctggcggatctctgagactgtcttgtgccgcctctggcttcgccagcgactactatatcatcggctggttcagacaggcccctggcaaagagagagagggcgtcagctgtatcagcagcagatacgccaacaccaactacgccgacagcgtgaagggcagattcaccatcagccgggacaacgccaagaacaccgtgtacctccagatgaacagcctgaagcctgaggacaccgccgtgtactactgtgccgccgacaccagaagatacacctgtcctgacattgccaccatgcaccggaacttcgattcttggggccagggcacactggtcaccgtttcttctacgcgtgcctctacaaagggaccctccgtgtttcctctggctcccagcagcaagtctacaagcggaggaacagccgctctgggctgcctggtcaaggattactttcccgagcctgtgaccgtgtcctggaatagcggagcactgacaagcggcgtgcacacctttccagccgtgctgcaaagcagcggcctgtactctctgagcagcgtggtcacagtgcctagctctagcctgggcacccagacctacatctgcaatgtgaaccacaagcctagcaacaccaaggtggacaagagagtggaacccaagagctgtgaagtgaaaaccgactccaccgaccacgtgaagcccaaagagacagagaacaccaagcagcccagcaagagctgccacaagcccaaggccatcgtgcacaccgagaaagtgaacatgatgagcctgaccgtgctgggcctgcggatgctgttcgccaaaaccgtggccgtgaacttcctgctgaccgccaagctgttcttcctccgcgccaagagaagcggatctggcgtgaagcagaccctgaatttcgacctgctgaagctggctggcgacgtggaatccaacccaggcccttctagaggccatatgaccgagtacaagcccacggtgcgcctcgccacccgcgacgacgtccccagggccgtacgcaccctcgccgccgcgttcgccgactaccccgccacgcgccacaccgtcgatccggaccgccacatcgagcgggtcaccgagctgcaagaactcttcctcacgcgcgtcgggctcgacatcggcaaggtgtgggtcgcggacgacggcgccgcggtggcggtctggaccacgccggagagcgtcgaagcgggggcggtgttcgccgagatcggcccgcgcatggccgagttgagcggttcccggctggccgcgcagcaacagatggaaggcctcctggcgccgcaccggcccaaggagcccgcgtggttcctggccaccgtcggcgtctcgcccgaccaccagggcaagggtctgggcagcgccgtcgtgctccccggagtggaggcggccgagcgcgccggggtgcccgccttcctggagacctccgcgccccgcaacctccccttctacgagcggctcggcttcaccgtcaccgccgacgtcgaggtgcccgaaggaccgcgcacctggtgcatgacccgcaagcccggtgcctga

SEQ ID NO: 6210 - DNA, 2781 bp, Artificial Sequence
  Synthetic Polynucloetide
atggccttaccagtgaccgccttgctcctgccgctggccttgctgctccacgccgccaggccggaggttcagctgcttgagtctggcggaggactggttcaacctggcggaagcctgagactgtcttgtgccgccagcggcttcacctttagcagctacgccatgagctgggtccgacaggctcctggcaaaggactggaatgggtgtccagcatcagcggcagcggcgactacatctactacgccgatagcgtgaagggcagattcaccatcagccgggacatcagcaagaacaccctgtacctccagatgaacagcctgagagccgaggacaccgccgtgtactactgtgccaaagaaggcaccggcgctaacagcagcctggccgattatagaggccagggcacactggtcaccgtgtctagtggcggaggaagcggcggaggatctgaagtgcaactggtggaatctggaggctctctggtgcagccagggggaagcctgagactgtcttgtgccgcttccggcttcaccttcgacgactacgccatgagctgggtgcgccaggtgccaggcaaaggcctggaatgggtgtccagcatcaactggagcggcacccacaccgattacgccgactccgtgaaaggcagattcacaatcagcagaaacaacgccaacaataccctgtacctgcagatgaactccctgaagtctgaggatacagcagtgtattattgcgccaagaactggcgggacgccggcaccacttggtttgagaaaagcggctctgccggacagggaacccaagtgacagtgtcctccctcgagggacagcctaaggccaatcctaccgtgacactgttccctccaagcagcgaagaactccaggccaacaaggccacacttgtgtgcctgatctccgacttctaccctggggctgtgacagtggcttggaaggccgatggatctcctgtgaaagccggcgtggaaaccaccaagccatccaagcagagcaacaacaaatacgccgccagctcctacctgagcctgacacctgagcagtggaagtcccacagatcctacagctgccaagtgacccacgaaggcagcaccgtggaaaagacagtggcccctacagagtgcagccccatcaagaccgatgtgattacaatggaccccaaggacaactgctccaaggacgccaacgataccctgctgctccagctgaccaacaccagcgcctactacatgtacttgttgctgctgctgaagtccgtggtgtacttcgccatcatcacatgctgcctgctgcggagaaccgccttctgctgcaacggcgagaagtctagggccaagcgatctggatctggagcaacaaacttctcactactcaaacaagcaggtgacgtggaggagaatcccgggcctactagtatggactggatttggcgcatccttttccttgtcggcgctgctaccggcgcgcattcccagctccagttgcaagagagcggccctggcttggtaaaaccttccgagacccttagcctcacatgcacggttagtgggggcagcatttcctcaggtgattactattggggatggattcggcaacccccgggtaaaggattggagtggattggtcatatttattatagtggagcgacgtactacaacccaagtctcaaatccagggttacaatatccgtcgatacgagcaggaaccaattcagcttgaaactttctagtgtcaccgcagcagacacagccgtctattactgtacgcgggatgactccagtaattggcggtcccgagggcaagggacactggtcacggtctcctcatctggaggcggtggaagcggtggaggaggatctgaagtgcagctggttgaatctggcggaggactggttcagcctggcggatctctgagactgtcttgtgccgcctctggcttcgccagcgactactatatcatcggctggttcagacaggcccctggcaaagagagagagggcgtcagctgtatcagcagcagatacgccaacaccaactacgccgacagcgtgaagggcagattcaccatcagccgggacaacgccaagaacaccgtgtacctccagatgaacagcctgaagcctgaggacaccgccgtgtactactgtgccgccgacaccagaagatacacctgtcctgacattgccaccatgcaccggaacttcgattcttggggccagggcacactggtcaccgtttcttctacgcgtgcctctacaaagggaccctccgtgtttcctctggctcccagcagcaagtctacaagcggaggaacagccgctctgggctgcctggtcaaggattactttcccgagcctgtgaccgtgtcctggaatagcggagcactgacaagcggcgtgcacacctttccagccgtgctgcaaagcagcggcctgtactctctgagcagcgtggtcacagtgcctagctctagcctgggcacccagacctacatctgcaatgtgaaccacaagcctagcaacaccaaggtggacaagagagtggaacccaagagctgtgaagtgaaaaccgactccaccgaccacgtgaagcccaaagagacagagaacaccaagcagcccagcaagagctgccacaagcccaaggccatcgtgcacaccgagaaagtgaacatgatgagcctgaccgtgctgggcctgcggatgctgttcgccaaaaccgtggccgtgaacttcctgctgaccgccaagctgttcttcctc

SEQ ID NO: 6211 - DNA, 2868 bp, Artificial Sequence
  Synthetic Polynucloetide
atggccttaccagtgaccgccttgctcctgccgctggccttgctgctccacgccgccaggccggaggttcagctgcttgagtctggcggaggactggttcaacctggcggaagcctgagactgtcttgtgccgccagcggcttcacctttagcagctacgccatgagctgggtccgacaggctcctggcaaaggactggaatgggtgtccagcatcagcggcagcggcgactacatctactacgccgatagcgtgaagggcagattcaccatcagccgggacatcagcaagaacaccctgtacctccagatgaacagcctgagagccgaggacaccgccgtgtactactgtgccaaagaaggcaccggcgctaacagcagcctggccgattatagaggccagggcacactggtcaccgtgtctagtggcggaggaagcggcggaggatctgaagtgcaactggtggaatctggaggctctctggtgcagccagggggaagcctgagactgtcttgtgccgcttccggcttcaccttcgacgactacgccatgagctgggtgcgccaggtgccaggcaaaggcctggaatgggtgtccagcatcaactggagcggcacccacaccgattacgccgactccgtgaaaggcagattcacaatcagcagaaacaacgccaacaataccctgtacctgcagatgaactccctgaagtctgaggatacagcagtgtattattgcgccaagaactggcgggacgccggcaccacttggtttgagaaaagcggctctgccggacagggaacccaagtgacagtgtcctccctcgagggatctcccatcaagaccgatgtgattacaatggaccccaaggacaactgctccaaggacgccaacgataccctgctgctccagctgaccaacaccagcgcctactacatgtacttgttgctgctgctgaagtccgtggtgtacttcgccatcatcacatgctgcctgctgcggagaaccgccttctgctgcaacggcgagaagtctagggccaagcgatctggatctggagcaacaaacttctcactactcaaacaagcaggtgacgtggaggagaatcccgggcctactagtatggactggatttggcgcatccttttccttgtcggcgctgctaccggcgcgcattcccagctccagttgcaagagagcggccctggcttggtaaaaccttccgagacccttagcctcacatgcacggttagtgggggcagcatttcctcaggtgattactattggggatggattcggcaacccccgggtaaaggattggagtggattggtcatatttattatagtggagcgacgtactacaacccaagtctcaaatccagggttacaatatccgtcgatacgagcaggaaccaattcagcttgaaactttctagtgtcaccgcagcagacacagccgtctattactgtacgcgggatgactccagtaattggcggtcccgagggcaagggacactggtcacggtctcctcatctggaggcggtggaagcggtggaggaggatctgaagtgcagctggttgaatctggcggaggactggttcagcctggcggatctctgagactgtcttgtgccgcctctggcttcgccagcgactactatatcatcggctggttcagacaggcccctggcaaagagagagagggcgtcagctgtatcagcagcagatacgccaacaccaactacgccgacagcgtgaagggcagattcaccatcagccgggacaacgccaagaacaccgtgtacctccagatgaacagcctgaagcctgaggacaccgccgtgtactactgtgccgccgacaccagaagatacacctgtcctgacattgccaccatgcaccggaacttcgattcttggggccagggcacactggtcaccgtttcttctacgcgtggcagcgaagtgaaaaccgactccaccgaccacgtgaagcccaaagagacagagaacaccaagcagcccagcaagagctgccacaagcccaaggccatcgtgcacaccgagaaagtgaacatgatgagcctgaccgtgctgggcctgcggatgctgttcgccaaaaccgtggccgtgaacttcctgctgaccgccaagctgttcttcctccgcgccaagagaagcggatctggcgtgaagcagaccctgaatttcgacctgctgaagctggctggcgacgtggaatccaacccaggcccttctagaggccatatgaccgagtacaagcccacggtgcgcctcgccacccgcgacgacgtccccagggccgtacgcaccctcgccgccgcgttcgccgactaccccgccacgcgccacaccgtcgatccggaccgccacatcgagcgggtcaccgagctgcaagaactcttcctcacgcgcgtcgggctcgacatcggcaaggtgtgggtcgcggacgacggcgccgcggtggcggtctggaccacgccggagagcgtcgaagcgggggcggtgttcgccgagatcggcccgcgcatggccgagttgagcggttcccggctggccgcgcagcaacagatggaaggcctcctggcgccgcaccggcccaaggagcccgcgtggttcctggccaccgtcggcgtctcgcccgaccaccagggcaagggtctgggcagcgccgtcgtgctccccggagtggaggcggccgagcgcgccggggtgcccgccttcctggagacctccgcgccccgcaacctccccttctacgagcggctcggcttcaccgtcaccgccgacgtcgaggtgcccgaaggaccgcgcacctggtgcatgacccgcaagcccggtgcctga

SEQ ID NO: 6212 - DNA, 2166 bp, Artificial Sequence
  Synthetic Polynucloetide
atggccttaccagtgaccgccttgctcctgccgctggccttgctgctccacgccgccaggccggaggttcagctgcttgagtctggcggaggactggttcaacctggcggaagcctgagactgtcttgtgccgccagcggcttcacctttagcagctacgccatgagctgggtccgacaggctcctggcaaaggactggaatgggtgtccagcatcagcggcagcggcgactacatctactacgccgatagcgtgaagggcagattcaccatcagccgggacatcagcaagaacaccctgtacctccagatgaacagcctgagagccgaggacaccgccgtgtactactgtgccaaagaaggcaccggcgctaacagcagcctggccgattatagaggccagggcacactggtcaccgtgtctagtggcggaggaagcggcggaggatctgaagtgcaactggtggaatctggaggctctctggtgcagccagggggaagcctgagactgtcttgtgccgcttccggcttcaccttcgacgactacgccatgagctgggtgcgccaggtgccaggcaaaggcctggaatgggtgtccagcatcaactggagcggcacccacaccgattacgccgactccgtgaaaggcagattcacaatcagcagaaacaacgccaacaataccctgtacctgcagatgaactccctgaagtctgaggatacagcagtgtattattgcgccaagaactggcgggacgccggcaccacttggtttgagaaaagcggctctgccggacagggaacccaagtgacagtgtcctccctcgagggatctcccatcaagaccgatgtgattacaatggaccccaaggacaactgctccaaggacgccaacgataccctgctgctccagctgaccaacaccagcgcctactacatgtacttgttgctgctgctgaagtccgtggtgtacttcgccatcatcacatgctgcctgctgcggagaaccgccttctgctgcaacggcgagaagtctagggccaagcgatctggatctggagcaacaaacttctcactactcaaacaagcaggtgacgtggaggagaatcccgggcctactagtatggactggatttggcgcatccttttccttgtcggcgctgctaccggcgcgcattcccagctccagttgcaagagagcggccctggcttggtaaaaccttccgagacccttagcctcacatgcacggttagtgggggcagcatttcctcaggtgattactattggggatggattcggcaacccccgggtaaaggattggagtggattggtcatatttattatagtggagcgacgtactacaacccaagtctcaaatccagggttacaatatccgtcgatacgagcaggaaccaattcagcttgaaactttctagtgtcaccgcagcagacacagccgtctattactgtacgcgggatgactccagtaattggcggtcccgagggcaagggacactggtcacggtctcctcatctggaggcggtggaagcggtggaggaggatctgaagtgcagctggttgaatctggcggaggactggttcagcctggcggatctctgagactgtcttgtgccgcctctggcttcgccagcgactactatatcatcggctggttcagacaggcccctggcaaagagagagagggcgtcagctgtatcagcagcagatacgccaacaccaactacgccgacagcgtgaagggcagattcaccatcagccgggacaacgccaagaacaccgtgtacctccagatgaacagcctgaagcctgaggacaccgccgtgtactactgtgccgccgacaccagaagatacacctgtcctgacattgccaccatgcaccggaacttcgattcttggggccagggcacactggtcaccgtttcttctacgcgtggcagcgaagtgaaaaccgactccaccgaccacgtgaagcccaaagagacagagaacaccaagcagcccagcaagagctgccacaagcccaaggccatcgtgcacaccgagaaagtgaacatgatgagcctgaccgtgctgggcctgcggatgctgttcgccaaaaccgtggccgtgaacttcctgctgaccgccaagctgttcttcctc

SEQ ID NO: 6213 - DNA, 2220 bp, Artificial Sequence
  Synthetic Polynucloetide
atggccttaccagtgaccgccttgctcctgccgctggccttgctgctccacgccgccaggccggaggttcagctgcttgagtctggcggaggactggttcaacctggcggaagcctgagactgtcttgtgccgccagcggcttcacctttagcagctacgccatgagctgggtccgacaggctcctggcaaaggactggaatgggtgtccagcatcagcggcagcggcgactacatctactacgccgatagcgtgaagggcagattcaccatcagccgggacatcagcaagaacaccctgtacctccagatgaacagcctgagagccgaggacaccgccgtgtactactgtgccaaagaaggcaccggcgctaacagcagcctggccgattatagaggccagggcacactggtcaccgtgtctagtggcggaggaagcggcggaggatctgaagtgcaactggtggaatctggaggctctctggtgcagccagggggaagcctgagactgtcttgtgccgcttccggcttcaccttcgacgactacgccatgagctgggtgcgccaggtgccaggcaaaggcctggaatgggtgtccagcatcaactggagcggcacccacaccgattacgccgactccgtgaaaggcagattcacaatcagcagaaacaacgccaacaataccctgtacctgcagatgaactccctgaagtctgaggatacagcagtgtattattgcgccaagaactggcgggacgccggcaccacttggtttgagaaaagcggctctgccggacagggaacccaagtgacagtgtcctccctcgaggacaaaactcacacatgcccaccgtgcccagcacccatcaagaccgatgtgattacaatggaccccaaggacaactgctccaaggacgccaacgataccctgctgctccagctgaccaacaccagcgcctactacatgtacttgttgctgctgctgaagtccgtggtgtacttcgccatcatcacatgctgcctgctgcggagaaccgccttctgctgcaacggcgagaagtctagggccaagcgatctggatctggagcaacaaacttctcactactcaaacaagcaggtgacgtggaggagaatcccgggcctactagtatggactggatttggcgcatccttttccttgtcggcgctgctaccggcgcgcattcccagctccagttgcaagagagcggccctggcttggtaaaaccttccgagacccttagcctcacatgcacggttagtgggggcagcatttcctcaggtgattactattggggatggattcggcaacccccgggtaaaggattggagtggattggtcatatttattatagtggagcgacgtactacaacccaagtctcaaatccagggttacaatatccgtcgatacgagcaggaaccaattcagcttgaaactttctagtgtcaccgcagcagacacagccgtctattactgtacgcgggatgactccagtaattggcggtcccgagggcaagggacactggtcacggtctcctcatctggaggcggtggaagcggtggaggaggatctgaagtgcagctggttgaatctggcggaggactggttcagcctggcggatctctgagactgtcttgtgccgcctctggcttcgccagcgactactatatcatcggctggttcagacaggcccctggcaaagagagagagggcgtcagctgtatcagcagcagatacgccaacaccaactacgccgacagcgtgaagggcagattcaccatcagccgggacaacgccaagaacaccgtgtacctccagatgaacagcctgaagcctgaggacaccgccgtgtactactgtgccgccgacaccagaagatacacctgtcctgacattgccaccatgcaccggaacttcgattcttggggccagggcacactggtcaccgtttcttctacgcgtgataaaactcatacctgtccgccatgcccggcagaagtgaaaaccgactccaccgaccacgtgaagcccaaagagacagagaacaccaagcagcccagcaagagctgccacaagcccaaggccatcgtgcacaccgagaaagtgaacatgatgagcctgaccgtgctgggcctgcggatgctgttcgccaaaaccgtggccgtgaacttcctgctgaccgccaagctgttcttcctc

SEQ ID NO: 6214 - DNA, 1323 bp, Artificial Sequence
  Synthetic Polynucloetide
atggactggatttggcgcatccttttccttgtcggcgctgctaccggcgcgcattcccagctccagttgcaagagagcggccctggcttggtaaaaccttccgagacccttagcctcacatgcacggttagtgggggcagcatttcctcaggtgattactattggggatggattcggcaacccccgggtaaaggattggagtggattggtcatatttattatagtggagcgacgtactacaacccaagtctcaaatccagggttacaatatccgtcgatacgagcaggaaccaattcagcttgaaactttctagtgtcaccgcagcagacacagccgtctattactgtacgcgggatgactccagtaattggcggtcccgagggcaagggacactggtcacggtctcctcatctggaggcggtggaagcggtggaggaggatctgaagtgcagctggttgaatctggcggaggactggttcagcctggcggatctctgagactgtcttgtgccgcctctggcttcgccagcgactactatatcatcggctggttcagacaggcccctggcaaagagagagagggcgtcagctgtatcagcagcagatacgccaacaccaactacgccgacagcgtgaagggcagattcaccatcagccgggacaacgccaagaacaccgtgtacctccagatgaacagcctgaagcctgaggacaccgccgtgtactactgtgccgccgacaccagaagatacacctgtcctgacattgccaccatgcaccggaacttcgattcttggggccagggcacactggtcaccgtttcttctacgcgtgcctctacaaagggaccctccgtgtttcctctggctcccagcagcaagtctacaagcggaggaacagccgctctgggctgcctggtcaaggattactttcccgagcctgtgaccgtgtcctggaatagcggagcactgacaagcggcgtgcacacctttccagccgtgctgcaaagcagcggcctgtactctctgagcagcgtggtcacagtgcctagctctagcctgggcacccagacctacatctgcaatgtgaaccacaagcctagcaacaccaaggtggacaagagagtggaacccaagagctgtatccccgaggacacattcttcccaagccccgagagcagctgcgacgtgaagctggtggaaaagagcttcgagacagacaccaacctgaacttccagaacctgagcgtgatcggcttcagaatcctgctgctgaaagtggccggctttaacctgctgatgaccctgcggctgtggtccagc

SEQ ID NO: 6215 - DNA, 1347 bp, Artificial Sequence
  Synthetic Polynucloetide
atggactggatttggcgcatccttttccttgtcggcgctgctaccggcgcgcattcccagctccagttgcaagagagcggccctggcttggtaaaaccttccgagacccttagcctcacatgcacggttagtgggggcagcatttcctcaggtgattactattggggatggattcggcaacccccgggtaaaggattggagtggattggtcatatttattatagtggagcgacgtactacaacccaagtctcaaatccagggttacaatatccgtcgatacgagcaggaaccaattcagcttgaaactttctagtgtcaccgcagcagacacagccgtctattactgtacgcgggatgactccagtaattggcggtcccgagggcaagggacactggtcacggtctcctcatctggaggcggtggaagcggtggaggaggatctgaagtgcagctggttgaatctggcggaggactggttcagcctggcggatctctgagactgtcttgtgccgcctctggcttcgccagcgactactatatcatcggctggttcagacaggcccctggcaaagagagagagggcgtcagctgtatcagcagcagatacgccaacaccaactacgccgacagcgtgaagggcagattcaccatcagccgggacaacgccaagaacaccgtgtacctccagatgaacagcctgaagcctgaggacaccgccgtgtactactgtgccgccgacaccagaagatacacctgtcctgacattgccaccatgcaccggaacttcgattcttggggccagggcacactggtcaccgtttcttctacgcgtgcctctacaaagggaccctccgtgtttcctctggctcccagcagcaagtctacaagcggaggaacagccgctctgggctgcctggtcaaggattactttcccgagcctgtgaccgtgtcctggaatagcggagcactgacaagcggcgtgcacacctttccagccgtgctgcaaagcagcggcctgtactctctgagcagcgtggtcacagtgcctagctctagcctgggcacccagacctacatctgcaatgtgaaccacaagcctagcaacaccaaggtggacaagagagtggaacccaagagctgtgaagtgaaaaccgactccaccgaccacgtgaagcccaaagagacagagaacaccaagcagcccagcaagagctgccacaagcccaaggccatcgtgcacaccgagaaagtgaacatgatgagcctgaccgtgctgggcctgcggatgctgttcgccaaaaccgtggccgtgaacttcctgctgaccgccaagctgttcttcctc

SEQ ID NO: 6216 - DNA, 1899 bp, Artificial Sequence
  Synthetic Polynucloetide
atggccttaccagtgaccgccttgctcctgccgctggccttgctgctccacgccgccaggccggaagtgcaggttttggagtctggcggaggactggttcagcctggcggatctctgagactgtcttgtgccgccagcggcttcaccttcagcaactttgccatgagctgggtccgacaggcccctggcaaaggacttgaatgggtgtccacaatcagcggcagcgccggcacaacagattacgccgattctgtgaagggcagattcaccatcagccgggacaacagcaagaaaaccctgtacctccagatgaacagcctgcgcgtggaagataccgccgtgtactactgtgccgatggcagaggccccttcttcgattatcgcggccagggcacactggtcaccgtttcttctggtaccggcggaggcggatctggcggcggaggtagcggtggcggaggatctgaattcgacatccagatgacacagagccctagcagcctgtctgccagcgtgggagacagagtgaccatcacatgcaaggccagcgaccacatcaacaactggctggcctggtatcagcagaagcctggacaggcccctaagctgctgatctacggcgctaccacactggaaacaggcgtgcccagcagattttctggcagcggctctggcaccgactacaccctgacaatatccagcctccagcctgaggacttcgccacctactactgtcagcagagctggaacaccccttggacattcggccagggcaccaagctggaaatcaagagaggcggaggcggaagtggaggcggaggatctggcggcggaggctctcaagttcagcttcaacagcctggcgctgagctggtcaaacctggcgcttctgtgaagatgagctgcaaagccagcggctacgccttcagcagctactggatcaactggatgaagcagaaacccggccagggactcgaatggatcggccaaatctatcccggcgacggcgacaccaactacaacggcaagttcaagggcagagccacactgaccgccgatacctctagcagcacagcctacatgcagctgagcagcctgaccagcgaagatagcgccgtgtacttctgtgcccggtccatcacaacagtcgtgggctgcgctatggactattggggccagggaacaagcgtgaccgtgtctagtacgcgtgagcagaaactgatctcggaagaggatctgaaaattgaagttatgtatcctcctccttacctagacaatgagaagagcaatggaaccattatccatgtgaaagggaaacacctttgtccaagtcccctatttcccggaccttctaagcccttttgggtgctggtggtggttgggggagtcctggcttgctatagcttgctagtaacagtggcctttattattttctgggtgaggagtaagaggagcaggctcctgcacagtgactacatgaacatgactccacgccgccccggacccacccgcaagcattaccagccctatgccccaccacgcgacttcgcagcctatcgctccagagtgaagttcagcaggagcgcagacgcccccgcgtaccagcagggccagaaccagctctataacgagctcaatctaggacgaagagaggagtacgatgttttggacaagagacgtggccgggaccctgagatggggggaaagccgagaaggaagaaccctcaggaaggcctgtacaatgaactgcagaaagataagatggcggaggcctacagtgagattgggatgaaaggcgagcgccggaggggcaaggggcacgatggcctttaccagggtctcagtacagccaccaaggacacctacgacgcccttcacatgcaggccctgccccctcgc

SEQ ID NO: 6217 - DNA, 1920 bp, Artificial Sequence
  Synthetic Polynucloetide
atggccttaccagtgaccgccttgctcctgccgctggccttgctgctccacgccgccaggccggaagtgcaggttttggagtctggcggaggactggttcagcctggcggatctctgagactgtcttgtgccgccagcggcttcaccttcagcaactttgccatgagctgggtccgacaggcccctggcaaaggacttgaatgggtgtccacaatcagcggcagcgccggcacaacagattacgccgattctgtgaagggcagattcaccatcagccgggacaacagcaagaaaaccctgtacctccagatgaacagcctgcgcgtggaagataccgccgtgtactactgtgccgatggcagaggccccttcttcgattatcgcggccagggcacactggtcaccgtttcttctggtaccggcggaggcggatctggcggcggaggtagcggtggcggaggatctgaattcgacatccagatgacacagagccctagcagcctgtctgccagcgtgggagacagagtgaccatcacatgcaaggccagcgaccacatcaacaactggctggcctggtatcagcagaagcctggacaggcccctaagctgctgatctacggcgctaccacactggaaacaggcgtgcccagcagattttctggcagcggctctggcaccgactacaccctgacaatatccagcctccagcctgaggacttcgccacctactactgtcagcagagctggaacaccccttggacattcggccagggcaccaagctggaaatcaagagaggcggaggcggaagtggaggcggaggatctggcggcggaggctctcaagttcagcttcaacagcctggcgctgagctggtcaaacctggcgcttctgtgaagatgagctgcaaagccagcggctacgccttcagcagctactggatcaactggatgaagcagaaacccggccagggactcgaatggatcggccaaatctatcccggcgacggcgacaccaactacaacggcaagttcaagggcagagccacactgaccgccgatacctctagcagcacagcctacatgcagctgagcagcctgaccagcgaagatagcgccgtgtacttctgtgcccggtccatcacaacagtcgtgggctgcgctatggactattggggccagggaacaagcgtgaccgtgtctagtacgcgtgagcagaaactgatctcggaagaggatctggcgaagcccaccacgacgccagcgccgcgaccaccaacaccggcgcccaccatcgcgtcgcagcccctgtccctgcgcccagaggcgtgccggccagcggcggggggcgcagtgcacacgagggggctggacttcgcctgtgacatctacatctgggcgcccttggccgggacttgtggggtccttctcctgtcactggttatcaccctttactgcaaacggggcagaaagaaactcctgtatatattcaaacaaccatttatgagaccagtacaaactactcaagaggaagatggctgtagctgccgatttccagaagaagaagaaggaggatgtgaactgagagtgaagttcagcaggagcgcagacgcccccgcgtaccagcagggccagaaccagctctataacgagctgaatctaggacgaagagaggagtacgatgttttggacaagagacgtggccgggaccctgagatggggggaaagccgagaaggaagaaccctcaggaaggcctgtacaatgaactgcagaaagataagatggcggaggcctacagtgagattgggatgaaaggcgagcgccggaggggcaaggggcacgatggcctttaccagggtctcagtacagccaccaaggacacctacgacgcccttcacatgcaggccctgccccctcgctga

SEQ ID NO: 6218 - DNA, 3159 bp, Artificial Sequence
  Synthetic Polynucloetide
atggccttaccagtgaccgccttgctcctgccgctggccttgctgctccacgccgccaggccggaagtgcaggttttggagtctggcggaggactggttcagcctggcggatctctgagactgtcttgtgccgccagcggcttcaccttcagcaactttgccatgagctgggtccgacaggcccctggcaaaggacttgaatgggtgtccacaatcagcggcagcgccggcacaacagattacgccgattctgtgaagggcagattcaccatcagccgggacaacagcaagaaaaccctgtacctccagatgaacagcctgcgcgtggaagataccgccgtgtactactgtgccgatggcagaggccccttcttcgattatcgcggccagggcacactggtcaccgtttcttctggtaccggcggaggcggatctggcggcggaggtagcggtggcggaggatctgaattcgacatccagatgacacagagccctagcagcctgtctgccagcgtgggagacagagtgaccatcacatgcaaggccagcgaccacatcaacaactggctggcctggtatcagcagaagcctggacaggcccctaagctgctgatctacggcgctaccacactggaaacaggcgtgcccagcagattttctggcagcggctctggcaccgactacaccctgacaatatccagcctccagcctgaggacttcgccacctactactgtcagcagagctggaacaccccttggacattcggccagggcaccaagctggaaatcaagagaggcggaggcggaagtggaggcggaggatctggcggcggaggctctcaagttcagcttcaacagcctggcgctgagctggtcaaacctggcgcttctgtgaagatgagctgcaaagccagcggctacgccttcagcagctactggatcaactggatgaagcagaaacccggccagggactcgaatggatcggccaaatctatcccggcgacggcgacaccaactacaacggcaagttcaagggcagagccacactgaccgccgatacctctagcagcacagcctacatgcagctgagcagcctgaccagcgaagatagcgccgtgtacttctgtgcccggtccatcacaacagtcgtgggctgcgctatggactattggggccagggaacaagcgtgaccgtgtctagtacgcgtgagcagaaactgatctcggaagaggatctggcgaagcccaccacgacgccagcgccgcgaccaccaacaccggcgcccaccatcgcgtcgcagcccctgtccctgcgcccagaggcgtgccggccagcggcggggggcgcagtgcacacgagggggctggacttcgcctgtgacatctacatctgggcgcccttggccgggacttgtggggtccttctcctgtcactggttatcaccctttactgcgggcgcgccagagtgaagttcagcaggagcgcagacgcccccgcgtaccagcagggccagaaccagctctataacgagctgaatctaggacgaagagaggagtacgatgttttggacaagagacgtggccgggaccctgagatggggggaaagccgagaaggaagaaccctcaggaaggcctgtacaatgaactgcagaaagataagatggcggaggcctacagtgagattgggatgaaaggcgagcgccggaggggcaaggggcacgatggcctttaccagggtctcagtacagccaccaaggacacctacgacgcccttcacatgcaggccctgccccctcgctctagaggatctggagcaacaaacttctcactactcaaacaagcaggtgacgtggaggagaatcccgggcctgggatccacatggccacttacgaggttctctgtgaggtggcgcggaaactgggcacggatgacagggaagtggtattgttcctcctaaacgtgttcatacctcaacccacactggcccaattaattggagctcttagagctttaaaggaggagggcaggttaacgtttcccctgttagcggaatgtctgtttcgtgcaggtcgcagagacctcttgcgcgacctgcttcacttagacccgcgttttttagagcgccacctagcgggcacaatgagttatttcagcccttatcagctcactgttctccacgtagacggggagctgtgtgcgagggatattaggtctttgatatttttaagcaaggacactatagggtctcgcagcacaccacagacattcttacactgggtgtactgtatggaaaacttagacctactgggtcccactgacgtggatgccctaatgtcaatgcttagatctttgtcaagagtagacctacagcgccaagtgcaaaccctaatgggccttcacctttccggcccatcacactcccaacactatcgccatacaccactcgagaccgatttctacgactacaaggacgacgatgacaagactagtggctccggcgagggcagaggaagtctactaacctgcggagatgtggaagaaaatcctggcccacatatgaccgagtacaagcccacggtgcgcctcgccacccgcgacgacgtccccagggccgtacgcaccctcgccgccgcgttcgccgactaccccgccacgcgccacaccgtcgatccggaccgccacatcgagcgggtcaccgagctgcaagaactcttcctcacgcgcgtcgggctcgacatcggcaaggtgtgggtcgcggacgacggcgccgcggtggcggtctggaccacgccggagagcgtcgaagcgggggcggtgttcgccgagatcggcccgcgcatggccgagttgagcggttcccggctggccgcgcagcaacagatggaaggcctcctggcgccgcaccggcccaaggagcccgcgtggttcctggccaccgtcggcgtctcgcccgaccaccagggcaagggtctgggcagcgccgtcgtgctccccggagtggaggcggccgagcgcgccggggtgcccgccttcctggagacctccgcgccccgcaacctccccttctacgagcggctcggcttcaccgtcaccgccgacgtcgaggtgcccgaaggaccgcgcacctggtgcatgacccgcaagcccggtgcctga

SEQ ID NO: 6219 - DNA, 2979 bp, Artificial Sequence
  Synthetic Polynucloetide
atggccttaccagtgaccgccttgctcctgccgctggccttgctgctccacgccgccaggccggaagtgcaggttttggagtctggcggaggactggttcagcctggcggatctctgagactgtcttgtgccgccagcggcttcaccttcagcaactttgccatgagctgggtccgacaggcccctggcaaaggacttgaatgggtgtccacaatcagcggcagcgccggcacaacagattacgccgattctgtgaagggcagattcaccatcagccgggacaacagcaagaaaaccctgtacctccagatgaacagcctgcgcgtggaagataccgccgtgtactactgtgccgatggcagaggccccttcttcgattatcgcggccagggcacactggtcaccgtttcttctggtaccggcggaggcggatctggcggcggaggtagcggtggcggaggatctgaattcgacatccagatgacacagagccctagcagcctgtctgccagcgtgggagacagagtgaccatcacatgcaaggccagcgaccacatcaacaactggctggcctggtatcagcagaagcctggacaggcccctaagctgctgatctacggcgctaccacactggaaacaggcgtgcccagcagattttctggcagcggctctggcaccgactacaccctgacaatatccagcctccagcctgaggacttcgccacctactactgtcagcagagctggaacaccccttggacattcggccagggcaccaagctggaaatcaagagactcgagatccagaaccctgatcctgccgtgtaccagctgcgggatagcaagagcagcgacaagagcgtgtgtctgttcaccgacttcgacagccagaccaacgtgtcccagagcaaggactccgacgtgtacatcaccgataagtgcgtgctggacatgcggagcatggacttcaagagcaactccgccgtggcctggtccaacaagtccgatttcgcctgcgccaacgccttcaacaacagcattatccccgaggacacattcttcccaagcagcgacgtgccctgcgacgtgaagctggtggaaaagagcttcgagacagacaccaacctgaacttccagaacctgagcgtgatcggcttcagaatcctgctgctgaaagtggccggctttaacctgctgatgaccctgcggctgtggtccagccgcgccaagagaagcggatctggcgtgaagcagaccctgaatttcgacctgctgaagctggctggcgacgtggaatccaacccaggccctactagtatggactggatttggcgcatccttttccttgtcggcgctgctaccggcgcgcattccttcgaacaagttcagcttcaacagcctggcgctgagctggtcaaacctggcgcttctgtgaagatgagctgcaaagccagcggctacgccttcagcagctactggatcaactggatgaagcagaaacccggccagggactcgaatggatcggccaaatctatcccggcgacggcgacaccaactacaacggcaagttcaagggcagagccacactgaccgccgatacctctagcagcacagcctacatgcagctgagcagcctgaccagcgaagatagcgccgtgtacttctgtgcccggtccatcacaacagtcgtgggctgcgctatggactattggggccagggaacaagcgtgaccgtgtctagtacgcgtgaggacctgaagaacgtgttcccacctgaggtggccgtgttcgagcctagcaaggccgagatcgcccacacccagaaagccaccctcgtgtgcctggctaccggcttctaccccgaccatgtggaactgtcttggtgggtcaacggcaaagaggtgcacagcggcgtgtgtaccgacccccagccactgaaagaacagcccgccctgaacgacagccggtactgcctgagcagcagactgagagtgtccgccaccttctggcagaacccccggaaccacttcagatgccaggtgcagttctacggcctgagcgagaacgacgagtggacccaggacagagccaagcccgtgacccagatcgtgtctgccgaagcctggggcagagccgattgcggcatcaccagcgccagctaccaccagggcgtgctgagcgccaccatcctgtacgagatcctgctgggcaaggccaccctgtacgccgtgctggtgtctgccctggtgctgatggctatggtcaagcggaaggacagccggggaagggccaagcgatctggatctggagcaacaaacttctcactactcaaacaagcaggtgacgtggaggagaatcccgggccttctagaggccatatgaccgagtacaagcccacggtgcgcctcgccacccgcgacgacgtccccagggccgtacgcaccctcgccgccgcgttcgccgactaccccgccacgcgccacaccgtcgatccggaccgccacatcgagcgggtcaccgagctgcaagaactcttcctcacgcgcgtcgggctcgacatcggcaaggtgtgggtcgcggacgacggcgccgcggtggcggtctggaccacgccggagagcgtcgaagcgggggcggtgttcgccgagatcggcccgcgcatggccgagttgagcggttcccggctggccgcgcagcaacagatggaaggcctcctggcgccgcaccggcccaaggagcccgcgtggttcctggccaccgtcggcgtctcgcccgaccaccagggcaagggtctgggcagcgccgtcgtgctccccggagtggaggcggccgagcgcgccggggtgcccgccttcctggagacctccgcgccccgcaacctccccttctacgagcggctcggcttcaccgtcaccgccgacgtcgaggtgcccgaaggaccgcgcacctggtgcatgacccgcaagcccggtgcctga

SEQ ID NO: 6220 - DNA, 2976 bp, Artificial Sequence
  Synthetic Polynucloetide
atggccttaccagtgaccgccttgctcctgccgctggccttgctgctccacgccgccaggccggaagtgcaggttttggagtctggcggaggactggttcagcctggcggatctctgagactgtcttgtgccgccagcggcttcaccttcagcaactttgccatgagctgggtccgacaggcccctggcaaaggacttgaatgggtgtccacaatcagcggcagcgccggcacaacagattacgccgattctgtgaagggcagattcaccatcagccgggacaacagcaagaaaaccctgtacctccagatgaacagcctgcgcgtggaagataccgccgtgtactactgtgccgatggcagaggccccttcttcgattatcgcggccagggcacactggtcaccgtttcttctggtaccggcggaggcggatctggcggcggaggtagcggtggcggaggatctgaattcgacatccagatgacacagagccctagcagcctgtctgccagcgtgggagacagagtgaccatcacatgcaaggccagcgaccacatcaacaactggctggcctggtatcagcagaagcctggacaggcccctaagctgctgatctacggcgctaccacactggaaacaggcgtgcccagcagattttctggcagcggctctggcaccgactacaccctgacaatatccagcctccagcctgaggacttcgccacctactactgtcagcagagctggaacaccccttggacattcggccagggcaccaagctggaaatcaagagactcgaggacctgaagaacgtgttcccacctgaggtggccgtgttcgagcctagcaaggccgagatcgcccacacccagaaagccaccctcgtgtgcctggctaccggcttctaccccgaccatgtggaactgtcttggtgggtcaacggcaaagaggtgcacagcggcgtgtgtaccgacccccagccactgaaagaacagcccgccctgaacgacagccggtactgcctgagcagcagactgagagtgtccgccaccttctggcagaacccccggaaccacttcagatgccaggtgcagttctacggcctgagcgagaacgacgagtggacccaggacagagccaagcccgtgacccagatcgtgtctgccgaagcctggggcagagccgattgcggcatcaccagcgccagctaccaccagggcgtgctgagcgccaccatcctgtacgagatcctgctgggcaaggccaccctgtacgccgtgctggtgtctgccctggtgctgatggctatggtcaagcggaaggacagccggggaagggccaagcgatctggatctggagcaacaaacttctcactactcaaacaagcaggtgacgtggaggagaatcccgggcctactagtatggactggatttggcgcatccttttccttgtcggcgctgctaccggcgcgcattccttcgaacaagttcagcttcaacagcctggcgctgagctggtcaaacctggcgcttctgtgaagatgagctgcaaagccagcggctacgccttcagcagctactggatcaactggatgaagcagaaacccggccagggactcgaatggatcggccaaatctatcccggcgacggcgacaccaactacaacggcaagttcaagggcagagccacactgaccgccgatacctctagcagcacagcctacatgcagctgagcagcctgaccagcgaagatagcgccgtgtacttctgtgcccggtccatcacaacagtcgtgggctgcgctatggactattggggccagggaacaagcgtgaccgtgtctagtacgcgtatccagaaccctgatcctgccgtgtaccagctgcgggatagcaagagcagcgacaagagcgtgtgtctgttcaccgacttcgacagccagaccaacgtgtcccagagcaaggactccgacgtgtacatcaccgataagtgcgtgctggacatgcggagcatggacttcaagagcaactccgccgtggcctggtccaacaagtccgatttcgcctgcgccaacgccttcaacaacagcattatccccgaggacacattcttcccaagcagcgacgtgccctgcgacgtgaagctggtggaaaagagcttcgagacagacaccaacctgaacttccagaacctgagcgtgatcggcttcagaatcctgctgctgaaagtggccggctttaacctgctgatgaccctgcggctgtggtccagccgcgccaagagaagcggatctggcgtgaagcagaccctgaatttcgacctgctgaagctggctggcgacgtggaatccaacccaggcccttctagaggccatatgaccgagtacaagcccacggtgcgcctcgccacccgcgacgacgtccccagggccgtacgcaccctcgccgccgcgttcgccgactaccccgccacgcgccacaccgtcgatccggaccgccacatcgagcgggtcaccgagctgcaagaactcttcctcacgcgcgtcgggctcgacatcggcaaggtgtgggtcgcggacgacggcgccgcggtggcggtctggaccacgccggagagcgtcgaagcgggggcggtgttcgccgagatcggcccgcgcatggccgagttgagcggttcccggctggccgcgcagcaacagatggaaggcctcctggcgccgcaccggcccaaggagcccgcgtggttcctggccaccgtcggcgtctcgcccgaccaccagggcaagggtctgggcagcgccgtcgtgctccccggagtggaggcggccgagcgcgccggggtgcccgccttcctggagacctccgcgccccgcaacctccccttctacgagcggctcggcttcaccgtcaccgccgacgtcgaggtgcccgaaggaccgcgcacctggtgcatgacccgcaagcccggtgcctga

SEQ ID NO: 6221 - DNA, 2274 bp, Artificial Sequence; identical to SEQ ID NO: 1332
  Synthetic Polynucloetide

SEQ ID NO: 6222 - DNA, 2949 bp, Artificial Sequence
  Synthetic Polynucloetide
atggccttaccagtgaccgccttgctcctgccgctggccttgctgctccacgccgccaggccggaagtgcaggttttggagtctggcggaggactggttcagcctggcggatctctgagactgtcttgtgccgccagcggcttcaccttcagcaactttgccatgagctgggtccgacaggcccctggcaaaggacttgaatgggtgtccacaatcagcggcagcgccggcacaacagattacgccgattctgtgaagggcagattcaccatcagccgggacaacagcaagaaaaccctgtacctccagatgaacagcctgcgcgtggaagataccgccgtgtactactgtgccgatggcagaggccccttcttcgattatcgcggccagggcacactggtcaccgtttcttctggtaccggcggaggcggatctggcggcggaggtagcggtggcggaggatctgaattcgacatccagatgacacagagccctagcagcctgtctgccagcgtgggagacagagtgaccatcacatgcaaggccagcgaccacatcaacaactggctggcctggtatcagcagaagcctggacaggcccctaagctgctgatctacggcgctaccacactggaaacaggcgtgcccagcagattttctggcagcggctctggcaccgactacaccctgacaatatccagcctccagcctgaggacttcgccacctactactgtcagcagagctggaacaccccttggacattcggccagggcaccaagctggaaatcaagagactcgaggacctgaagaacgtgttcccacctgaggtggccgtgttcgagcctagcgaggccgagatcagccacacccagaaagccaccctcgtgtgcctggctaccggcttctaccccgaccatgtggaactgtcttggtgggtcaacggcaaagaggtgcacagcggcgtgtgtaccgacccccagccactgaaagaacagcccgccctgaacgacagccggtactgcctgagcagcagactgagagtgtccgccaccttctggcagaacccccggaaccacttcagatgccaggtgcagttctacggcctgagcgagaacgacgagtggacccaggacagagccaagcccgtgacccagatcgtgtctgccgaagcctggggcagagccgattgcggctttaccagcgagagctaccagcagggcgtgctgagcgccaccatcctgtacgagatcctgctgggcaaggccaccctgtacgccgtgctggtgtctgccctggtgctgatggctatggtcaagcggaaggacagccggggaagggccaagcgatctggatctggagcaacaaacttctcactactcaaacaagcaggtgacgtggaggagaatcccgggcctactagtatggactggatttggcgcatccttttccttgtcggcgctgctaccggcgcgcattccttcgaacaagttcagcttcaacagcctggcgctgagctggtcaaacctggcgcttctgtgaagatgagctgcaaagccagcggctacgccttcagcagctactggatcaactggatgaagcagaaacccggccagggactcgaatggatcggccaaatctatcccggcgacggcgacaccaactacaacggcaagttcaagggcagagccacactgaccgccgatacctctagcagcacagcctacatgcagctgagcagcctgaccagcgaagatagcgccgtgtacttctgtgcccggtccatcacaacagtcgtgggctgcgctatggactattggggccagggaacaagcgtgaccgtgtctagtacgcgtatccagaaccctgatcctgccgtgtaccagctgcgggatagcaagagcagcgacaagagcgtgtgtctgttcaccgacttcgacagccagaccaacgtgtcccagagcaaggactccgacgtgtacatcaccgataagtgcgtgctggacatgcggagcatggacttcaagagcaactccgccgtggcctggtccaacaagtccgatttcgcctgcgccaacgccttcaacaacagcattatccccgaggacacattcttcccaagccccgagagcagctgcgacgtgaagctggtggaaaagagcttcgagacagacaccaacctgaacttccagaacctgagcgtgatcggcttcagaatcctgctgctgaaagtggccggctttaacctgctgatgaccctgcggctgtggtccagccgcgccaagagaagcggatctggcgtgaagcagaccctgaatttcgacctgctgaagctggctggcgacgtggaatccaacccaggcccttctagaggcgggatccacaccatggctacctacgaggtgctgtgcgaggtggcaagaaagctgggcaccgacgacagagaagtggtgctgttcctgctgaacgtgttcatccctcagcctacactggcccagctgatcggtgcactgagagccctgaaagaggaaggccggctgacctttcctctgctggccgaatgcctgttcagagccggaagaagggatctgctgcgggacctgctgcatctggaccccagatttctggaaagacacctggccggcaccatgagctacttcagcccttaccagctgaccgtgctgcacgttgacggcgaactgtgcgccagagatattcggagcctgatcttcctgagcaaggacaccatcggcagccggtctacccctcagacatttctgcactgggtgtactgcatggaaaacctggacctgctcggccccacagatgtggatgccctgatgtccatgctgagaagcctgagcagagtggacctccagagacaggtgcagacactgatgggactgcacctgagcggacctagccacagccagcactacagacacacccct

SEQ ID NO: 6223 - DNA, 2286 bp, Artificial Sequence
  Synthetic Polynucloetide
atggccttaccagtgaccgccttgctcctgccgctggccttgctgctccacgccgccaggccggaagtgcaggttttggagtctggcggaggactggttcagcctggcggatctctgagactgtcttgtgccgccagcggcttcaccttcagcaactttgccatgagctgggtccgacaggcccctggcaaaggacttgaatgggtgtccacaatcagcggcagcgccggcacaacagattacgccgattctgtgaagggcagattcaccatcagccgggacaacagcaagaaaaccctgtacctccagatgaacagcctgcgcgtggaagataccgccgtgtactactgtgccgatggcagaggccccttcttcgattatcgcggccagggcacactggtcaccgtttcttctggtaccggcggaggcggatctggcggcggaggtagcggtggcggaggatctgaattcgacatccagatgacacagagccctagcagcctgtctgccagcgtgggagacagagtgaccatcacatgcaaggccagcgaccacatcaacaactggctggcctggtatcagcagaagcctggacaggcccctaagctgctgatctacggcgctaccacactggaaacaggcgtgcccagcagattttctggcagcggctctggcaccgactacaccctgacaatatccagcctccagcctgaggacttcgccacctactactgtcagcagagctggaacaccccttggacattcggccagggcaccaagctggaaatcaagagactcgagatccagaaccctgatcctgccgtgtaccagctgcgggatagcaagagcagcgacaagagcgtgtgtctgttcaccgacttcgacagccagaccaacgtgtcccagagcaaggactccgacgtgtacatcaccgataagtgcgtgctggacatgcggagcatggacttcaagagcaactccgccgtggcctggtccaacaagtccgatttcgcctgcgccaacgccttcaacaacagcattatccccgaggacacattcttcccaagccccgagagcagctgcgacgtgaagctggtggaaaagagcttcgagacagacaccaacctgaacttccagaacctgagcgtgatcggcttcagaatcctgctgctgaaagtggccggctttaacctgctgatgaccctgcggctgtggtccagccgcgccaagagaagcggatctggcgtgaagcagaccctgaatttcgacctgctgaagctggctggcgacgtggaatccaacccaggccctactagtatggactggatttggcgcatccttttccttgtcggcgctgctaccggcgcgcattccttcgaacaagttcagcttcaacagcctggcgctgagctggtcaaacctggcgcttctgtgaagatgagctgcaaagccagcggctacgccttcagcagctactggatcaactggatgaagcagaaacccggccagggactcgaatggatcggccaaatctatcccggcgacggcgacaccaactacaacggcaagttcaagggcagagccacactgaccgccgatacctctagcagcacagcctacatgcagctgagcagcctgaccagcgaagatagcgccgtgtacttctgtgcccggtccatcacaacagtcgtgggctgcgctatggactattggggccagggaacaagcgtgaccgtgtctagtacgcgtgaggacctgaagaacgtgttcccacctgaggtggccgtgttcgagcctagcgaggccgagatcagccacacccagaaagccaccctcgtgtgcctggctaccggcttctaccccgaccatgtggaactgtcttggtgggtcaacggcaaagaggtgcacagcggcgtgtgtaccgacccccagccactgaaagaacagcccgccctgaacgacagccggtactgcctgagcagcagactgagagtgtccgccaccttctggcagaacccccggaaccacttcagatgccaggtgcagttctacggcctgagcgagaacgacgagtggacccaggacagagccaagcccgtgacccagatcgtgtctgccgaagcctggggcagagccgattgcggctttaccagcgagagctaccagcagggcgtgctgagcgccaccatcctgtacgagatcctgctgggcaaggccaccctgtacgccgtgctggtgtctgccctggtgctgatggctatggtcaagcggaaggacagccgggga

SEQ ID NO: 6224 - DNA, 2952 bp, Artificial Sequence
  Synthetic Polynucloetide
atggccttaccagtgaccgccttgctcctgccgctggccttgctgctccacgccgccaggccggaagtgcaggttttggagtctggcggaggactggttcagcctggcggatctctgagactgtcttgtgccgccagcggcttcaccttcagcaactttgccatgagctgggtccgacaggcccctggcaaaggacttgaatgggtgtccacaatcagcggcagcgccggcacaacagattacgccgattctgtgaagggcagattcaccatcagccgggacaacagcaagaaaaccctgtacctccagatgaacagcctgcgcgtggaagataccgccgtgtactactgtgccgatggcagaggccccttcttcgattatcgcggccagggcacactggtcaccgtttcttctggtaccggcggaggcggatctggcggcggaggtagcggtggcggaggatctgaattcgacatccagatgacacagagccctagcagcctgtctgccagcgtgggagacagagtgaccatcacatgcaaggccagcgaccacatcaacaactggctggcctggtatcagcagaagcctggacaggcccctaagctgctgatctacggcgctaccacactggaaacaggcgtgcccagcagattttctggcagcggctctggcaccgactacaccctgacaatatccagcctccagcctgaggacttcgccacctactactgtcagcagagctggaacaccccttggacattcggccagggcaccaagctggaaatcaagagactcgagatccagaaccctgatcctgccgtgtaccagctgcgggatagcaagagcagcgacaagagcgtgtgtctgttcaccgacttcgacagccagaccaacgtgtcccagagcaaggactccgacgtgtacatcaccgataagtgcgtgctggacatgcggagcatggacttcaagagcaactccgccgtggcctggtccaacaagtccgatttcgcctgcgccaacgccttcaacaacagcattatccccgaggacacattcttcccaagccccgagagcagctgcgacgtgaagctggtggaaaagagcttcgagacagacaccaacctgaacttccagaacctgagcgtgatcggcttcagaatcctgctgctgaaagtggccggctttaacctgctgatgaccctgcggctgtggtccagccgcgccaagagaagcggatctggcgtgaagcagaccctgaatttcgacctgctgaagctggctggcgacgtggaatccaacccaggccctactagtatggactggatttggcgcatccttttccttgtcggcgctgctaccggcgcgcattccttcgaacaagttcagcttcaacagcctggcgctgagctggtcaaacctggcgcttctgtgaagatgagctgcaaagccagcggctacgccttcagcagctactggatcaactggatgaagcagaaacccggccagggactcgaatggatcggccaaatctatcccggcgacggcgacaccaactacaacggcaagttcaagggcagagccacactgaccgccgatacctctagcagcacagcctacatgcagctgagcagcctgaccagcgaagatagcgccgtgtacttctgtgcccggtccatcacaacagtcgtgggctgcgctatggactattggggccagggaacaagcgtgaccgtgtctagtacgcgtgaggacctgaagaacgtgttcccacctgaggtggccgtgttcgagcctagcgaggccgagatcagccacacccagaaagccaccctcgtgtgcctggctaccggcttctaccccgaccatgtggaactgtcttggtgggtcaacggcaaagaggtgcacagcggcgtgtgtaccgacccccagccactgaaagaacagcccgccctgaacgacagccggtactgcctgagcagcagactgagagtgtccgccaccttctggcagaacccccggaaccacttcagatgccaggtgcagttctacggcctgagcgagaacgacgagtggacccaggacagagccaagcccgtgacccagatcgtgtctgccgaagcctggggcagagccgattgcggctttaccagcgagagctaccagcagggcgtgctgagcgccaccatcctgtacgagatcctgctgggcaaggccaccctgtacgccgtgctggtgtctgccctggtgctgatggctatggtcaagcggaaggacagccggggaagggccaagcgatctggatctggagcaacaaacttctcactactcaaacaagcaggtgacgtggaggagaatcccgggccttctagaggcgggatccacaccatggctacctacgaggtgctgtgcgaggtggcaagaaagctgggcaccgacgacagagaagtggtgctgttcctgctgaacgtgttcatccctcagcctacactggcccagctgatcggtgcactgagagccctgaaagaggaaggccggctgacctttcctctgctggccgaatgcctgttcagagccggaagaagggatctgctgcgggacctgctgcatctggaccccagatttctggaaagacacctggccggcaccatgagctacttcagcccttaccagctgaccgtgctgcacgttgacggcgaactgtgcgccagagatattcggagcctgatcttcctgagcaaggacaccatcggcagccggtctacccctcagacatttctgcactgggtgtactgcatggaaaacctggacctgctcggccccacagatgtggatgccctgatgtccatgctgagaagcctgagcagagtggacctccagagacaggtgcagacactgatgggactgcacctgagcggacctagccacagccagcactacagacacacccct

SEQ ID NO: 6225 - DNA, 3111 bp, Artificial Sequence
  Synthetic Polynucloetide
atggccttaccagtgaccgccttgctcctgccgctggccttgctgctccacgccgccaggccgctcgaggggaaaccaattcccaaccctcttctgggactggattcaaccggcagcggcgaggacctgaagaacgtgttcccacctgaggtggccgtgttcgagcctagcaaggccgagatcgcccacacccagaaagccaccctcgtgtgcctggctaccggcttctaccccgaccatgtggaactgtcttggtgggtcaacggcaaagaggtgcacagcggcgtgtgtaccgacccccagccactgaaagaacagcccgccctgaacgacagccggtactgcctgagcagcagactgagagtgtccgccaccttctggcagaacccccggaaccacttcagatgccaggtgcagttctacggcctgagcgagaacgacgagtggacccaggacagagccaagcccgtgacccagatcgtgtctgccgaagcctggggcagagccgattgcggcatcaccagcgccagctaccaccagggcgtgctgagcgccaccatcctgtacgagatcctgctgggcaaggccaccctgtacgccgtgctggtgtctgccctggtgctgatggctatggtcaagcggaaggacagccggggaagggccaagcgatctggatctggagcaacaaacttctcactactcaaacaagcaggtgacgtggaggagaatcccgggcctactagcatggccttaccagtgaccgccttgctcctgccgctggccttgctgctccacgccgccaggccggaagtgcaggttttggagtctggcggaggactggttcagcctggcggatctctgagactgtcttgtgccgccagcggcttcaccttcagcaactttgccatgagctgggtccgacaggcccctggcaaaggacttgaatgggtgtccacaatcagcggcagcgccggcacaacagattacgccgattctgtgaagggcagattcaccatcagccgggacaacagcaagaaaaccctgtacctccagatgaacagcctgcgcgtggaagataccgccgtgtactactgtgccgatggcagaggccccttcttcgattatcgcggccagggcacactggtcaccgtttcttctggtaccggcggaggcggatctggcggcggaggtagcggtggcggaggatctgaattcgacatccagatgacacagagccctagcagcctgtctgccagcgtgggagacagagtgaccatcacatgcaaggccagcgaccacatcaacaactggctggcctggtatcagcagaagcctggacaggcccctaagctgctgatctacggcgctaccacactggaaacaggcgtgcccagcagattttctggcagcggctctggcaccgactacaccctgacaatatccagcctccagcctgaggacttcgccacctactactgtcagcagagctggaacaccccttggacattcggccagggcaccaagctggaaatcaagagaggcggaggcggaagtggaggcggaggatctggcggcggaggctctcaagttcagcttcaacagcctggcgctgagctggtcaaacctggcgcttctgtgaagatgagctgcaaagccagcggctacgccttcagcagctactggatcaactggatgaagcagaaacccggccagggactcgaatggatcggccaaatctatcccggcgacggcgacaccaactacaacggcaagttcaagggcagagccacactgaccgccgatacctctagcagcacagcctacatgcagctgagcagcctgaccagcgaagatagcgccgtgtacttctgtgcccggtccatcacaacagtcgtgggctgcgctatggactattggggccagggaacaagcgtgaccgtgtctagtacgcgtgagcagaaactgatctcggaagaggatgggagcggcatccagaaccctgatcctgccgtgtaccagctgcgggatagcaagagcagcgacaagagcgtgtgtctgttcaccgacttcgacagccagaccaacgtgtcccagagcaaggactccgacgtgtacatcaccgataagtgcgtgctggacatgcggagcatggacttcaagagcaactccgccgtggcctggtccaacaagtccgatttcgcctgcgccaacgccttcaacaacagcattatccccgaggacacattcttcccaagcagcgacgtgccctgcgacgtgaagctggtggaaaagagcttcgagacagacaccaacctgaacttccagaacctgagcgtgatcggcttcagaatcctgctgctgaaagtggccggctttaacctgctgatgaccctgcggctgtggtccagccgcgccaagagaagcggatctggcgtgaagcagaccctgaatttcgacctgctgaagctggctggcgacgtggaatccaacccaggcccttctagaggccatatgaccgagtacaagcccacggtgcgcctcgccacccgcgacgacgtccccagggccgtacgcaccctcgccgccgcgttcgccgactaccccgccacgcgccacaccgtcgatccggaccgccacatcgagcgggtcaccgagctgcaagaactcttcctcacgcgcgtcgggctcgacatcggcaaggtgtgggtcgcggacgacggcgccgcggtggcggtctggaccacgccggagagcgtcgaagcgggggcggtgttcgccgagatcggcccgcgcatggccgagttgagcggttcccggctggccgcgcagcaacagatggaaggcctcctggcgccgcaccggcccaaggagcccgcgtggttcctggccaccgtcggcgtctcgcccgaccaccagggcaagggtctgggcagcgccgtcgtgctccccggagtggaggcggccgagcgcgccggggtgcccgccttcctggagacctccgcgccccgcaacctccccttctacgagcggctcggcttcaccgtcaccgccgacgtcgaggtgcccgaaggaccgcgcacctggtgcatgacccgcaagcccggtgcctga

SEQ ID NO: 6226 - DNA, 3114 bp, Artificial Sequence
  Synthetic Polynucloetide
atggccttaccagtgaccgccttgctcctgccgctggccttgctgctccacgccgccaggccgctcgagcagaaactgatctcggaagaggatctgggctccggcgatcgccctgatcctgccgtgtaccagctgcgggatagcaagagcagcgacaagagcgtgtgtctgttcaccgacttcgacagccagaccaacgtgtcccagagcaaggactccgacgtgtacatcaccgataagtgcgtgctggacatgcggagcatggacttcaagagcaactccgccgtggcctggtccaacaagtccgatttcgcctgcgccaacgccttcaacaacagcattatccccgaggacacattcttcccaagccccgagagcagctgcgacgtgaagctggtggaaaagagcttcgagacagacaccaacctgaacttccagaacctgagcgtgatcggcttcagaatcctgctgctgaaagtggccggctttaacctgctgatgaccctgcggctgtggtccagctctagtcgcgccaagagaagcggatctggcgtgaagcagaccctgaatttcgacctgctgaagctggctggcgacgtggaatccaacccaggccccactagcatggccttaccagtgaccgccttgctcctgccgctggccttgctgctccacgccgccaggccggaagtgcaggttttggagtctggcggaggactggttcagcctggcggatctctgagactgtcttgtgccgccagcggcttcaccttcagcaactttgccatgagctgggtccgacaggcccctggcaaaggacttgaatgggtgtccacaatcagcggcagcgccggcacaacagattacgccgattctgtgaagggcagattcaccatcagccgggacaacagcaagaaaaccctgtacctccagatgaacagcctgcgcgtggaagataccgccgtgtactactgtgccgatggcagaggccccttcttcgattatcgcggccagggcacactggtcaccgtttcttctggtaccggcggaggcggatctggcggcggaggtagcggtggcggaggatctgaattcgacatccagatgacacagagccctagcagcctgtctgccagcgtgggagacagagtgaccatcacatgcaaggccagcgaccacatcaacaactggctggcctggtatcagcagaagcctggacaggcccctaagctgctgatctacggcgctaccacactggaaacaggcgtgcccagcagattttctggcagcggctctggcaccgactacaccctgacaatatccagcctccagcctgaggacttcgccacctactactgtcagcagagctggaacaccccttggacattcggccagggcaccaagctggaaatcaagagaggcggaggcggaagtggaggcggaggatctggcggcggaggctctcaagttcagcttcaacagcctggcgctgagctggtcaaacctggcgcttctgtgaagatgagctgcaaagccagcggctacgccttcagcagctactggatcaactggatgaagcagaaacccggccagggactcgaatggatcggccaaatctatcccggcgacggcgacaccaactacaacggcaagttcaagggcagagccacactgaccgccgatacctctagcagcacagcctacatgcagctgagcagcctgaccagcgaagatagcgccgtgtacttctgtgcccggtccatcacaacagtcgtgggctgcgctatggactattggggccagggaacaagcgtgaccgtgtctagtacgcgtgggaaaccaattcccaaccctcttctgggactggattcaaccggcagcggcgaggacctgaagaacgtgttcccacctgaggtggccgtgttcgagcctagcgaggccgagatcagccacacccagaaagccaccctcgtgtgcctggctaccggcttctaccccgaccatgtggaactgtcttggtgggtcaacggcaaagaggtgcacagcggcgtgtgtaccgacccccagccactgaaagaacagcccgccctgaacgacagccggtactgcctgagcagcagactgagagtgtccgccaccttctggcagaacccccggaaccacttcagatgccaggtgcagttctacggcctgagcgagaacgacgagtggacccaggacagagccaagcccgtgacccagatcgtgtctgccgaagcctggggcagagccgattgcggctttaccagcgagagctaccagcagggcgtgctgagcgccaccatcctgtacgagatcctgctgggcaaggccaccctgtacgccgtgctggtgtctgccctggtgctgatggctatggtcaagcggaaggacagccggggaagggccaagcgatctggatctggagcaacaaacttctcactactcaaacaagcaggtgacgtggaggagaatcccgggccttctagaggccatatgaccgagtacaagcccacggtgcgcctcgccacccgcgacgacgtccccagggccgtacgcaccctcgccgccgcgttcgccgactaccccgccacgcgccacaccgtcgatccggaccgccacatcgagcgggtcaccgagctgcaagaactcttcctcacgcgcgtcgggctcgacatcggcaaggtgtgggtcgcggacgacggcgccgcggtggcggtctggaccacgccggagagcgtcgaagcgggggcggtgttcgccgagatcggcccgcgcatggccgagttgagcggttcccggctggccgcgcagcaacagatggaaggcctcctggcgccgcaccggcccaaggagcccgcgtggttcctggccaccgtcggcgtctcgcccgaccaccagggcaagggtctgggcagcgccgtcgtgctccccggagtggaggcggccgagcgcgccggggtgcccgccttcctggagacctccgcgccccgcaacctccccttctacgagcggctcggcttcaccgtcaccgccgacgtcgaggtgcccgaaggaccgcgcacctggtgcatgacccgcaagcccggtgcctga

SEQ ID NO: 6227 - DNA, 2976 bp, Artificial Sequence
  Synthetic Polynucloetide
atggccttaccagtgaccgccttgctcctgccgctggccttgctgctccacgccgccaggccggaagtgcaggttttggagtctggcggaggactggttcagcctggcggatctctgagactgtcttgtgccgccagcggcttcaccttcagcaactttgccatgagctgggtccgacaggcccctggcaaaggacttgaatgggtgtccacaatcagcggcagcgccggcacaacagattacgccgattctgtgaagggcagattcaccatcagccgggacaacagcaagaaaaccctgtacctccagatgaacagcctgcgcgtggaagataccgccgtgtactactgtgccgatggcagaggccccttcttcgattatcgcggccagggcacactggtcaccgtttcttctggtaccggcggaggcggatctggcggcggaggtagcggtggcggaggatctgaattcgacatccagatgacacagagccctagcagcctgtctgccagcgtgggagacagagtgaccatcacatgcaaggccagcgaccacatcaacaactggctggcctggtatcagcagaagcctggacaggcccctaagctgctgatctacggcgctaccacactggaaacaggcgtgcccagcagattttctggcagcggctctggcaccgactacaccctgacaatatccagcctccagcctgaggacttcgccacctactactgtcagcagagctggaacaccccttggacattcggccagggcaccaagctggaaatcaagagactcgaggacctgaagaacgtgttcccacctgaggtggccgtgttcgagcctagcgaggccgagatcagccacacccagaaagccaccctcgtgtgcctggctaccggcttctaccccgaccatgtggaactgtcttggtgggtcaacggcaaagaggtgcacagcggcgtgtctaccgacccccagccactgaaagaacagcccgccctgaacgacagccggtactgcctgagcagcagactgagagtgtccgccaccttctggcagaacccccggaaccacttcagatgccaggtgcagttctacggcctgagcgagaacgacgagtggacccaggacagagccaagcccgtgacccagatcgtgtctgccgaagcctggggcagagccgattgcggctttaccagcgagagctaccagcagggcgtgctgagcgccaccatcctgtacgagatcctgctgggcaaggccaccctgtacgccgtgctggtgtctgccctggtgctgatggctatggtcaagcggaaggacagccggggaagggccaagcgatctggatctggagcaacaaacttctcactactcaaacaagcaggtgacgtggaggagaatcccgggcctactagtatggactggatttggcgcatccttttccttgtcggcgctgctaccggcgcgcattccttcgaacaagttcagcttcaacagcctggcgctgagctggtcaaacctggcgcttctgtgaagatgagctgcaaagccagcggctacgccttcagcagctactggatcaactggatgaagcagaaacccggccagggactcgaatggatcggccaaatctatcccggcgacggcgacaccaactacaacggcaagttcaagggcagagccacactgaccgccgatacctctagcagcacagcctacatgcagctgagcagcctgaccagcgaagatagcgccgtgtacttctgtgcccggtccatcacaacagtcgtgggctgcgctatggactattggggccagggaacaagcgtgaccgtgtctagtacgcgtatccagaaccctgatcctgccgtgtaccagctgcgggatagcaagagcagcgacaagagcgtgtgtctgttcaccgacttcgacagccagaccaacgtgtcccagagcaaggactccgacgtgtacatcaccgataagaccgtgctggacatgcggagcatggacttcaagagcaactccgccgtggcctggtccaacaagtccgatttcgcctgcgccaacgccttcaacaacagcattatccccgaggacacattcttcccaagccccgagagcagctgcgacgtgaagctggtggaaaagagcttcgagacagacaccaacctgaacttccagaacctgagcgtgatcggcttcagaatcctgctgctgaaagtggccggctttaacctgctgatgaccctgcggctgtggtccagccgcgccaagagaagcggatctggcgtgaagcagaccctgaatttcgacctgctgaagctggctggcgacgtggaatccaacccaggcccttctagaggccatatgaccgagtacaagcccacggtgcgcctcgccacccgcgacgacgtccccagggccgtacgcaccctcgccgccgcgttcgccgactaccccgccacgcgccacaccgtcgatccggaccgccacatcgagcgggtcaccgagctgcaagaactcttcctcacgcgcgtcgggctcgacatcggcaaggtgtgggtcgcggacgacggcgccgcggtggcggtctggaccacgccggagagcgtcgaagcgggggcggtgttcgccgagatcggcccgcgcatggccgagttgagcggttcccggctggccgcgcagcaacagatggaaggcctcctggcgccgcaccggcccaaggagcccgcgtggttcctggccaccgtcggcgtctcgcccgaccaccagggcaagggtctgggcagcgccgtcgtgctccccggagtggaggcggccgagcgcgccggggtgcccgccttcctggagacctccgcgccccgcaacctccccttctacgagcggctcggcttcaccgtcaccgccgacgtcgaggtgcccgaaggaccgcgcacctggtgcatgacccgcaagcccggtgcctga

SEQ ID NO: 6228 - DNA, 3222 bp, Artificial Sequence
  Synthetic Polynucloetide
atggccttaccagtgaccgccttgctcctgccgctggccttgctgctccacgccgccaggccggaagtgcaggttttggagtctggcggaggactggttcagcctggcggatctctgagactgtcttgtgccgccagcggcttcaccttcagcaactttgccatgagctgggtccgacaggcccctggcaaaggacttgaatgggtgtccacaatcagcggcagcgccggcacaacagattacgccgattctgtgaagggcagattcaccatcagccgggacaacagcaagaaaaccctgtacctccagatgaacagcctgcgcgtggaagataccgccgtgtactactgtgccgatggcagaggccccttcttcgattatcgcggccagggcacactggtcaccgtttcttctggtaccggcggaggcggatctggcggcggaggtagcggtggcggaggatctgaattcgacatccagatgacacagagccctagcagcctgtctgccagcgtgggagacagagtgaccatcacatgcaaggccagcgaccacatcaacaactggctggcctggtatcagcagaagcctggacaggcccctaagctgctgatctacggcgctaccacactggaaacaggcgtgcccagcagattttctggcagcggctctggcaccgactacaccctgacaatatccagcctccagcctgaggacttcgccacctactactgtcagcagagctggaacaccccttggacattcggccagggcaccaagctggaaatcaagagactcgaggacctgaagaacgtgttcccacctgaggtggccgtgttcgagcctagcgaggccgagatcagccacacccagaaagccaccctcgtgtgcctggctaccggcttctaccccgaccatgtggaactgtcttggtgggtcaacggcaaagaggtgcacagcggcgtgtctaccgacccccagccactgaaagaacagcccgccctgaacgacagccggtactgcctgagcagcagactgagagtgtccgccaccttctggcagaacccccggaaccacttcagatgccaggtgcagttctacggcctgagcgagaacgacgagtggacccaggacagagccaagcccgtgacccagatcgtgtctgccgaagcctggggcagagccgattgcggctttaccagcgagagctaccagcagggcgtgctgagcgccaccatcctgtacgagatcctgctgggcaaggccaccctgtacgccgtgctggtgtctgccctggtgctgatggctatggtcaagcggaaggacagccggggaagggccaagcgatctggatctggagcaacaaacttctcactactcaaacaagcaggtgacgtggaggagaatcccgggcctactagtatggactggatttggcgcatccttttccttgtcggcgctgctaccggcgcgcattccttcgaacaagttcagcttcaacagcctggcgctgagctggtcaaacctggcgcttctgtgaagatgagctgcaaagccagcggctacgccttcagcagctactggatcaactggatgaagcagaaacccggccagggactcgaatggatcggccaaatctatcccggcgacggcgacaccaactacaacggcaagttcaagggcagagccacactgaccgccgatacctctagcagcacagcctacatgcagctgagcagcctgaccagcgaagatagcgccgtgtacttctgtgcccggtccatcacaacagtcgtgggctgcgctatggactattggggccagggaacaagcgtgaccgtgtctagtacgcgtgagcagaaactgatctcggaagaggatgggagcggcaccccattcccttctctggcccctcccatcatgctgctggtggacggcaagcagcagatggtggtcgtgtgcctggtgctggatgtggccccacctggactggacagccccatctggtttagcgccggcaatggctctgccctggacgcctttacctacggcccaagccctgccaccgatggcacctggacaaatctggcccacctgagcctgcccagcgaggaactggcttcttgggagcctctcgtgtgccacacaggacctggcgctgagggacacagcagatccacccagcctatgcacctgtctggcgaggccagcaccgccagaacctgtcctcaggaacctctgagaggcacccctggcggagcactgtggctgggagtgctgagactgctgctgttcaagctgctgctgtttgacctgctgctgacctgctcctgtctgtgcgatcctgccggccctctgccttctcctgccaccaccacaagactgagagccctgggcagccacagactgcaccctgccacagagacaggcggcagagaggccacaagcagccctagaccccagcccagagacagaagatggggcgataccccccctggcagaaagcctggatctccagtccgcgccaagagaagcggatctggcgtgaagcagaccctgaatttcgacctgctgaagctggctggcgacgtggaatccaacccaggcccttctagaggccatatgaccgagtacaagcccacggtgcgcctcgccacccgcgacgacgtccccagggccgtacgcaccctcgccgccgcgttcgccgactaccccgccacgcgccacaccgtcgatccggaccgccacatcgagcgggtcaccgagctgcaagaactcttcctcacgcgcgtcgggctcgacatcggcaaggtgtgggtcgcggacgacggcgccgcggtggcggtctggaccacgccggagagcgtcgaagcgggggcggtgttcgccgagatcggcccgcgcatggccgagttgagcggttcccggctggccgcgcagcaacagatggaaggcctcctggcgccgcaccggcccaaggagcccgcgtggttcctggccaccgtcggcgtctcgcccgaccaccagggcaagggtctgggcagcgccgtcgtgctccccggagtggaggcggccgagcgcgccggggtgcccgccttcctggagacctccgcgccccgcaacctccccttctacgagcggctcggcttcaccgtcaccgccgacgtcgaggtgcccgaaggaccgcgcacctggtgcatgacccgcaagcccggtgcctga

SEQ ID NO: 6229 - DNA, 3276 bp, Artificial Sequence
  Synthetic Polynucloetide
atggccttaccagtgaccgccttgctcctgccgctggccttgctgctccacgccgccaggccgctcgaggacctgaagaacgtgttcccacctgaggtggccgtgttcgagcctagcgaggccgagatcagccacacccagaaagccaccctcgtgtgcctggctaccggcttctaccccgaccatgtggaactgtcttggtgggtcaacggcaaagaggtgcacagcggcgtgtctaccgacccccagccactgaaagaacagcccgccctgaacgacagccggtactgcctgagcagcagactgagagtgtccgccaccttctggcagaacccccggaaccacttcagatgccaggtgcagttctacggcctgagcgagaacgacgagtggacccaggacagagccaagcccgtgacccagatcgtgtctgccgaagcctggggcagagccgattgcggctttaccagcgagagctaccagcagggcgtgctgagcgccaccatcctgtacgagatcctgctgggcaaggccaccctgtacgccgtgctggtgtctgccctggtgctgatggctatggtcaagcggaaggacagccggggaagggccaagcgatctggatctggagcaacaaacttctcactactcaaacaagcaggtgacgtggaggagaatcccgggcctactagcatggccttaccagtgaccgccttgctcctgccgctggccttgctgctccacgccgccaggccggaagtgcaggttttggagtctggcggaggactggttcagcctggcggatctctgagactgtcttgtgccgccagcggcttcaccttcagcaactttgccatgagctgggtccgacaggcccctggcaaaggacttgaatgggtgtccacaatcagcggcagcgccggcacaacagattacgccgattctgtgaagggcagattcaccatcagccgggacaacagcaagaaaaccctgtacctccagatgaacagcctgcgcgtggaagataccgccgtgtactactgtgccgatggcagaggccccttcttcgattatcgcggccagggcacactggtcaccgtttcttctggtaccggcggaggcggatctggcggcggaggtagcggtggcggaggatctgaattcgacatccagatgacacagagccctagcagcctgtctgccagcgtgggagacagagtgaccatcacatgcaaggccagcgaccacatcaacaactggctggcctggtatcagcagaagcctggacaggcccctaagctgctgatctacggcgctaccacactggaaacaggcgtgcccagcagattttctggcagcggctctggcaccgactacaccctgacaatatccagcctccagcctgaggacttcgccacctactactgtcagcagagctggaacaccccttggacattcggccagggcaccaagctggaaatcaagagaggcggaggcggaagtggaggcggaggatctggcggcggaggctctcaagttcagcttcaacagcctggcgctgagctggtcaaacctggcgcttctgtgaagatgagctgcaaagccagcggctacgccttcagcagctactggatcaactggatgaagcagaaacccggccagggactcgaatggatcggccaaatctatcccggcgacggcgacaccaactacaacggcaagttcaagggcagagccacactgaccgccgatacctctagcagcacagcctacatgcagctgagcagcctgaccagcgaagatagcgccgtgtacttctgtgcccggtccatcacaacagtcgtgggctgcgctatggactattggggccagggaacaagcgtgaccgtgtctagtacgcgtgagcagaaactgatctcggaagaggatctggggagcggcaccccattcccttctctggcccctcccatcatgctgctggtggacggcaagcagcagatggtggtcgtgtgcctggtgctggatgtggccccacctggactggacagccccatctggtttagcgccggcaatggctctgccctggacgcctttacctacggcccaagccctgccaccgatggcacctggacaaatctggcccacctgagcctgcccagcgaggaactggcttcttgggagcctctcgtgtgccacacaggacctggcgctgagggacacagcagatccacccagcctatgcacctgtctggcgaggccagcaccgccagaacctgtcctcaggaacctctgagaggcacccctggcggagcactgtggctgggagtgctgagactgctgctgttcaagctgctgctgtttgacctgctgctgacctgctcctgtctgtgcgatcctgccggccctctgccttctcctgccaccaccacaagactgagagccctgggcagccacagactgcaccctgccacagagacaggcggcagagaggccacaagcagccctagaccccagcccagagacagaagatggggcgataccccccctggcagaaagcctggatctccagtccgcgccaagagaagcggatctggcgtgaagcagaccctgaatttcgacctgctgaagctggctggcgacgtggaatccaacccaggcccttctagatctagaggccatatgaccgagtacaagcccacggtgcgcctcgccacccgcgacgacgtccccagggccgtacgcaccctcgccgccgcgttcgccgactaccccgccacgcgccacaccgtcgatccggaccgccacatcgagcgggtcaccgagctgcaagaactcttcctcacgcgcgtcgggctcgacatcggcaaggtgtgggtcgcggacgacggcgccgcggtggcggtctggaccacgccggagagcgtcgaagcgggggcggtgttcgccgagatcggcccgcgcatggccgagttgagcggttcccggctggccgcgcagcaacagatggaaggcctcctggcgccgcaccggcccaaggagcccgcgtggttcctggccaccgtcggcgtctcgcccgaccaccagggcaagggtctgggcagcgccgtcgtgctccccggagtggaggcggccgagcgcgccggggtgcccgccttcctggagacctccgcgccccgcaacctccccttctacgagcggctcggcttcaccgtcaccgccgacgtcgaggtgcccgaaggaccgcgcacctggtgcatgacccgcaagcccggtgcctga

SEQ ID NO: 6230 - DNA, 3087 bp, Artificial Sequence
  Synthetic Polynucloetide
atggccttaccagtgaccgccttgctcctgccgctggccttgctgctccacgccgccaggccggaagtgcaggttttggagtctggcggaggactggttcagcctggcggatctctgagactgtcttgtgccgccagcggcttcaccttcagcaactttgccatgagctgggtccgacaggcccctggcaaaggacttgaatgggtgtccacaatcagcggcagcgccggcacaacagattacgccgattctgtgaagggcagattcaccatcagccgggacaacagcaagaaaaccctgtacctccagatgaacagcctgcgcgtggaagataccgccgtgtactactgtgccgatggcagaggccccttcttcgattatcgcggccagggcacactggtcaccgtttcttctggtaccggcggaggcggatctggcggcggaggtagcggtggcggaggatctgaattcgacatccagatgacacagagccctagcagcctgtctgccagcgtgggagacagagtgaccatcacatgcaaggccagcgaccacatcaacaactggctggcctggtatcagcagaagcctggacaggcccctaagctgctgatctacggcgctaccacactggaaacaggcgtgcccagcagattttctggcagcggctctggcaccgactacaccctgacaatatccagcctccagcctgaggacttcgccacctactactgtcagcagagctggaacaccccttggacattcggccagggcaccaagctggaaatcaagagactcgaggggaaaccaattcccaaccctcttctgggactggattcaaccggcagcggcgacaagcagctggacgccgacgtgtcccccaagcctaccatcttcctgccctctatcgccgagacaaagctccagaaggccggcacctacctgtgcctgctggaaaagttcttcccagatgtgattaagatccactggcaggaaaagaagtccaacaccatcctgggcagccaggaaggcaacaccatgaagaccaacgacacctacatgaagttcagctggctgaccgtgcccgagaagtccctggacaaagaacacagatgcatcgtgcggcacgaaaacaacaagaacggcgtggaccaggaaatcatcttcccacccatcaagaccgatgtgattacaatggaccccaaggacaactgctccaaggacgccaacgataccctgctgctccagctgaccaacaccagcgcctactacatgtacttgttgctgctgctgaagtccgtggtgtacttcgccatcatcacatgctgcctgctgcggagaaccgccttctgctgcaacggcgagaagtctagggccaagcgatctggatctggagcaacaaacttctcactactcaaacaagcaggtgacgtggaggagaatcccgggcctactagtatggactggatttggcgcatccttttccttgtcggcgctgctaccggcgcgcattccttcgaacaagttcagcttcaacagcctggcgctgagctggtcaaacctggcgcttctgtgaagatgagctgcaaagccagcggctacgccttcagcagctactggatcaactggatgaagcagaaacccggccagggactcgaatggatcggccaaatctatcccggcgacggcgacaccaactacaacggcaagttcaagggcagagccacactgaccgccgatacctctagcagcacagcctacatgcagctgagcagcctgaccagcgaagatagcgccgtgtacttctgtgcccggtccatcacaacagtcgtgggctgcgctatggactattggggccagggaacaagcgtgaccgtgtctagtacgcgtgagcagaaactgatctcggaagaggatgggagcggcagccagcctcacaccaagcccagcgtgttcgtgatgaagaacggcaccaacgtggcctgcctcgtgaaagagttctaccccaaggacatcaggatcaacctggtgtccagcaagaagatcaccgagttcgaccccgccatcgtgatctcccccagcggcaagtacaacgccgtgaagctggggaagtacgaggacagcaacagcgtgacctgctccgtgcagcacgacaacaagaccgtgcacagcaccgactttgaagtgaaaaccgactccaccgaccacgtgaagcccaaagagacagagaacaccaagcagcccagcaagagctgccacaagcccaaggccatcgtgcacaccgagaaagtgaacatgatgagcctgaccgtgctgggcctgcggatgctgttcgccaaaaccgtggccgtgaacttcctgctgaccgccaagctgttcttcctccgcgccaagagaagcggatctggcgtgaagcagaccctgaatttcgacctgctgaagctggctggcgacgtggaatccaacccaggcccttctagaggccatatgaccgagtacaagcccacggtgcgcctcgccacccgcgacgacgtccccagggccgtacgcaccctcgccgccgcgttcgccgactaccccgccacgcgccacaccgtcgatccggaccgccacatcgagcgggtcaccgagctgcaagaactcttcctcacgcgcgtcgggctcgacatcggcaaggtgtgggtcgcggacgacggcgccgcggtggcggtctggaccacgccggagagcgtcgaagcgggggcggtgttcgccgagatcggcccgcgcatggccgagttgagcggttcccggctggccgcgcagcaacagatggaaggcctcctggcgccgcaccggcccaaggagcccgcgtggttcctggccaccgtcggcgtctcgcccgaccaccagggcaagggtctgggcagcgccgtcgtgctccccggagtggaggcggccgagcgcgccggggtgcccgccttcctggagacctccgcgccccgcaacctccccttctacgagcggctcggcttcaccgtcaccgccgacgtcgaggtgcccgaaggaccgcgcacctggtgcatgacccgcaagcccggtgcctga

SEQ ID NO: 6231 - DNA, 2298 bp, Artificial Sequence
  Synthetic Polynucloetide
atggccttaccagtgaccgccttgctcctgccgctggccttgctgctccacgccgccaggccggaagtgcaggttttggagtctggcggaggactggttcagcctggcggatctctgagactgtcttgtgccgccagcggcttcaccttcagcaactttgccatgagctgggtccgacaggcccctggcaaaggacttgaatgggtgtccacaatcagcggcagcgccggcacaacagattacgccgattctgtgaagggcagattcaccatcagccgggacaacagcaagaaaaccctgtacctccagatgaacagcctgcgcgtggaagataccgccgtgtactactgtgccgatggcagaggccccttcttcgattatcgcggccagggcacactggtcaccgtttcttctggtaccggcggaggcggatctggcggcggaggtagcggtggcggaggatctgaattcgacatccagatgacacagagccctagcagcctgtctgccagcgtgggagacagagtgaccatcacatgcaaggccagcgaccacatcaacaactggctggcctggtatcagcagaagcctggacaggcccctaagctgctgatctacggcgctaccacactggaaacaggcgtgcccagcagattttctggcagcggctctggcaccgactacaccctgacaatatccagcctccagcctgaggacttcgccacctactactgtcagcagagctggaacaccccttggacattcggccagggcaccaagctggaaatcaagagactcgagagccagcctcacaccaagcccagcgtgttcgtgatgaagaacggcaccaacgtggcctgcctcgtgaaagagttctaccccaaggacatcaggatcaacctggtgtccagcaagaagatcaccgagttcgaccccgccatcgtgatctcccccagcggcaagtacaacgccgtgaagctggggaagtacgaggacagcaacagcgtgacctgctccgtgcagcacgacaacaagaccgtgcacagcaccgactttgaagtgaaaaccgactccaccgaccacgtgaagcccaaagagacagagaacaccaagcagcccagcaagagctgccacaagcccaaggccatcgtgcacaccgagaaagtgaacatgatgagcctgaccgtgctgggcctgcggatgctgttcgccaaaaccgtggccgtgaacttcctgctgaccgccaagctgttcttcctcagggccaagcgatctggatctggagcaacaaacttctcactactcaaacaagcaggtgacgtggaggagaatcccgggcctactagtatggactggatttggcgcatccttttccttgtcggcgctgctaccggcgcgcattccttcgaacaagttcagcttcaacagcctggcgctgagctggtcaaacctggcgcttctgtgaagatgagctgcaaagccagcggctacgccttcagcagctactggatcaactggatgaagcagaaacccggccagggactcgaatggatcggccaaatctatcccggcgacggcgacaccaactacaacggcaagttcaagggcagagccacactgaccgccgatacctctagcagcacagcctacatgcagctgagcagcctgaccagcgaagatagcgccgtgtacttctgtgcccggtccatcacaacagtcgtgggctgcgctatggactattggggccagggaacaagcgtgaccgtgtctagtacgcgtgacaagcagctggacgccgacgtgtcccccaagcctaccatcttcctgccctctatcgccgagacaaagctccagaaggccggcacctacctgtgcctgctggaaaagttcttcccagatgtgattaagatccactggcaggaaaagaagtccaacaccatcctgggcagccaggaaggcaacaccatgaagaccaacgacacctacatgaagttcagctggctgaccgtgcccgagaagtccctggacaaagaacacagatgcatcgtgcggcacgaaaacaacaagaacggcgtggaccaggaaatcatcttcccacccatcaagaccgatgtgattacaatggaccccaaggacaactgctccaaggacgccaacgataccctgctgctccagctgaccaacaccagcgcctactacatgtacttgttgctgctgctgaagtccgtggtgtacttcgccatcatcacatgctgcctgctgcggagaaccgccttctgctgcaacggcgagaagtct

SEQ ID NO: 6232 - DNA, 3132 bp, Artificial Sequence
  Synthetic Polynucloetide
atggccttaccagtgaccgccttgctcctgccgctggccttgctgctccacgccgccaggccgctcgaggggaaaccaattcccaaccctcttctgggactggattcaaccggcagcggcgacaagcagctggacgccgacgtgtcccccaagcctaccatcttcctgccctctatcgccgagacaaagctccagaaggccggcacctacctgtgcctgctggaaaagttcttcccagatgtgattaagatccactggcaggaaaagaagtccaacaccatcctgggcagccaggaaggcaacaccatgaagaccaacgacacctacatgaagttcagctggctgaccgtgcccgagaagtccctggacaaagaacacagatgcatcgtgcggcacgaaaacaacaagaacggcgtggaccaggaaatcatcttcccacccatcaagaccgatgtgattacaatggaccccaaggacaactgctccaaggacgccaacgataccctgctgctccagctgaccaacaccagcgcctactacatgtacttgttgctgctgctgaagtccgtggtgtacttcgccatcatcacatgctgcctgctgcggagaaccgccttctgctgcaacggcgagaagtctagggccaagcgatctggatctggagcaacaaacttctcactactcaaacaagcaggtgacgtggaggagaatcccgggcctactagcatggccttaccagtgaccgccttgctcctgccgctggccttgctgctccacgccgccaggccggaagtgcaggttttggagtctggcggaggactggttcagcctggcggatctctgagactgtcttgtgccgccagcggcttcaccttcagcaactttgccatgagctgggtccgacaggcccctggcaaaggacttgaatgggtgtccacaatcagcggcagcgccggcacaacagattacgccgattctgtgaagggcagattcaccatcagccgggacaacagcaagaaaaccctgtacctccagatgaacagcctgcgcgtggaagataccgccgtgtactactgtgccgatggcagaggccccttcttcgattatcgcggccagggcacactggtcaccgtttcttctggtaccggcggaggcggatctggcggcggaggtagcggtggcggaggatctgaattcgacatccagatgacacagagccctagcagcctgtctgccagcgtgggagacagagtgaccatcacatgcaaggccagcgaccacatcaacaactggctggcctggtatcagcagaagcctggacaggcccctaagctgctgatctacggcgctaccacactggaaacaggcgtgcccagcagattttctggcagcggctctggcaccgactacaccctgacaatatccagcctccagcctgaggacttcgccacctactactgtcagcagagctggaacaccccttggacattcggccagggcaccaagctggaaatcaagagaggcggaggcggaagtggaggcggaggatctggcggcggaggctctcaagttcagcttcaacagcctggcgctgagctggtcaaacctggcgcttctgtgaagatgagctgcaaagccagcggctacgccttcagcagctactggatcaactggatgaagcagaaacccggccagggactcgaatggatcggccaaatctatcccggcgacggcgacaccaactacaacggcaagttcaagggcagagccacactgaccgccgatacctctagcagcacagcctacatgcagctgagcagcctgaccagcgaagatagcgccgtgtacttctgtgcccggtccatcacaacagtcgtgggctgcgctatggactattggggccagggaacaagcgtgaccgtgtctagtacgcgtgagcagaaactgatctcggaagaggatgggagcggcagccagcctcacaccaagcccagcgtgttcgtgatgaagaacggcaccaacgtggcctgcctcgtgaaagagttctaccccaaggacatcaggatcaacctggtgtccagcaagaagatcaccgagttcgaccccgccatcgtgatctcccccagcggcaagtacaacgccgtgaagctggggaagtacgaggacagcaacagcgtgacctgctccgtgcagcacgacaacaagaccgtgcacagcaccgactttgaagtgaaaaccgactccaccgaccacgtgaagcccaaagagacagagaacaccaagcagcccagcaagagctgccacaagcccaaggccatcgtgcacaccgagaaagtgaacatgatgagcctgaccgtgctgggcctgcggatgctgttcgccaaaaccgtggccgtgaacttcctgctgaccgccaagctgttcttcctccgcgccaagagaagcggatctggcgtgaagcagaccctgaatttcgacctgctgaagctggctggcgacgtggaatccaacccaggcccttctagaggccatatgaccgagtacaagcccacggtgcgcctcgccacccgcgacgacgtccccagggccgtacgcaccctcgccgccgcgttcgccgactaccccgccacgcgccacaccgtcgatccggaccgccacatcgagcgggtcaccgagctgcaagaactcttcctcacgcgcgtcgggctcgacatcggcaaggtgtgggtcgcggacgacggcgccgcggtggcggtctggaccacgccggagagcgtcgaagcgggggcggtgttcgccgagatcggcccgcgcatggccgagttgagcggttcccggctggccgcgcagcaacagatggaaggcctcctggcgccgcaccggcccaaggagcccgcgtggttcctggccaccgtcggcgtctcgcccgaccaccagggcaagggtctgggcagcgccgtcgtgctccccggagtggaggcggccgagcgcgccggggtgcccgccttcctggagacctccgcgccccgcaacctccccttctacgagcggctcggcttcaccgtcaccgccgacgtcgaggtgcccgaaggaccgcgcacctggtgcatgacccgcaagcccggtgcctga

SEQ ID NO: 6233 - DNA, 3507 bp, Artificial Sequence
  Synthetic Polynucloetide
atggccttaccagtgaccgccttgctcctgccgctggccttgctgctccacgccgccaggccggaagtgcaggttttggagtctggcggaggactggttcagcctggcggatctctgagactgtcttgtgccgccagcggcttcaccttcagcaactttgccatgagctgggtccgacaggcccctggcaaaggacttgaatgggtgtccacaatcagcggcagcgccggcacaacagattacgccgattctgtgaagggcagattcaccatcagccgggacaacagcaagaaaaccctgtacctccagatgaacagcctgcgcgtggaagataccgccgtgtactactgtgccgatggcagaggccccttcttcgattatcgcggccagggcacactggtcaccgtttcttctggtaccggcggaggcggatctggcggcggaggtagcggtggcggaggatctgaattcgacatccagatgacacagagccctagcagcctgtctgccagcgtgggagacagagtgaccatcacatgcaaggccagcgaccacatcaacaactggctggcctggtatcagcagaagcctggacaggcccctaagctgctgatctacggcgctaccacactggaaacaggcgtgcccagcagattttctggcagcggctctggcaccgactacaccctgacaatatccagcctccagcctgaggacttcgccacctactactgtcagcagagctggaacaccccttggacattcggccagggcaccaagctggaaatcaagagaggacagcctaaggccaatcctaccgtgacactgttccctccaagcagcgaagaactccaggccaacaaggccacacttgtgtgcctgatctccgacttctaccctggggctgtgacagtggcttggaaggccgatggatctcctgtgaaagccggcgtggaaaccaccaagccatccaagcagagcaacaacaaatacgccgccagctcctacctgagcctgacacctgagcagtggaagtcccacagatcctacagctgccaagtgacccacgaaggcagcaccgtggaaaagacagtggcccctacagagtgcagcggatcccagagcttcggcctgctggaccccaagctgtgctacctgctggatggcatcctgttcatctacggcgtgatcctgaccgccctgttcctgagagtgaagttcagcagaagcgccgacgcccctgcctaccagcagggacagaaccaactgtacaacgagctgaacctgggcagacgggaagagtacgacgtgctggacaagcggagaggcagggaccctgagatgggcggaaagccccagcggagaaagaacccccaggaaggactgtataacgaactccagaaagacaagatggccgaagcctacagcgagatcggcatgaagggcgagcggagaagaggcaagggccacgatggcctgtaccagggcctgagcaccgccaccaaggacacctatgacgccctgcacatgcaggccctgcctccaagaagggccaagcgatctggatctggagcaacaaacttctcactactcaaacaagcaggtgacgtggaggagaatcccgggcctactagtatggactggatttggcgcatccttttccttgtcggcgctgctaccggcgcgcattccttcgaacaagttcagcttcaacagcctggcgctgagctggtcaaacctggcgcttctgtgaagatgagctgcaaagccagcggctacgccttcagcagctactggatcaactggatgaagcagaaacccggccagggactcgaatggatcggccaaatctatcccggcgacggcgacaccaactacaacggcaagttcaagggcagagccacactgaccgccgatacctctagcagcacagcctacatgcagctgagcagcctgaccagcgaagatagcgccgtgtacttctgtgcccggtccatcacaacagtcgtgggctgcgctatggactattggggccagggaacaagcgtgaccgtgtctagtgcctctacaaagggaccctccgtgtttcctctggctcccagcagcaagtctacaagcggaggaacagccgctctgggctgcctggtcaaggattactttcccgagcctgtgaccgtgtcctggaatagcggagcactgacaagcggcgtgcacacctttccagccgtgctgcaaagcagcggcctgtactctctgagcagcgtggtcacagtgcctagctctagcctgggcacccagacctacatctgcaatgtgaaccacaagcctagcaacaccaaggtggacaagagagtggaacccaagagctgtggtacccagagttttgggttgttggaccctaaattgtgctatctgttggacggaatcctgttcatttacggagtgatcctgaccgcattgttcctgcgggttaagttttccagatccgcagacgcacccgcttaccaacaagggcagaaccaactctacaatgaacttaatttggggcggagggaagagtacgacgttctggacaaaaggaggggacgagatcccgagatgggcggaaagcctcagcgaaggaagaatccgcaagaggggctttataacgaactccagaaagataaaatggcagaagcctatagtgagattgggatgaagggagaaaggaggaggggtaaaggtcacgatgggttgtaccaaggattgagcacagccactaaagatacctatgatgcgctccacatgcaggccctgccgccaagacgcgccaagagaagcggatctggcgtgaagcagaccctgaatttcgacctgctgaagctggctggcgacgtggaatccaacccaggcccttctagaggccatatgaccgagtacaagcccacggtgcgcctcgccacccgcgacgacgtccccagggccgtacgcaccctcgccgccgcgttcgccgactaccccgccacgcgccacaccgtcgatccggaccgccacatcgagcgggtcaccgagctgcaagaactcttcctcacgcgcgtcgggctcgacatcggcaaggtgtgggtcgcggacgacggcgccgcggtggcggtctggaccacgccggagagcgtcgaagcgggggcggtgttcgccgagatcggcccgcgcatggccgagttgagcggttcccggctggccgcgcagcaacagatggaaggcctcctggcgccgcaccggcccaaggagcccgcgtggttcctggccaccgtcggcgtctcgcccgaccaccagggcaagggtctgggcagcgccgtcgtgctccccggagtggaggcggccgagcgcgccggggtgcccgccttcctggagacctccgcgccccgcaacctccccttctacgagcggctcggcttcaccgtcaccgccgacgtcgaggtgcccgaaggaccgcgcacctggtgcatgacccgcaagcccggtgcctga

SEQ ID NO: 6234 - DNA, 2862 bp, Artificial Sequence
  Synthetic Polynucloetide
atggccttaccagtgaccgccttgctcctgccgctggccttgctgctccacgccgccaggccggaagtgcaggttttggagtctggcggaggactggttcagcctggcggatctctgagactgtcttgtgccgccagcggcttcaccttcagcaactttgccatgagctgggtccgacaggcccctggcaaaggacttgaatgggtgtccacaatcagcggcagcgccggcacaacagattacgccgattctgtgaagggcagattcaccatcagccgggacaacagcaagaaaaccctgtacctccagatgaacagcctgcgcgtggaagataccgccgtgtactactgtgccgatggcagaggccccttcttcgattatcgcggccagggcacactggtcaccgtttcttctggtaccggcggaggcggatctggcggcggaggtagcggtggcggaggatctgaattcgacatccagatgacacagagccctagcagcctgtctgccagcgtgggagacagagtgaccatcacatgcaaggccagcgaccacatcaacaactggctggcctggtatcagcagaagcctggacaggcccctaagctgctgatctacggcgctaccacactggaaacaggcgtgcccagcagattttctggcagcggctctggcaccgactacaccctgacaatatccagcctccagcctgaggacttcgccacctactactgtcagcagagctggaacaccccttggacattcggccagggcaccaagctggaaatcaagagactcgaggacctgaagaacgtgttcccacctgaggtggccgtgttcgagcctagcgaggccgagatcagccacacccagaaagccaccctcgtgtgcctggctaccggcttctaccccgaccatgtggaactgtcttggtgggtcaacggcaaagaggtgcacagcggcgtgtctaccgacccccagccactgaaagaacagcccgccctgaacgacagccggtactgcctgagcagcagactgagagtgtccgccaccttctggcagaacccccggaaccacttcagatgccaggtgcagttctacggcctgagcgagaacgacgagtggacccaggacagagccaagcccgtgacccagatcgtgtctgccgaagcctggggcagagccgattgcggatcccagagcttcggcctgctggaccccaagctgtgctacctgctggatggcatcctgttcatctacggcgtgatcctgaccgccctgttcctgagagtgaagttcagcagaagcgccgacgcccctgcctaccagcagggacagaaccaactgtacaacgagctgaacctgggcagacgggaagagtacgacgtgctggacaagcggagaggcagggaccctgagatgggcggaaagccccagcggagaaagaacccccaggaaggactgtataacgaactccagaaagacaagatggccgaagcctacagcgagatcggcatgaagggcgagcggagaagaggcaagggccacgatggcctgtaccagggcctgagcaccgccaccaaggacacctatgacgccctgcacatgcaggccctgcctccaagaagggccaagcgatctggatctggagcaacaaacttctcactactcaaacaagcaggtgacgtggaggagaatcccgggcctactagtatggactggatttggcgcatccttttccttgtcggcgctgctaccggcgcgcattccttcgaacaagttcagcttcaacagcctggcgctgagctggtcaaacctggcgcttctgtgaagatgagctgcaaagccagcggctacgccttcagcagctactggatcaactggatgaagcagaaacccggccagggactcgaatggatcggccaaatctatcccggcgacggcgacaccaactacaacggcaagttcaagggcagagccacactgaccgccgatacctctagcagcacagcctacatgcagctgagcagcctgaccagcgaagatagcgccgtgtacttctgtgcccggtccatcacaacagtcgtgggctgcgctatggactattggggccagggaacaagcgtgaccgtgtctagtacgcgtatccagaaccctgatcctgccgtgtaccagctgcgggatagcaagagcagcgacaagagcgtgtgtctgttcaccgacttcgacagccagaccaacgtgtcccagagcaaggactccgacgtgtacatcaccgataagaccgtgctggacatgcggagcatggacttcaagagcaactccgccgtggcctggtccaacaagtccgatttcgcctgcgccaacgccttcaacaacagcattatccccgaggacacattcttcccaagccccgagagcagctgcggtacccagagttttgggttgttggaccctaaattgtgctatctgttggacggaatcctgttcatttacggagtgatcctgaccgcattgttcctgcgggttaagttttccagatccgcagacgcacccgcttaccaacaagggcagaaccaactctacaatgaacttaatttggggcggagggaagagtacgacgttctggacaaaaggaggggacgagatcccgagatgggcggaaagcctcagcgaaggaagaatccgcaagaggggctttataacgaactccagaaagataaaatggcagaagcctatagtgagattgggatgaagggagaaaggaggaggggtaaaggtcacgatgggttgtaccaaggattgagcacagccactaaagatacctatgatgcgctccacatgcaggccctgccgccaaga

SEQ ID NO: 6235 - DNA, 2862 bp, Artificial Sequence
  Synthetic Polynucloetide
atggccttaccagtgaccgccttgctcctgccgctggccttgctgctccacgccgccaggccggaagtgcaggttttggagtctggcggaggactggttcagcctggcggatctctgagactgtcttgtgccgccagcggcttcaccttcagcaactttgccatgagctgggtccgacaggcccctggcaaaggacttgaatgggtgtccacaatcagcggcagcgccggcacaacagattacgccgattctgtgaagggcagattcaccatcagccgggacaacagcaagaaaaccctgtacctccagatgaacagcctgcgcgtggaagataccgccgtgtactactgtgccgatggcagaggccccttcttcgattatcgcggccagggcacactggtcaccgtttcttctggtaccggcggaggcggatctggcggcggaggtagcggtggcggaggatctgaattcgacatccagatgacacagagccctagcagcctgtctgccagcgtgggagacagagtgaccatcacatgcaaggccagcgaccacatcaacaactggctggcctggtatcagcagaagcctggacaggcccctaagctgctgatctacggcgctaccacactggaaacaggcgtgcccagcagattttctggcagcggctctggcaccgactacaccctgacaatatccagcctccagcctgaggacttcgccacctactactgtcagcagagctggaacaccccttggacattcggccagggcaccaagctggaaatcaagagactcgaggacctgaagaacgtgttcccacctgaggtggccgtgttcgagcctagcaaggccgagatcgcccacacccagaaagccaccctcgtgtgcctggctaccggcttctaccccgaccatgtggaactgtcttggtgggtcaacggcaaagaggtgcacagcggcgtgtgtaccgacccccagccactgaaagaacagcccgccctgaacgacagccggtactgcctgagcagcagactgagagtgtccgccaccttctggcagaacccccggaaccacttcagatgccaggtgcagttctacggcctgagcgagaacgacgagtggacccaggacagagccaagcccgtgacccagatcgtgtctgccgaagcctggggcagagccgattgcggatcccagagcttcggcctgctggaccccaagctgtgctacctgctggatggcatcctgttcatctacggcgtgatcctgaccgccctgttcctgagagtgaagttcagcagaagcgccgacgcccctgcctaccagcagggacagaaccaactgtacaacgagctgaacctgggcagacgggaagagtacgacgtgctggacaagcggagaggcagggaccctgagatgggcggaaagccccagcggagaaagaacccccaggaaggactgtataacgaactccagaaagacaagatggccgaagcctacagcgagatcggcatgaagggcgagcggagaagaggcaagggccacgatggcctgtaccagggcctgagcaccgccaccaaggacacctatgacgccctgcacatgcaggccctgcctccaagaagggccaagcgatctggatctggagcaacaaacttctcactactcaaacaagcaggtgacgtggaggagaatcccgggcctactagtatggactggatttggcgcatccttttccttgtcggcgctgctaccggcgcgcattccttcgaacaagttcagcttcaacagcctggcgctgagctggtcaaacctggcgcttctgtgaagatgagctgcaaagccagcggctacgccttcagcagctactggatcaactggatgaagcagaaacccggccagggactcgaatggatcggccaaatctatcccggcgacggcgacaccaactacaacggcaagttcaagggcagagccacactgaccgccgatacctctagcagcacagcctacatgcagctgagcagcctgaccagcgaagatagcgccgtgtacttctgtgcccggtccatcacaacagtcgtgggctgcgctatggactattggggccagggaacaagcgtgaccgtgtctagtacgcgtatccagaaccctgatcctgccgtgtaccagctgcgggatagcaagagcagcgacaagagcgtgtgtctgttcaccgacttcgacagccagaccaacgtgtcccagagcaaggactccgacgtgtacatcaccgataagtgcgtgctggacatgcggagcatggacttcaagagcaactccgccgtggcctggtccaacaagtccgatttcgcctgcgccaacgccttcaacaacagcattatccccgaggacacattcttcccaagcagcgacgtgccctgcggtacccagagttttgggttgttggaccctaaattgtgctatctgttggacggaatcctgttcatttacggagtgatcctgaccgcattgttcctgcgggttaagttttccagatccgcagacgcacccgcttaccaacaagggcagaaccaactctacaatgaacttaatttggggcggagggaagagtacgacgttctggacaaaaggaggggacgagatcccgagatgggcggaaagcctcagcgaaggaagaatccgcaagaggggctttataacgaactccagaaagataaaatggcagaagcctatagtgagattgggatgaagggagaaaggaggaggggtaaaggtcacgatgggttgtaccaaggattgagcacagccactaaagatacctatgatgcgctccacatgcaggccctgccgccaaga

SEQ ID NO: 6236 - DNA, 3075 bp, Artificial Sequence
  Synthetic Polynucloetide
atggccttaccagtgaccgccttgctcctgccgctggccttgctgctccacgccgccaggccggaagtgcaggttttggagtctggcggaggactggttcagcctggcggatctctgagactgtcttgtgccgccagcggcttcaccttcagcaactttgccatgagctgggtccgacaggcccctggcaaaggacttgaatgggtgtccacaatcagcggcagcgccggcacaacagattacgccgattctgtgaagggcagattcaccatcagccgggacaacagcaagaaaaccctgtacctccagatgaacagcctgcgcgtggaagataccgccgtgtactactgtgccgatggcagaggccccttcttcgattatcgcggccagggcacactggtcaccgtttcttctggtaccggcggaggcggatctggcggcggaggtagcggtggcggaggatctgaattcgacatccagatgacacagagccctagcagcctgtctgccagcgtgggagacagagtgaccatcacatgcaaggccagcgaccacatcaacaactggctggcctggtatcagcagaagcctggacaggcccctaagctgctgatctacggcgctaccacactggaaacaggcgtgcccagcagattttctggcagcggctctggcaccgactacaccctgacaatatccagcctccagcctgaggacttcgccacctactactgtcagcagagctggaacaccccttggacattcggccagggcaccaagctggaaatcaagagactcgaggggaaaccaattcccaaccctcttctgggactggattcaaccggcagcggcgaggacctgaagaacgtgttcccacctgaggtggccgtgttcgagcctagcgaggccgagatcagccacacccagaaagccaccctcgtgtgcctggctaccggcttctaccccgaccatgtggaactgtcttggtgggtcaacggcaaagaggtgcacagcggcgtgtctaccgacccccagccactgaaagaacagcccgccctgaacgacagccggtactgcctgagcagcagactgagagtgtccgccaccttctggcagaacccccggaaccacttcagatgccaggtgcagttctacggcctgagcgagaacgacgagtggacccaggacagagccaagcccgtgacccagatcgtgtctgccgaagcctggggcagagccgattgcggatcccagagcttcggcctgctggaccccaagctgtgctacctgctggatggcatcctgttcatctacggcgtgatcctgaccgccctgttcctgagagtgaagttcagcagaagcgccgacgcccctgcctaccagcagggacagaaccaactgtacaacgagctgaacctgggcagacgggaagagtacgacgtgctggacaagcggagaggcagggaccctgagatgggcggaaagccccagcggagaaagaacccccaggaaggactgtataacgaactccagaaagacaagatggccgaagcctacagcgagatcggcatgaagggcgagcggagaagaggcaagggccacgatggcctgtaccagggcctgagcaccgccaccaaggacacctatgacgccctgcacatgcaggccctgcctccaagaagggccaagcgatctggatctggagcaacaaacttctcactactcaaacaagcaggtgacgtggaggagaatcccgggcctactagtatggactggatttggcgcatccttttccttgtcggcgctgctaccggcgcgcattccttcgaacaagttcagcttcaacagcctggcgctgagctggtcaaacctggcgcttctgtgaagatgagctgcaaagccagcggctacgccttcagcagctactggatcaactggatgaagcagaaacccggccagggactcgaatggatcggccaaatctatcccggcgacggcgacaccaactacaacggcaagttcaagggcagagccacactgaccgccgatacctctagcagcacagcctacatgcagctgagcagcctgaccagcgaagatagcgccgtgtacttctgtgcccggtccatcacaacagtcgtgggctgcgctatggactattggggccagggaacaagcgtgaccgtgtctagtacgcgtgagcagaaactgatctcggaagaggatgggagcggcatccagaaccctgatcctgccgtgtaccagctgcgggatagcaagagcagcgacaagagcgtgtgtctgttcaccgacttcgacagccagaccaacgtgtcccagagcaaggactccgacgtgtacatcaccgataagaccgtgctggacatgcggagcatggacttcaagagcaactccgccgtggcctggtccaacaagtccgatttcgcctgcgccaacgccttcaacaacagcattatccccgaggacacattcttcccaagccccgagagcagctgcggtacccagagttttgggttgttggaccctaaattgtgctatctgttggacggaatcctgttcatttacggagtgatcctgaccgcattgttcctgaggagcaagcggtcacggctgctccacagcgattacatgaatatgacaccacgaagaccgggtcctactcgcaaacactaccaaccctacgcacctccccgcgactttgcagcgtaccgatctcgggttaagttttccagatccgcagacgcacccgcttaccaacaagggcagaaccaactctacaatgaacttaatttggggcggagggaagagtacgacgttctggacaaaaggaggggacgagatcccgagatgggcggaaagcctcagcgaaggaagaatccgcaagaggggctttataacgaactccagaaagataaaatggcagaagcctatagtgagattgggatgaagggagaaaggaggaggggtaaaggtcacgatgggttgtaccaaggattgagcacagccactaaagatacctatgatgcgctccacatgcaggccctgccgccaaga

SEQ ID NO: 6237 - DNA, 3198 bp, Artificial Sequence
  Synthetic Polynucloetide
atggccttaccagtgaccgccttgctcctgccgctggccttgctgctccacgccgccaggccggaagtgcaggttttggagtctggcggaggactggttcagcctggcggatctctgagactgtcttgtgccgccagcggcttcaccttcagcaactttgccatgagctgggtccgacaggcccctggcaaaggacttgaatgggtgtccacaatcagcggcagcgccggcacaacagattacgccgattctgtgaagggcagattcaccatcagccgggacaacagcaagaaaaccctgtacctccagatgaacagcctgcgcgtggaagataccgccgtgtactactgtgccgatggcagaggccccttcttcgattatcgcggccagggcacactggtcaccgtttcttctggtaccggcggaggcggatctggcggcggaggtagcggtggcggaggatctgaattcgacatccagatgacacagagccctagcagcctgtctgccagcgtgggagacagagtgaccatcacatgcaaggccagcgaccacatcaacaactggctggcctggtatcagcagaagcctggacaggcccctaagctgctgatctacggcgctaccacactggaaacaggcgtgcccagcagattttctggcagcggctctggcaccgactacaccctgacaatatccagcctccagcctgaggacttcgccacctactactgtcagcagagctggaacaccccttggacattcggccagggcaccaagctggaaatcaagagactcgaggggaaaccaattcccaaccctcttctgggactggattcaaccggcagcggcgaggacctgaagaacgtgttcccacctgaggtggccgtgttcgagcctagcgaggccgagatcagccacacccagaaagccaccctcgtgtgcctggctaccggcttctaccccgaccatgtggaactgtcttggtgggtcaacggcaaagaggtgcacagcggcgtgtctaccgacccccagccactgaaagaacagcccgccctgaacgacagccggtactgcctgagcagcagactgagagtgtccgccaccttctggcagaacccccggaaccacttcagatgccaggtgcagttctacggcctgagcgagaacgacgagtggacccaggacagagccaagcccgtgacccagatcgtgtctgccgaagcctggggcagagccgattgcggatcccagagcttcggcctgctggaccccaagctgtgctacctgctggatggcatcctgttcatctacggcgtgatcctgaccgccctgttcctgaggagtaagaggagcaggctcctgcacagtgactacatgaacatgactccacgccgccccggacccacccgcaagcattaccagccctatgccccaccacgcgacttcgcagcctatcgctccagagtgaagttcagcagaagcgccgacgcccctgcctaccagcagggacagaaccaactgtacaacgagctgaacctgggcagacgggaagagtacgacgtgctggacaagcggagaggcagggaccctgagatgggcggaaagccccagcggagaaagaacccccaggaaggactgtataacgaactccagaaagacaagatggccgaagcctacagcgagatcggcatgaagggcgagcggagaagaggcaagggccacgatggcctgtaccagggcctgagcaccgccaccaaggacacctatgacgccctgcacatgcaggccctgcctccaagaagggccaagcgatctggatctggagcaacaaacttctcactactcaaacaagcaggtgacgtggaggagaatcccgggcctactagtatggactggatttggcgcatccttttccttgtcggcgctgctaccggcgcgcattccttcgaacaagttcagcttcaacagcctggcgctgagctggtcaaacctggcgcttctgtgaagatgagctgcaaagccagcggctacgccttcagcagctactggatcaactggatgaagcagaaacccggccagggactcgaatggatcggccaaatctatcccggcgacggcgacaccaactacaacggcaagttcaagggcagagccacactgaccgccgatacctctagcagcacagcctacatgcagctgagcagcctgaccagcgaagatagcgccgtgtacttctgtgcccggtccatcacaacagtcgtgggctgcgctatggactattggggccagggaacaagcgtgaccgtgtctagtacgcgtgagcagaaactgatctcggaagaggatgggagcggcatccagaaccctgatcctgccgtgtaccagctgcgggatagcaagagcagcgacaagagcgtgtgtctgttcaccgacttcgacagccagaccaacgtgtcccagagcaaggactccgacgtgtacatcaccgataagaccgtgctggacatgcggagcatggacttcaagagcaactccgccgtggcctggtccaacaagtccgatttcgcctgcgccaacgccttcaacaacagcattatccccgaggacacattcttcccaagccccgagagcagctgcggtacccagagttttgggttgttggaccctaaattgtgctatctgttggacggaatcctgttcatttacggagtgatcctgaccgcattgttcctgaggagcaagcggtcacggctgctccacagcgattacatgaatatgacaccacgaagaccgggtcctactcgcaaacactaccaaccctacgcacctccccgcgactttgcagcgtaccgatctcgggttaagttttccagatccgcagacgcacccgcttaccaacaagggcagaaccaactctacaatgaacttaatttggggcggagggaagagtacgacgttctggacaaaaggaggggacgagatcccgagatgggcggaaagcctcagcgaaggaagaatccgcaagaggggctttataacgaactccagaaagataaaatggcagaagcctatagtgagattgggatgaagggagaaaggaggaggggtaaaggtcacgatgggttgtaccaaggattgagcacagccactaaagatacctatgatgcgctccacatgcaggccctgccgccaaga

SEQ ID NO: 6238 - DNA, 3081 bp, Artificial Sequence
  Synthetic Polynucloetide
atggccttaccagtgaccgccttgctcctgccgctggccttgctgctccacgccgccaggccggaagtgcaggttttggagtctggcggaggactggttcagcctggcggatctctgagactgtcttgtgccgccagcggcttcaccttcagcaactttgccatgagctgggtccgacaggcccctggcaaaggacttgaatgggtgtccacaatcagcggcagcgccggcacaacagattacgccgattctgtgaagggcagattcaccatcagccgggacaacagcaagaaaaccctgtacctccagatgaacagcctgcgcgtggaagataccgccgtgtactactgtgccgatggcagaggccccttcttcgattatcgcggccagggcacactggtcaccgtttcttctggtaccggcggaggcggatctggcggcggaggtagcggtggcggaggatctgaattcgacatccagatgacacagagccctagcagcctgtctgccagcgtgggagacagagtgaccatcacatgcaaggccagcgaccacatcaacaactggctggcctggtatcagcagaagcctggacaggcccctaagctgctgatctacggcgctaccacactggaaacaggcgtgcccagcagattttctggcagcggctctggcaccgactacaccctgacaatatccagcctccagcctgaggacttcgccacctactactgtcagcagagctggaacaccccttggacattcggccagggcaccaagctggaaatcaagagactcgaggggaaaccaattcccaaccctcttctgggactggattcaaccggcagcggcgaggacctgaagaacgtgttcccacctgaggtggccgtgttcgagcctagcgaggccgagatcagccacacccagaaagccaccctcgtgtgcctggctaccggcttctaccccgaccatgtggaactgtcttggtgggtcaacggcaaagaggtgcacagcggcgtgtctaccgacccccagccactgaaagaacagcccgccctgaacgacagccggtactgcctgagcagcagactgagagtgtccgccaccttctggcagaacccccggaaccacttcagatgccaggtgcagttctacggcctgagcgagaacgacgagtggacccaggacagagccaagcccgtgacccagatcgtgtctgccgaagcctggggcagagccgattgcggatcccagagcttcggcctgctggaccccaagctgtgctacctgctggatggcatcctgttcatctacggcgtgatcctgaccgccctgttcctgagagtgaagttcagcagaagcgccgacgcccctgcctaccagcagggacagaaccaactgtacaacgagctgaacctgggcagacgggaagagtacgacgtgctggacaagcggagaggcagggaccctgagatgggcggaaagccccagcggagaaagaacccccaggaaggactgtataacgaactccagaaagacaagatggccgaagcctacagcgagatcggcatgaagggcgagcggagaagaggcaagggccacgatggcctgtaccagggcctgagcaccgccaccaaggacacctatgacgccctgcacatgcaggccctgcctccaagaagggccaagcgatctggatctggagcaacaaacttctcactactcaaacaagcaggtgacgtggaggagaatcccgggcctactagtatggactggatttggcgcatccttttccttgtcggcgctgctaccggcgcgcattccttcgaacaagttcagcttcaacagcctggcgctgagctggtcaaacctggcgcttctgtgaagatgagctgcaaagccagcggctacgccttcagcagctactggatcaactggatgaagcagaaacccggccagggactcgaatggatcggccaaatctatcccggcgacggcgacaccaactacaacggcaagttcaagggcagagccacactgaccgccgatacctctagcagcacagcctacatgcagctgagcagcctgaccagcgaagatagcgccgtgtacttctgtgcccggtccatcacaacagtcgtgggctgcgctatggactattggggccagggaacaagcgtgaccgtgtctagtacgcgtgagcagaaactgatctcggaagaggatctggggagcggcatccagaaccctgatcctgccgtgtaccagctgcgggatagcaagagcagcgacaagagcgtgtgtctgttcaccgacttcgacagccagaccaacgtgtcccagagcaaggactccgacgtgtacatcaccgataagaccgtgctggacatgcggagcatggacttcaagagcaactccgccgtggcctggtccaacaagtccgatttcgcctgcgccaacgccttcaacaacagcattatccccgaggacacattcttcccaagccccgagagcagctgcggtacccagagttttgggttgttggaccctaaattgtgctatctgttggacggaatcctgttcatttacggagtgatcctgaccgcattgttcctgaagagaggccggaagaagctgctgtacatcttcaagcagcctttcatgcggcccgtgcagaccacccaggaagaggacggctgctcctgccggttccccgaggaagaagaaggcggctgcgagctgcgggttaagttttccagatccgcagacgcacccgcttaccaacaagggcagaaccaactctacaatgaacttaatttggggcggagggaagagtacgacgttctggacaaaaggaggggacgagatcccgagatgggcggaaagcctcagcgaaggaagaatccgcaagaggggctttataacgaactccagaaagataaaatggcagaagcctatagtgagattgggatgaagggagaaaggaggaggggtaaaggtcacgatgggttgtaccaaggattgagcacagccactaaagatacctatgatgcgctccacatgcaggccctgccgccaaga

SEQ ID NO: 6239 - DNA, 3207 bp, Artificial Sequence
  Synthetic Polynucloetide
atggccttaccagtgaccgccttgctcctgccgctggccttgctgctccacgccgccaggccggaagtgcaggttttggagtctggcggaggactggttcagcctggcggatctctgagactgtcttgtgccgccagcggcttcaccttcagcaactttgccatgagctgggtccgacaggcccctggcaaaggacttgaatgggtgtccacaatcagcggcagcgccggcacaacagattacgccgattctgtgaagggcagattcaccatcagccgggacaacagcaagaaaaccctgtacctccagatgaacagcctgcgcgtggaagataccgccgtgtactactgtgccgatggcagaggccccttcttcgattatcgcggccagggcacactggtcaccgtttcttctggtaccggcggaggcggatctggcggcggaggtagcggtggcggaggatctgaattcgacatccagatgacacagagccctagcagcctgtctgccagcgtgggagacagagtgaccatcacatgcaaggccagcgaccacatcaacaactggctggcctggtatcagcagaagcctggacaggcccctaagctgctgatctacggcgctaccacactggaaacaggcgtgcccagcagattttctggcagcggctctggcaccgactacaccctgacaatatccagcctccagcctgaggacttcgccacctactactgtcagcagagctggaacaccccttggacattcggccagggcaccaagctggaaatcaagagactcgaggggaaaccaattcccaaccctcttctgggactggattcaaccggcagcggcgaggacctgaagaacgtgttcccacctgaggtggccgtgttcgagcctagcgaggccgagatcagccacacccagaaagccaccctcgtgtgcctggctaccggcttctaccccgaccatgtggaactgtcttggtgggtcaacggcaaagaggtgcacagcggcgtgtctaccgacccccagccactgaaagaacagcccgccctgaacgacagccggtactgcctgagcagcagactgagagtgtccgccaccttctggcagaacccccggaaccacttcagatgccaggtgcagttctacggcctgagcgagaacgacgagtggacccaggacagagccaagcccgtgacccagatcgtgtctgccgaagcctggggcagagccgattgcggatcccagagcttcggcctgctggaccccaagctgtgctacctgctggatggcatcctgttcatctacggcgtgatcctgaccgccctgttcctgaaacggggcagaaagaaactcctgtatatattcaaacaaccatttatgagaccagtacaaactactcaagaggaagatggctgtagctgccgatttccagaagaagaagaaggaggatgtgaactgagagtgaagttcagcagaagcgccgacgcccctgcctaccagcagggacagaaccaactgtacaacgagctgaacctgggcagacgggaagagtacgacgtgctggacaagcggagaggcagggaccctgagatgggcggaaagccccagcggagaaagaacccccaggaaggactgtataacgaactccagaaagacaagatggccgaagcctacagcgagatcggcatgaagggcgagcggagaagaggcaagggccacgatggcctgtaccagggcctgagcaccgccaccaaggacacctatgacgccctgcacatgcaggccctgcctccaagaagggccaagcgatctggatctggagcaacaaacttctcactactcaaacaagcaggtgacgtggaggagaatcccgggcctactagtatggactggatttggcgcatccttttccttgtcggcgctgctaccggcgcgcattccttcgaacaagttcagcttcaacagcctggcgctgagctggtcaaacctggcgcttctgtgaagatgagctgcaaagccagcggctacgccttcagcagctactggatcaactggatgaagcagaaacccggccagggactcgaatggatcggccaaatctatcccggcgacggcgacaccaactacaacggcaagttcaagggcagagccacactgaccgccgatacctctagcagcacagcctacatgcagctgagcagcctgaccagcgaagatagcgccgtgtacttctgtgcccggtccatcacaacagtcgtgggctgcgctatggactattggggccagggaacaagcgtgaccgtgtctagtacgcgtgagcagaaactgatctcggaagaggatctggggagcggcatccagaaccctgatcctgccgtgtaccagctgcgggatagcaagagcagcgacaagagcgtgtgtctgttcaccgacttcgacagccagaccaacgtgtcccagagcaaggactccgacgtgtacatcaccgataagaccgtgctggacatgcggagcatggacttcaagagcaactccgccgtggcctggtccaacaagtccgatttcgcctgcgccaacgccttcaacaacagcattatccccgaggacacattcttcccaagccccgagagcagctgcggtacccagagttttgggttgttggaccctaaattgtgctatctgttggacggaatcctgttcatttacggagtgatcctgaccgcattgttcctgaagagaggccggaagaagctgctgtacatcttcaagcagcctttcatgcggcccgtgcagaccacccaggaagaggacggctgctcctgccggttccccgaggaagaagaaggcggctgcgagctgcgggttaagttttccagatccgcagacgcacccgcttaccaacaagggcagaaccaactctacaatgaacttaatttggggcggagggaagagtacgacgttctggacaaaaggaggggacgagatcccgagatgggcggaaagcctcagcgaaggaagaatccgcaagaggggctttataacgaactccagaaagataaaatggcagaagcctatagtgagattgggatgaagggagaaaggaggaggggtaaaggtcacgatgggttgtaccaaggattgagcacagccactaaagatacctatgatgcgctccacatgcaggccctgccgccaaga

SEQ ID NO: 6240 - DNA, 2880 bp, Artificial Sequence
  Synthetic Polynucloetide
atggccttaccagtgaccgccttgctcctgccgctggccttgctgctccacgccgccaggccggaagtgcaggttttggagtctggcggaggactggttcagcctggcggatctctgagactgtcttgtgccgccagcggcttcaccttcagcaactttgccatgagctgggtccgacaggcccctggcaaaggacttgaatgggtgtccacaatcagcggcagcgccggcacaacagattacgccgattctgtgaagggcagattcaccatcagccgggacaacagcaagaaaaccctgtacctccagatgaacagcctgcgcgtggaagataccgccgtgtactactgtgccgatggcagaggccccttcttcgattatcgcggccagggcacactggtcaccgtttcttctggtaccggcggaggcggatctggcggcggaggtagcggtggcggaggatctgaattcgacatccagatgacacagagccctagcagcctgtctgccagcgtgggagacagagtgaccatcacatgcaaggccagcgaccacatcaacaactggctggcctggtatcagcagaagcctggacaggcccctaagctgctgatctacggcgctaccacactggaaacaggcgtgcccagcagattttctggcagcggctctggcaccgactacaccctgacaatatccagcctccagcctgaggacttcgccacctactactgtcagcagagctggaacaccccttggacattcggccagggcaccaagctggaaatcaagagactcgagcagagcttcggcctgctggaccccaagctgtgctacctgctggatggcatcctgttcatctacggcgtgatcctgaccgccctgttcctgagagtgaagttcagcagaagcgccgacgcccctgcctaccagcagggacagaaccaactgtacaacgagctgaacctgggcagacgggaagagtacgacgtgctggacaagcggagaggcagggaccctgagatgggcggaaagccccagcggagaaagaacccccaggaaggactgtataacgaactccagaaagacaagatggccgaagcctacagcgagatcggcatgaagggcgagcggagaagaggcaagggccacgatggcctgtaccagggcctgagcaccgccaccaaggacacctatgacgccctgcacatgcaggccctgcctccaagaagggccaagcgatctggatctggagcaacaaacttctcactactcaaacaagcaggtgacgtggaggagaatcccgggcctactagtatggactggatttggcgcatccttttccttgtcggcgctgctaccggcgcgcattccttcgaacaagttcagcttcaacagcctggcgctgagctggtcaaacctggcgcttctgtgaagatgagctgcaaagccagcggctacgccttcagcagctactggatcaactggatgaagcagaaacccggccagggactcgaatggatcggccaaatctatcccggcgacggcgacaccaactacaacggcaagttcaagggcagagccacactgaccgccgatacctctagcagcacagcctacatgcagctgagcagcctgaccagcgaagatagcgccgtgtacttctgtgcccggtccatcacaacagtcgtgggctgcgctatggactattggggccagggaacaagcgtgaccgtgtctagtacgcgtcagagttttgggttgttggaccctaaattgtgctatctgttggacggaatcctgttcatttacggagtgatcctgaccgcattgttcctgcgggttaagttttccagatccgcagacgcacccgcttaccaacaagggcagaaccaactctacaatgaacttaatttggggcggagggaagagtacgacgttctggacaaaaggaggggacgagatcccgagatgggcggaaagcctcagcgaaggaagaatccgcaagaggggctttataacgaactccagaaagataaaatggcagaagcctatagtgagattgggatgaagggagaaaggaggaggggtaaaggtcacgatgggttgtaccaaggattgagcacagccactaaagatacctatgatgcgctccacatgcaggccctgccgccaagacgcgccaagagaagcggatctggcgtgaagcagaccctgaatttcgacctgctgaagctggctggcgacgtggaatccaacccaggcccttctagaggccatatgaccgagtacaagcccacggtgcgcctcgccacccgcgacgacgtccccagggccgtacgcaccctcgccgccgcgttcgccgactaccccgccacgcgccacaccgtcgatccggaccgccacatcgagcgggtcaccgagctgcaagaactcttcctcacgcgcgtcgggctcgacatcggcaaggtgtgggtcgcggacgacggcgccgcggtggcggtctggaccacgccggagagcgtcgaagcgggggcggtgttcgccgagatcggcccgcgcatggccgagttgagcggttcccggctggccgcgcagcaacagatggaaggcctcctggcgccgcaccggcccaaggagcccgcgtggttcctggccaccgtcggcgtctcgcccgaccaccagggcaagggtctgggcagcgccgtcgtgctccccggagtggaggcggccgagcgcgccggggtgcccgccttcctggagacctccgcgccccgcaacctccccttctacgagcggctcggcttcaccgtcaccgccgacgtcgaggtgcccgaaggaccgcgcacctggtgcatgacccgcaagcccggtgcctga

SEQ ID NO: 6241 - DNA, 2352 bp, Artificial Sequence
  Synthetic Polynucloetide
atggccttaccagtgaccgccttgctcctgccgctggccttgctgctccacgccgccaggccggaagtgcaggttttggagtctggcggaggactggttcagcctggcggatctctgagactgtcttgtgccgccagcggcttcaccttcagcaactttgccatgagctgggtccgacaggcccctggcaaaggacttgaatgggtgtccacaatcagcggcagcgccggcacaacagattacgccgattctgtgaagggcagattcaccatcagccgggacaacagcaagaaaaccctgtacctccagatgaacagcctgcgcgtggaagataccgccgtgtactactgtgccgatggcagaggccccttcttcgattatcgcggccagggcacactggtcaccgtttcttctggtaccggcggaggcggatctggcggcggaggtagcggtggcggaggatctgaattcgacatccagatgacacagagccctagcagcctgtctgccagcgtgggagacagagtgaccatcacatgcaaggccagcgaccacatcaacaactggctggcctggtatcagcagaagcctggacaggcccctaagctgctgatctacggcgctaccacactggaaacaggcgtgcccagcagattttctggcagcggctctggcaccgactacaccctgacaatatccagcctccagcctgaggacttcgccacctactactgtcagcagagctggaacaccccttggacattcggccagggcaccaagctggaaatcaagagactcgagggacagcctaaggccaatcctaccgtgacactgttccctccaagcagcgaagaactccaggccaacaaggccacacttgtgtgcctgatctccgacttctaccctggggctgtgacagtggcttggaaggccgatggatctcctgtgaaagccggcgtggaaaccaccaagccatccaagcagagcaacaacaaatacgccgccagctcctacctgagcctgacacctgagcagtggaagtcccacagatcctacagctgccaagtgacccacgaaggcagcaccgtggaaaagacagtggcccctacagagtgcagccccatcaagaccgatgtgattacaatggaccccaaggacaactgctccaaggacgccaacgataccctgctgctccagctgaccaacaccagcgcctactacatgtacttgttgctgctgctgaagtccgtggtgtacttcgccatcatcacatgctgcctgctgcggagaaccgccttctgctgcaacggcgagaagtctagggccaagcgatctggatctggagcaacaaacttctcactactcaaacaagcaggtgacgtggaggagaatcccgggcctactagtatggactggatttggcgcatccttttccttgtcggcgctgctaccggcgcgcattccttcgaacaagttcagcttcaacagcctggcgctgagctggtcaaacctggcgcttctgtgaagatgagctgcaaagccagcggctacgccttcagcagctactggatcaactggatgaagcagaaacccggccagggactcgaatggatcggccaaatctatcccggcgacggcgacaccaactacaacggcaagttcaagggcagagccacactgaccgccgatacctctagcagcacagcctacatgcagctgagcagcctgaccagcgaagatagcgccgtgtacttctgtgcccggtccatcacaacagtcgtgggctgcgctatggactattggggccagggaacaagcgtgaccgtgtctagtacgcgtgcctctacaaagggaccctccgtgtttcctctggctcccagcagcaagtctacaagcggaggaacagccgctctgggctgcctggtcaaggattactttcccgagcctgtgaccgtgtcctggaatagcggagcactgacaagcggcgtgcacacctttccagccgtgctgcaaagcagcggcctgtactctctgagcagcgtggtcacagtgcctagctctagcctgggcacccagacctacatctgcaatgtgaaccacaagcctagcaacaccaaggtggacaagagagtggaacccaagagctgtgaagtgaaaaccgactccaccgaccacgtgaagcccaaagagacagagaacaccaagcagcccagcaagagctgccacaagcccaaggccatcgtgcacaccgagaaagtgaacatgatgagcctgaccgtgctgggcctgcggatgctgttcgccaaaaccgtggccgtgaacttcctgctgaccgccaagctgttcttcctc

SEQ ID NO: 6242 - DNA, 2286 bp, Artificial Sequence
  Synthetic Polynucloetide
atggccttaccagtgaccgccttgctcctgccgctggccttgctgctccacgccgccaggccggaagtgcaggttttggagtctggcggaggactggttcagcctggcggatctctgagactgtcttgtgccgccagcggcttcaccttcagcaactttgccatgagctgggtccgacaggcccctggcaaaggacttgaatgggtgtccacaatcagcggcagcgccggcacaacagattacgccgattctgtgaagggcagattcaccatcagccgggacaacagcaagaaaaccctgtacctccagatgaacagcctgcgcgtggaagataccgccgtgtactactgtgccgatggcagaggccccttcttcgattatcgcggccagggcacactggtcaccgtttcttctggtaccggcggaggcggatctggcggcggaggtagcggtggcggaggatctgaattcgacatccagatgacacagagccctagcagcctgtctgccagcgtgggagacagagtgaccatcacatgcaaggccagcgaccacatcaacaactggctggcctggtatcagcagaagcctggacaggcccctaagctgctgatctacggcgctaccacactggaaacaggcgtgcccagcagattttctggcagcggctctggcaccgactacaccctgacaatatccagcctccagcctgaggacttcgccacctactactgtcagcagagctggaacaccccttggacattcggccagggcaccaagctggaaatcaagagactcgagggacagcctaaggccaatcctaccgtgacactgttccctccaagcagcgaagaactccaggccaacaaggccacacttgtgtgcctgatctccgacttctaccctggggctgtgacagtggcttggaaggccgatggatctcctgtgaaagccggcgtggaaaccaccaagccatccaagcagagcaacaacaaatacgccgccagctcctacctgagcctgacacctgagcagtggaagtcccacagatcctacagctgccaagtgacccacgaaggcagcaccgtggaaaagacagtggcccctacagagtgcagcggcagagccgattgcggcatcaccagcgccagctaccaccagggcgtgctgagcgccaccatcctgtacgagatcctgctgggcaaggccaccctgtacgccgtgctggtgtctgccctggtgctgatggctatggtcaagcggaaggacagccggggaagggccaagcgatctggatctggagcaacaaacttctcactactcaaacaagcaggtgacgtggaggagaatcccgggcctactagtatggactggatttggcgcatccttttccttgtcggcgctgctaccggcgcgcattccttcgaacaagttcagcttcaacagcctggcgctgagctggtcaaacctggcgcttctgtgaagatgagctgcaaagccagcggctacgccttcagcagctactggatcaactggatgaagcagaaacccggccagggactcgaatggatcggccaaatctatcccggcgacggcgacaccaactacaacggcaagttcaagggcagagccacactgaccgccgatacctctagcagcacagcctacatgcagctgagcagcctgaccagcgaagatagcgccgtgtacttctgtgcccggtccatcacaacagtcgtgggctgcgctatggactattggggccagggaacaagcgtgaccgtgtctagtacgcgtgcctctacaaagggaccctccgtgtttcctctggctcccagcagcaagtctacaagcggaggaacagccgctctgggctgcctggtcaaggattactttcccgagcctgtgaccgtgtcctggaatagcggagcactgacaagcggcgtgcacacctttccagccgtgctgcaaagcagcggcctgtactctctgagcagcgtggtcacagtgcctagctctagcctgggcacccagacctacatctgcaatgtgaaccacaagcctagcaacaccaaggtggacaagagagtggaacccaagagctgtatccccgaggacacattcttcccaagcagcgacgtgccctgcgacgtgaagctggtggaaaagagcttcgagacagacaccaacctgaacttccagaacctgagcgtgatcggcttcagaatcctgctgctgaaagtggccggctttaacctgctgatgaccctgcggctgtggtccagc

SEQ ID NO: 6243 - DNA, 2286 bp, Artificial Sequence
  Synthetic Polynucloetide
atggccttaccagtgaccgccttgctcctgccgctggccttgctgctccacgccgccaggccggaagtgcaggttttggagtctggcggaggactggttcagcctggcggatctctgagactgtcttgtgccgccagcggcttcaccttcagcaactttgccatgagctgggtccgacaggcccctggcaaaggacttgaatgggtgtccacaatcagcggcagcgccggcacaacagattacgccgattctgtgaagggcagattcaccatcagccgggacaacagcaagaaaaccctgtacctccagatgaacagcctgcgcgtggaagataccgccgtgtactactgtgccgatggcagaggccccttcttcgattatcgcggccagggcacactggtcaccgtttcttctggtaccggcggaggcggatctggcggcggaggtagcggtggcggaggatctgaattcgacatccagatgacacagagccctagcagcctgtctgccagcgtgggagacagagtgaccatcacatgcaaggccagcgaccacatcaacaactggctggcctggtatcagcagaagcctggacaggcccctaagctgctgatctacggcgctaccacactggaaacaggcgtgcccagcagattttctggcagcggctctggcaccgactacaccctgacaatatccagcctccagcctgaggacttcgccacctactactgtcagcagagctggaacaccccttggacattcggccagggcaccaagctggaaatcaagagactcgagggacagcctaaggccaatcctaccgtgacactgttccctccaagcagcgaagaactccaggccaacaaggccacacttgtgtgcctgatctccgacttctaccctggggctgtgacagtggcttggaaggccgatggatctcctgtgaaagccggcgtggaaaccaccaagccatccaagcagagcaacaacaaatacgccgccagctcctacctgagcctgacacctgagcagtggaagtcccacagatcctacagctgccaagtgacccacgaaggcagcaccgtggaaaagacagtggcccctacagagtgcagcggcagagccgattgcggctttaccagcgagagctaccagcagggcgtgctgagcgccaccatcctgtacgagatcctgctgggcaaggccaccctgtacgccgtgctggtgtctgccctggtgctgatggctatggtcaagcggaaggacagccggggaagggccaagcgatctggatctggagcaacaaacttctcactactcaaacaagcaggtgacgtggaggagaatcccgggcctactagtatggactggatttggcgcatccttttccttgtcggcgctgctaccggcgcgcattccttcgaacaagttcagcttcaacagcctggcgctgagctggtcaaacctggcgcttctgtgaagatgagctgcaaagccagcggctacgccttcagcagctactggatcaactggatgaagcagaaacccggccagggactcgaatggatcggccaaatctatcccggcgacggcgacaccaactacaacggcaagttcaagggcagagccacactgaccgccgatacctctagcagcacagcctacatgcagctgagcagcctgaccagcgaagatagcgccgtgtacttctgtgcccggtccatcacaacagtcgtgggctgcgctatggactattggggccagggaacaagcgtgaccgtgtctagtacgcgtgcctctacaaagggaccctccgtgtttcctctggctcccagcagcaagtctacaagcggaggaacagccgctctgggctgcctggtcaaggattactttcccgagcctgtgaccgtgtcctggaatagcggagcactgacaagcggcgtgcacacctttccagccgtgctgcaaagcagcggcctgtactctctgagcagcgtggtcacagtgcctagctctagcctgggcacccagacctacatctgcaatgtgaaccacaagcctagcaacaccaaggtggacaagagagtggaacccaagagctgtatccccgaggacacattcttcccaagccccgagagcagctgcgacgtgaagctggtggaaaagagcttcgagacagacaccaacctgaacttccagaacctgagcgtgatcggcttcagaatcctgctgctgaaagtggccggctttaacctgctgatgaccctgcggctgtggtccagc

SEQ ID NO: 6244 - DNA, 1764 bp, Artificial Sequence
  Synthetic Polynucloetide
atggccttaccagtgaccgccttgctcctgccgctggccttgctgctccacgccgccaggccggaagtgcaggttttggagtctggcggaggactggttcagcctggcggatctctgagactgtcttgtgccgccagcggcttcaccttcagcaactttgccatgagctgggtccgacaggcccctggcaaaggacttgaatgggtgtccacaatcagcggcagcgccggcacaacagattacgccgattctgtgaagggcagattcaccatcagccgggacaacagcaagaaaaccctgtacctccagatgaacagcctgcgcgtggaagataccgccgtgtactactgtgccgatggcagaggccccttcttcgattatcgcggccagggcacactggtcaccgtttcttctggtaccggcggaggcggatctggcggcggaggtagcggtggcggaggatctgaattcgacatccagatgacacagagccctagcagcctgtctgccagcgtgggagacagagtgaccatcacatgcaaggccagcgaccacatcaacaactggctggcctggtatcagcagaagcctggacaggcccctaagctgctgatctacggcgctaccacactggaaacaggcgtgcccagcagattttctggcagcggctctggcaccgactacaccctgacaatatccagcctccagcctgaggacttcgccacctactactgtcagcagagctggaacaccccttggacattcggccagggcaccaagctggaaatcaagagaggcggaggcggaagtggaggcggaggatctggcggcggaggctctcaagttcagcttcaacagcctggcgctgagctggtcaaacctggcgcttctgtgaagatgagctgcaaagccagcggctacgccttcagcagctactggatcaactggatgaagcagaaacccggccagggactcgaatggatcggccaaatctatcccggcgacggcgacaccaactacaacggcaagttcaagggcagagccacactgaccgccgatacctctagcagcacagcctacatgcagctgagcagcctgaccagcgaagatagcgccgtgtacttctgtgcccggtccatcacaacagtcgtgggctgcgctatggactattggggccagggaacaagcgtgaccgtgtctagtacgcgtgacggtaacgaggagatgggaggaatcactcaaaccccttacaaagtctcaatttcaggaacaactgttatccttacatgtccccagtatcctggcagcgagatcctttggcagcataacgacaagaatatagggggagatgaagacgataagaatatcggatctgacgaggatcacttgagcctgaaagagttctccgagcttgaacaaagcggatattatgtgtgctatccgcgcgggtcaaagccggaagacgctaacttttacctttatctccgagccagagtgtgcgaaaattgcatggaaatggacgttatgtccgttgctacaatagttatcgtagatatatgcatcacgggtggactgcttctgctggtttattattggtccaagaatagaaaggccaaagctaaacccgtgaccagaggcgctggcgcaggcggaaggcaaaggggacaaaacaaagaacggccaccaccagtgccaaatccagattatgagcctattcggaaaggacagagggacctgtactctggcctgaatcagagaagaatc

SEQ ID NO: 6245 - DNA, 1659 bp, Artificial Sequence
  Synthetic Polynucloetide
atggccttaccagtgaccgccttgctcctgccgctggccttgctgctccacgccgccaggccggaagtgcaggttttggagtctggcggaggactggttcagcctggcggatctctgagactgtcttgtgccgccagcggcttcaccttcagcaactttgccatgagctgggtccgacaggcccctggcaaaggacttgaatgggtgtccacaatcagcggcagcgccggcacaacagattacgccgattctgtgaagggcagattcaccatcagccgggacaacagcaagaaaaccctgtacctccagatgaacagcctgcgcgtggaagataccgccgtgtactactgtgccgatggcagaggccccttcttcgattatcgcggccagggcacactggtcaccgtttcttctggtaccggcggaggcggatctggcggcggaggtagcggtggcggaggatctgaattcgacatccagatgacacagagccctagcagcctgtctgccagcgtgggagacagagtgaccatcacatgcaaggccagcgaccacatcaacaactggctggcctggtatcagcagaagcctggacaggcccctaagctgctgatctacggcgctaccacactggaaacaggcgtgcccagcagattttctggcagcggctctggcaccgactacaccctgacaatatccagcctccagcctgaggacttcgccacctactactgtcagcagagctggaacaccccttggacattcggccagggcaccaagctggaaatcaagagaggcggaggcggaagtggaggcggaggatctggcggcggaggctctcaagttcagcttcaacagcctggcgctgagctggtcaaacctggcgcttctgtgaagatgagctgcaaagccagcggctacgccttcagcagctactggatcaactggatgaagcagaaacccggccagggactcgaatggatcggccaaatctatcccggcgacggcgacaccaactacaacggcaagttcaagggcagagccacactgaccgccgatacctctagcagcacagcctacatgcagctgagcagcctgaccagcgaagatagcgccgtgtacttctgtgcccggtccatcacaacagtcgtgggctgcgctatggactattggggccagggaacaagcgtgaccgtgtctagtacgcgtttcaagatccccatcgaggaactggaagatcgggtgttcgtgaactgcaacacctctatcacctgggtggaaggcaccgtgggaacactgctgagcgacatcaccagactggacctcggcaagcggattctggaccctcggggcatctacagatgcaacggcaccgacatctacaaggacaaagaaagcaccgtgcaggtccactacagaatgtgccagtcctgcgtggaactggaccctgctacagtggccggcatcatcgtgaccgatgtgatcgctactctgctgctggctctgggagtgttctgcttcgccggacacgaaacaggcagactgtctggcgctgccgatacacaggccctgctgagaaacgaccaagtgtatcagcccctgcgcgacagagatgatgcccagtattctcacctcggcggcaactgggctagaaacaag

SEQ ID NO: 6246 - DNA, 1689 bp, Artificial Sequence
  Synthetic Polynucloetide
atggccttaccagtgaccgccttgctcctgccgctggccttgctgctccacgccgccaggccggaagtgcaggttttggagtctggcggaggactggttcagcctggcggatctctgagactgtcttgtgccgccagcggcttcaccttcagcaactttgccatgagctgggtccgacaggcccctggcaaaggacttgaatgggtgtccacaatcagcggcagcgccggcacaacagattacgccgattctgtgaagggcagattcaccatcagccgggacaacagcaagaaaaccctgtacctccagatgaacagcctgcgcgtggaagataccgccgtgtactactgtgccgatggcagaggccccttcttcgattatcgcggccagggcacactggtcaccgtttcttctggtaccggcggaggcggatctggcggcggaggtagcggtggcggaggatctgaattcgacatccagatgacacagagccctagcagcctgtctgccagcgtgggagacagagtgaccatcacatgcaaggccagcgaccacatcaacaactggctggcctggtatcagcagaagcctggacaggcccctaagctgctgatctacggcgctaccacactggaaacaggcgtgcccagcagattttctggcagcggctctggcaccgactacaccctgacaatatccagcctccagcctgaggacttcgccacctactactgtcagcagagctggaacaccccttggacattcggccagggcaccaagctggaaatcaagagaggcggaggcggaagtggaggcggaggatctggcggcggaggctctcaagttcagcttcaacagcctggcgctgagctggtcaaacctggcgcttctgtgaagatgagctgcaaagccagcggctacgccttcagcagctactggatcaactggatgaagcagaaacccggccagggactcgaatggatcggccaaatctatcccggcgacggcgacaccaactacaacggcaagttcaagggcagagccacactgaccgccgatacctctagcagcacagcctacatgcagctgagcagcctgaccagcgaagatagcgccgtgtacttctgtgcccggtccatcacaacagtcgtgggctgcgctatggactattggggccagggaacaagcgtgaccgtgtctagtacgcgtcagagcatcaagggcaaccacctggtcaaggtgtacgactaccaagaggacggcagcgtgctgctgacatgtgatgccgaggccaagaacatcacctggtttaaggacggcaagatgatcggcttcctgaccgaggacaagaagaagtggaacctgggcagcaacgctaaggaccccagaggcatgtatcagtgcaagggcagccagaacaagagcaagcccctccaggtgtactaccggatgtgccagaactgcatcgagctgaacgccgctaccatcagcggctttctgttcgccgagatcgtgtccatcttcgtgctggccgtgggcgtgtactttatcgctggacaggatggcgtgcggcagagcagagcttccgataagcaaaccctgctgcctaacgaccagctgtaccagcctctgaaggacagagaggacgaccagtacagccacctccagggcaatcagctgagaagaaac

SEQ ID NO: 6247 - DNA, 1638 bp, Artificial Sequence
  Synthetic Polynucloetide
atggccttaccagtgaccgccttgctcctgccgctggccttgctgctccacgccgccaggccggaagtgcaggttttggagtctggcggaggactggttcagcctggcggatctctgagactgtcttgtgccgccagcggcttcaccttcagcaactttgccatgagctgggtccgacaggcccctggcaaaggacttgaatgggtgtccacaatcagcggcagcgccggcacaacagattacgccgattctgtgaagggcagattcaccatcagccgggacaacagcaagaaaaccctgtacctccagatgaacagcctgcgcgtggaagataccgccgtgtactactgtgccgatggcagaggccccttcttcgattatcgcggccagggcacactggtcaccgtttcttctggtaccggcggaggcggatctggcggcggaggtagcggtggcggaggatctgaattcgacatccagatgacacagagccctagcagcctgtctgccagcgtgggagacagagtgaccatcacatgcaaggccagcgaccacatcaacaactggctggcctggtatcagcagaagcctggacaggcccctaagctgctgatctacggcgctaccacactggaaacaggcgtgcccagcagattttctggcagcggctctggcaccgactacaccctgacaatatccagcctccagcctgaggacttcgccacctactactgtcagcagagctggaacaccccttggacattcggccagggcaccaagctggaaatcaagagaggcggaggcggaagtggaggcggaggatctggcggcggaggctctcaagttcagcttcaacagcctggcgctgagctggtcaaacctggcgcttctgtgaagatgagctgcaaagccagcggctacgccttcagcagctactggatcaactggatgaagcagaaacccggccagggactcgaatggatcggccaaatctatcccggcgacggcgacaccaactacaacggcaagttcaagggcagagccacactgaccgccgatacctctagcagcacagcctacatgcagctgagcagcctgaccagcgaagatagcgccgtgtacttctgtgcccggtccatcacaacagtcgtgggctgcgctatggactattggggccagggaacaagcgtgaccgtgtctagtacgcgtcagagttttgggttgttggaccctaaattgtgctatctgttggacggaatcctgttcatttacggagtgatcctgaccgcattgttcctgcgggttaagttttccagatccgcagacgcacccgcttaccaacaagggcagaaccaactctacaatgaacttaatttggggcggagggaagagtacgacgttctggacaaaaggaggggacgagatcccgagatgggcggaaagcctcagcgaaggaagaatccgcaagaggggctttataacgaactccagaaagataaaatggcagaagcctatagtgagattgggatgaagggagaaaggaggaggggtaaaggtcacgatgggttgtaccaaggattgagcacagccactaaagatacctatgatgcgctccacatgcaggccctgccgccaaga

SEQ ID NO: 6248 - DNA, 2340 bp, Artificial Sequence
  Synthetic Polynucloetide
atggccttaccagtgaccgccttgctcctgccgctggccttgctgctccacgccgccaggccggaagtgcaggttttggagtctggcggaggactggttcagcctggcggatctctgagactgtcttgtgccgccagcggcttcaccttcagcaactttgccatgagctgggtccgacaggcccctggcaaaggacttgaatgggtgtccacaatcagcggcagcgccggcacaacagattacgccgattctgtgaagggcagattcaccatcagccgggacaacagcaagaaaaccctgtacctccagatgaacagcctgcgcgtggaagataccgccgtgtactactgtgccgatggcagaggccccttcttcgattatcgcggccagggcacactggtcaccgtttcttctggtaccggcggaggcggatctggcggcggaggtagcggtggcggaggatctgaattcgacatccagatgacacagagccctagcagcctgtctgccagcgtgggagacagagtgaccatcacatgcaaggccagcgaccacatcaacaactggctggcctggtatcagcagaagcctggacaggcccctaagctgctgatctacggcgctaccacactggaaacaggcgtgcccagcagattttctggcagcggctctggcaccgactacaccctgacaatatccagcctccagcctgaggacttcgccacctactactgtcagcagagctggaacaccccttggacattcggccagggcaccaagctggaaatcaagagaggcggaggcggaagtggaggcggaggatctggcggcggaggctctcaagttcagcttcaacagcctggcgctgagctggtcaaacctggcgcttctgtgaagatgagctgcaaagccagcggctacgccttcagcagctactggatcaactggatgaagcagaaacccggccagggactcgaatggatcggccaaatctatcccggcgacggcgacaccaactacaacggcaagttcaagggcagagccacactgaccgccgatacctctagcagcacagcctacatgcagctgagcagcctgaccagcgaagatagcgccgtgtacttctgtgcccggtccatcacaacagtcgtgggctgcgctatggactattggggccagggaacaagcgtgaccgtgtctagtacgcgtgggagcggcatccagaaccctgatcctgccgtgtaccagctgcgggatagcaagagcagcgacaagagcgtgtgtctgttcaccgacttcgacagccagaccaacgtgtcccagagcaaggactccgacgtgtacatcaccgataagaccgtgctggacatgcggagcatggacttcaagagcaactccgccgtggcctggtccaacaagtccgatttcgcctgcgccaacgccttcaacaacagcattatccccgaggacacattcttcccaagccccgagagcagctgcgacgtgaagctggtggaaaagagcttcgagacagacaccaacctgaacttccagaacctgagcgtgatcggcttcagaatcctgctgctgaaagtggccggctttaacctgctgatgaccctgcggctgtggtccagccgcgccaagagaagcggatctggcgtgaagcagaccctgaatttcgacctgctgaagctggctggcgacgtggaatccaacccaggcccttctagaggccatatgaccgagtacaagcccacggtgcgcctcgccacccgcgacgacgtccccagggccgtacgcaccctcgccgccgcgttcgccgactaccccgccacgcgccacaccgtcgatccggaccgccacatcgagcgggtcaccgagctgcaagaactcttcctcacgcgcgtcgggctcgacatcggcaaggtgtgggtcgcggacgacggcgccgcggtggcggtctggaccacgccggagagcgtcgaagcgggggcggtgttcgccgagatcggcccgcgcatggccgagttgagcggttcccggctggccgcgcagcaacagatggaaggcctcctggcgccgcaccggcccaaggagcccgcgtggttcctggccaccgtcggcgtctcgcccgaccaccagggcaagggtctgggcagcgccgtcgtgctccccggagtggaggcggccgagcgcgccggggtgcccgccttcctggagacctccgcgccccgcaacctccccttctacgagcggctcggcttcaccgtcaccgccgacgtcgaggtgcccgaaggaccgcgcacctggtgcatgacccgcaagcccggtgcctga

SEQ ID NO: 6249 - DNA, 2436 bp, Artificial Sequence
  Synthetic Polynucloetide
atggccttaccagtgaccgccttgctcctgccgctggccttgctgctccacgccgccaggccggaagtgcaggttttggagtctggcggaggactggttcagcctggcggatctctgagactgtcttgtgccgccagcggcttcaccttcagcaactttgccatgagctgggtccgacaggcccctggcaaaggacttgaatgggtgtccacaatcagcggcagcgccggcacaacagattacgccgattctgtgaagggcagattcaccatcagccgggacaacagcaagaaaaccctgtacctccagatgaacagcctgcgcgtggaagataccgccgtgtactactgtgccgatggcagaggccccttcttcgattatcgcggccagggcacactggtcaccgtttcttctggtaccggcggaggcggatctggcggcggaggtagcggtggcggaggatctgaattcgacatccagatgacacagagccctagcagcctgtctgccagcgtgggagacagagtgaccatcacatgcaaggccagcgaccacatcaacaactggctggcctggtatcagcagaagcctggacaggcccctaagctgctgatctacggcgctaccacactggaaacaggcgtgcccagcagattttctggcagcggctctggcaccgactacaccctgacaatatccagcctccagcctgaggacttcgccacctactactgtcagcagagctggaacaccccttggacattcggccagggcaccaagctggaaatcaagagaggcggaggcggaagtggaggcggaggatctggcggcggaggctctcaagttcagcttcaacagcctggcgctgagctggtcaaacctggcgcttctgtgaagatgagctgcaaagccagcggctacgccttcagcagctactggatcaactggatgaagcagaaacccggccagggactcgaatggatcggccaaatctatcccggcgacggcgacaccaactacaacggcaagttcaagggcagagccacactgaccgccgatacctctagcagcacagcctacatgcagctgagcagcctgaccagcgaagatagcgccgtgtacttctgtgcccggtccatcacaacagtcgtgggctgcgctatggactattggggccagggaacaagcgtgaccgtgtctagtctcgaggacctgaagaacgtgttcccacctgaggtggccgtgttcgagcctagcgaggccgagatcagccacacccagaaagccaccctcgtgtgcctggctaccggcttctaccccgaccatgtggaactgtcttggtgggtcaacggcaaagaggtgcacagcggcgtgtctaccgacccccagccactgaaagaacagcccgccctgaacgacagccggtactgcctgagcagcagactgagagtgtccgccaccttctggcagaacccccggaaccacttcagatgccaggtgcagttctacggcctgagcgagaacgacgagtggacccaggacagagccaagcccgtgacccagatcgtgtctgccgaagcctggggcagagccgattgcggctttaccagcgagagctaccagcagggcgtgctgagcgccaccatcctgtacgagatcctgctgggcaaggccaccctgtacgccgtgctggtgtctgccctggtgctgatggctatggtcaagcggaaggacagccggggaagggccaagcgatctggatctggagcaacaaacttctcactactcaaacaagcaggtgacgtggaggagaatcccgggcctactagaggccatatgaccgagtacaagcccacggtgcgcctcgccacccgcgacgacgtccccagggccgtacgcaccctcgccgccgcgttcgccgactaccccgccacgcgccacaccgtcgatccggaccgccacatcgagcgggtcaccgagctgcaagaactcttcctcacgcgcgtcgggctcgacatcggcaaggtgtgggtcgcggacgacggcgccgcggtggcggtctggaccacgccggagagcgtcgaagcgggggcggtgttcgccgagatcggcccgcgcatggccgagttgagcggttcccggctggccgcgcagcaacagatggaaggcctcctggcgccgcaccggcccaaggagcccgcgtggttcctggccaccgtcggcgtctcgcccgaccaccagggcaagggtctgggcagcgccgtcgtgctccccggagtggaggcggccgagcgcgccggggtgcccgccttcctggagacctccgcgccccgcaacctccccttctacgagcggctcggcttcaccgtcaccgccgacgtcgaggtgcccgaaggaccgcgcacctggtgcatgacccgcaagcccggtgcctga

SEQ ID NO: 6250 - DNA, 2586 bp, Artificial Sequence
  Synthetic Polynucloetide
atggccttaccagtgaccgccttgctcctgccgctggccttgctgctccacgccgccaggccggaagtgcaggttttggagtctggcggaggactggttcagcctggcggatctctgagactgtcttgtgccgccagcggcttcaccttcagcaactttgccatgagctgggtccgacaggcccctggcaaaggacttgaatgggtgtccacaatcagcggcagcgccggcacaacagattacgccgattctgtgaagggcagattcaccatcagccgggacaacagcaagaaaaccctgtacctccagatgaacagcctgcgcgtggaagataccgccgtgtactactgtgccgatggcagaggccccttcttcgattatcgcggccagggcacactggtcaccgtttcttctggtaccggcggaggcggatctggcggcggaggtagcggtggcggaggatctgaattcgacatccagatgacacagagccctagcagcctgtctgccagcgtgggagacagagtgaccatcacatgcaaggccagcgaccacatcaacaactggctggcctggtatcagcagaagcctggacaggcccctaagctgctgatctacggcgctaccacactggaaacaggcgtgcccagcagattttctggcagcggctctggcaccgactacaccctgacaatatccagcctccagcctgaggacttcgccacctactactgtcagcagagctggaacaccccttggacattcggccagggcaccaagctggaaatcaagagaggcggaggcggaagtggaggcggaggatctggcggcggaggctctcaagttcagcttcaacagcctggcgctgagctggtcaaacctggcgcttctgtgaagatgagctgcaaagccagcggctacgccttcagcagctactggatcaactggatgaagcagaaacccggccagggactcgaatggatcggccaaatctatcccggcgacggcgacaccaactacaacggcaagttcaagggcagagccacactgaccgccgatacctctagcagcacagcctacatgcagctgagcagcctgaccagcgaagatagcgccgtgtacttctgtgcccggtccatcacaacagtcgtgggctgcgctatggactattggggccagggaacaagcgtgaccgtgtctagtacgcgtgagcagaaactgatctcggaagaggatctggggagcggcaccccattcccttctctggcccctcccatcatgctgctggtggacggcaagcagcagatggtggtcgtgtgcctggtgctggatgtggccccacctggactggacagccccatctggtttagcgccggcaatggctctgccctggacgcctttacctacggcccaagccctgccaccgatggcacctggacaaatctggcccacctgagcctgcccagcgaggaactggcttcttgggagcctctcgtgtgccacacaggacctggcgctgagggacacagcagatccacccagcctatgcacctgtctggcgaggccagcaccgccagaacctgtcctcaggaacctctgagaggcacccctggcggagcactgtggctgggagtgctgagactgctgctgttcaagctgctgctgtttgacctgctgctgacctgctcctgtctgtgcgatcctgccggccctctgccttctcctgccaccaccacaagactgagagccctgggcagccacagactgcaccctgccacagagacaggcggcagagaggccacaagcagccctagaccccagcccagagacagaagatggggcgataccccccctggcagaaagcctggatctccagtccgcgccaagagaagcggatctggcgtgaagcagaccctgaatttcgacctgctgaagctggctggcgacgtggaatccaacccaggcccttctagatctagaggccatatgaccgagtacaagcccacggtgcgcctcgccacccgcgacgacgtccccagggccgtacgcaccctcgccgccgcgttcgccgactaccccgccacgcgccacaccgtcgatccggaccgccacatcgagcgggtcaccgagctgcaagaactcttcctcacgcgcgtcgggctcgacatcggcaaggtgtgggtcgcggacgacggcgccgcggtggcggtctggaccacgccggagagcgtcgaagcgggggcggtgttcgccgagatcggcccgcgcatggccgagttgagcggttcccggctggccgcgcagcaacagatggaaggcctcctggcgccgcaccggcccaaggagcccgcgtggttcctggccaccgtcggcgtctcgcccgaccaccagggcaagggtctgggcagcgccgtcgtgctccccggagtggaggcggccgagcgcgccggggtgcccgccttcctggagacctccgcgccccgcaacctccccttctacgagcggctcggcttcaccgtcaccgccgacgtcgaggtgcccgaaggaccgcgcacctggtgcatgacccgcaagcccggtgcctga

SEQ ID NO: 6251 - DNA, 2028 bp, Artificial Sequence
  Synthetic Polynucloetide
atggccttaccagtgaccgccttgctcctgccgctggccttgctgctccacgccgccaggccggaagtgcaggttttggagtctggcggaggactggttcagcctggcggatctctgagactgtcttgtgccgccagcggcttcaccttcagcaactttgccatgagctgggtccgacaggcccctggcaaaggacttgaatgggtgtccacaatcagcggcagcgccggcacaacagattacgccgattctgtgaagggcagattcaccatcagccgggacaacagcaagaaaaccctgtacctccagatgaacagcctgcgcgtggaagataccgccgtgtactactgtgccgatggcagaggccccttcttcgattatcgcggccagggcacactggtcaccgtttcttctggtaccggcggaggcggatctggcggcggaggtagcggtggcggaggatctgaattcgacatccagatgacacagagccctagcagcctgtctgccagcgtgggagacagagtgaccatcacatgcaaggccagcgaccacatcaacaactggctggcctggtatcagcagaagcctggacaggcccctaagctgctgatctacggcgctaccacactggaaacaggcgtgcccagcagattttctggcagcggctctggcaccgactacaccctgacaatatccagcctccagcctgaggacttcgccacctactactgtcagcagagctggaacaccccttggacattcggccagggcaccaagctggaaatcaagagactcgaggacctgaagaacgtgttcccacctgaggtggccgtgttcgagcctagcgaggccgagatcagccacacccagaaagccaccctcgtgtgcctggctaccggcttctaccccgaccatgtggaactgtcttggtgggtcaacggcaaagaggtgcacagcggcgtgtctaccgacccccagccactgaaagaacagcccgccctgaacgacagccggtactgcctgagcagcagactgagagtgtccgccaccttctggcagaacccccggaaccacttcagatgccaggtgcagttctacggcctgagcgagaacgacgagtggacccaggacagagccaagcccgtgacccagatcgtgtctgccgaagcctggggcagagccgattgcggctttaccagcgagagctaccagcagggcgtgctgagcgccaccatcctgtacgagatcctgctgggcaaggccaccctgtacgccgtgctggtgtctgccctggtgctgatggctatggtcaagcggaaggacagccggggaagggccaagcgatctggatctggagcaacaaacttctcactactcaaacaagcaggtgacgtggaggagaatcccgggcctactagaggccatatgaccgagtacaagcccacggtgcgcctcgccacccgcgacgacgtccccagggccgtacgcaccctcgccgccgcgttcgccgactaccccgccacgcgccacaccgtcgatccggaccgccacatcgagcgggtcaccgagctgcaagaactcttcctcacgcgcgtcgggctcgacatcggcaaggtgtgggtcgcggacgacggcgccgcggtggcggtctggaccacgccggagagcgtcgaagcgggggcggtgttcgccgagatcggcccgcgcatggccgagttgagcggttcccggctggccgcgcagcaacagatggaaggcctcctggcgccgcaccggcccaaggagcccgcgtggttcctggccaccgtcggcgtctcgcccgaccaccagggcaagggtctgggcagcgccgtcgtgctccccggagtggaggcggccgagcgcgccggggtgcccgccttcctggagacctccgcgccccgcaacctccccttctacgagcggctcggcttcaccgtcaccgccgacgtcgaggtgcccgaaggaccgcgcacctggtgcatgacccgcaagcccggtgcctga

SEQ ID NO: 6252 - DNA, 1335 bp, Artificial Sequence
  Synthetic Polynucloetide
atggccttaccagtgaccgccttgctcctgccgctggccttgctgctccacgccgccaggccggaagtgcaggttttggagtctggcggaggactggttcagcctggcggatctctgagactgtcttgtgccgccagcggcttcaccttcagcaactttgccatgagctgggtccgacaggcccctggcaaaggacttgaatgggtgtccacaatcagcggcagcgccggcacaacagattacgccgattctgtgaagggcagattcaccatcagccgggacaacagcaagaaaaccctgtacctccagatgaacagcctgcgcgtggaagataccgccgtgtactactgtgccgatggcagaggccccttcttcgattatcgcggccagggcacactggtcaccgtttcttctggtaccggcggaggcggatctggcggcggaggtagcggtggcggaggatctgaattcgacatccagatgacacagagccctagcagcctgtctgccagcgtgggagacagagtgaccatcacatgcaaggccagcgaccacatcaacaactggctggcctggtatcagcagaagcctggacaggcccctaagctgctgatctacggcgctaccacactggaaacaggcgtgcccagcagattttctggcagcggctctggcaccgactacaccctgacaatatccagcctccagcctgaggacttcgccacctactactgtcagcagagctggaacaccccttggacattcggccagggcaccaagctggaaatcaagagactcgaggacctgaagaacgtgttcccacctgaggtggccgtgttcgagcctagcgaggccgagatcagccacacccagaaagccaccctcgtgtgcctggctaccggcttctaccccgaccatgtggaactgtcttggtgggtcaacggcaaagaggtgcacagcggcgtgtctaccgacccccagccactgaaagaacagcccgccctgaacgacagccggtactgcctgagcagcagactgagagtgtccgccaccttctggcagaacccccggaaccacttcagatgccaggtgcagttctacggcctgagcgagaacgacgagtggacccaggacagagccaagcccgtgacccagatcgtgtctgccgaagcctggggcagagccgattgcggctttaccagcgagagctaccagcagggcgtgctgagcgccaccatcctgtacgagatcctgctgggcaaggccaccctgtacgccgtgctggtgtctgccctggtgctgatggctatggtcaagcggaaggacagccgggga

SEQ ID NO: 6253 - DNA, 2082 bp, Artificial Sequence
  Synthetic Polynucloetide
atggccttaccagtgaccgccttgctcctgccgctggccttgctgctccacgccgccaggccggaagtgcaggttttggagtctggcggaggactggttcagcctggcggatctctgagactgtcttgtgccgccagcggcttcaccttcagcaactttgccatgagctgggtccgacaggcccctggcaaaggacttgaatgggtgtccacaatcagcggcagcgccggcacaacagattacgccgattctgtgaagggcagattcaccatcagccgggacaacagcaagaaaaccctgtacctccagatgaacagcctgcgcgtggaagataccgccgtgtactactgtgccgatggcagaggccccttcttcgattatcgcggccagggcacactggtcaccgtttcttctggtaccggcggaggcggatctggcggcggaggtagcggtggcggaggatctgaattcgacatccagatgacacagagccctagcagcctgtctgccagcgtgggagacagagtgaccatcacatgcaaggccagcgaccacatcaacaactggctggcctggtatcagcagaagcctggacaggcccctaagctgctgatctacggcgctaccacactggaaacaggcgtgcccagcagattttctggcagcggctctggcaccgactacaccctgacaatatccagcctccagcctgaggacttcgccacctactactgtcagcagagctggaacaccccttggacattcggccagggcaccaagctggaaatcaagagactcgaggggaaaccaattcccaaccctcttctgggactggattcaaccggcagcggcgaggacctgaagaacgtgttcccacctgaggtggccgtgttcgagcctagcgaggccgagatcagccacacccagaaagccaccctcgtgtgcctggctaccggcttctaccccgaccatgtggaactgtcttggtgggtcaacggcaaagaggtgcacagcggcgtgtgtaccgacccccagccactgaaagaacagcccgccctgaacgacagccggtactgcctgagcagcagactgagagtgtccgccaccttctggcagaacccccggaaccacttcagatgccaggtgcagttctacggcctgagcgagaacgacgagtggacccaggacagagccaagcccgtgacccagatcgtgtctgccgaagcctggggcagagccgattgcggctttaccagcgagagctaccagcagggcgtgctgagcgccaccatcctgtacgagatcctgctgggcaaggccaccctgtacgccgtgctggtgtctgccctggtgctgatggctatggtcaagcggaaggacagccggggaagggccaagcgatctggatctggagcaacaaacttctcactactcaaacaagcaggtgacgtggaggagaatcccgggcctactagaggccatatgaccgagtacaagcccacggtgcgcctcgccacccgcgacgacgtccccagggccgtacgcaccctcgccgccgcgttcgccgactaccccgccacgcgccacaccgtcgatccggaccgccacatcgagcgggtcaccgagctgcaagaactcttcctcacgcgcgtcgggctcgacatcggcaaggtgtgggtcgcggacgacggcgccgcggtggcggtctggaccacgccggagagcgtcgaagcgggggcggtgttcgccgagatcggcccgcgcatggccgagttgagcggttcccggctggccgcgcagcaacagatggaaggcctcctggcgccgcaccggcccaaggagcccgcgtggttcctggccaccgtcggcgtctcgcccgaccaccagggcaagggtctgggcagcgccgtcgtgctccccggagtggaggcggccgagcgcgccggggtgcccgccttcctggagacctccgcgccccgcaacctccccttctacgagcggctcggcttcaccgtcaccgccgacgtcgaggtgcccgaaggaccgcgcacctggtgcatgacccgcaagcccggtgcctga

SEQ ID NO: 6254 - DNA, 1392 bp, Artificial Sequence
  Synthetic Polynucloetide
atggccttaccagtgaccgccttgctcctgccgctggccttgctgctccacgccgccaggccggaagtgcaggttttggagtctggcggaggactggttcagcctggcggatctctgagactgtcttgtgccgccagcggcttcaccttcagcaactttgccatgagctgggtccgacaggcccctggcaaaggacttgaatgggtgtccacaatcagcggcagcgccggcacaacagattacgccgattctgtgaagggcagattcaccatcagccgggacaacagcaagaaaaccctgtacctccagatgaacagcctgcgcgtggaagataccgccgtgtactactgtgccgatggcagaggccccttcttcgattatcgcggccagggcacactggtcaccgtttcttctggtaccggcggaggcggatctggcggcggaggtagcggtggcggaggatctgaattcgacatccagatgacacagagccctagcagcctgtctgccagcgtgggagacagagtgaccatcacatgcaaggccagcgaccacatcaacaactggctggcctggtatcagcagaagcctggacaggcccctaagctgctgatctacggcgctaccacactggaaacaggcgtgcccagcagattttctggcagcggctctggcaccgactacaccctgacaatatccagcctccagcctgaggacttcgccacctactactgtcagcagagctggaacaccccttggacattcggccagggcaccaagctggaaatcaagagactcgaggggaaaccaattcccaaccctcttctgggactggattcaaccggcagcggcgaggacctgaagaacgtgttcccacctgaggtggccgtgttcgagcctagcgaggccgagatcagccacacccagaaagccaccctcgtgtgcctggctaccggcttctaccccgaccatgtggaactgtcttggtgggtcaacggcaaagaggtgcacagcggcgtgtgtaccgacccccagccactgaaagaacagcccgccctgaacgacagccggtactgcctgagcagcagactgagagtgtccgccaccttctggcagaacccccggaaccacttcagatgccaggtgcagttctacggcctgagcgagaacgacgagtggacccaggacagagccaagcccgtgacccagatcgtgtctgccgaagcctggggcagagccgattgcggctttaccagcgagagctaccagcagggcgtgctgagcgccaccatcctgtacgagatcctgctgggcaaggccaccctgtacgccgtgctggtgtctgccctggtgctgatggctatggtcaagcggaaggacagccggggatga

SEQ ID NO: 6255 - DNA, 2340 bp, Artificial Sequence
  Synthetic Polynucloetide
atggccttaccagtgaccgccttgctcctgccgctggccttgctgctccacgccgccaggccggaagtgcaggttttggagtctggcggaggactggttcagcctggcggatctctgagactgtcttgtgccgccagcggcttcaccttcagcaactttgccatgagctgggtccgacaggcccctggcaaaggacttgaatgggtgtccacaatcagcggcagcgccggcacaacagattacgccgattctgtgaagggcagattcaccatcagccgggacaacagcaagaaaaccctgtacctccagatgaacagcctgcgcgtggaagataccgccgtgtactactgtgccgatggcagaggccccttcttcgattatcgcggccagggcacactggtcaccgtttcttctggtaccggcggaggcggatctggcggcggaggtagcggtggcggaggatctgaattcgacatccagatgacacagagccctagcagcctgtctgccagcgtgggagacagagtgaccatcacatgcaaggccagcgaccacatcaacaactggctggcctggtatcagcagaagcctggacaggcccctaagctgctgatctacggcgctaccacactggaaacaggcgtgcccagcagattttctggcagcggctctggcaccgactacaccctgacaatatccagcctccagcctgaggacttcgccacctactactgtcagcagagctggaacaccccttggacattcggccagggcaccaagctggaaatcaagagaggcggaggcggaagtggaggcggaggatctggcggcggaggctctcaagttcagcttcaacagcctggcgctgagctggtcaaacctggcgcttctgtgaagatgagctgcaaagccagcggctacgccttcagcagctactggatcaactggatgaagcagaaacccggccagggactcgaatggatcggccaaatctatcccggcgacggcgacaccaactacaacggcaagttcaagggcagagccacactgaccgccgatacctctagcagcacagcctacatgcagctgagcagcctgaccagcgaagatagcgccgtgtacttctgtgcccggtccatcacaacagtcgtgggctgcgctatggactattggggccagggaacaagcgtgaccgtgtctagtacgcgtgggagcggcatccagaaccctgatcctgccgtgtaccagctgcgggatagcaagagcagcgacaagagcgtgtgtctgttcaccgacttcgacagccagaccaacgtgtcccagagcaaggactccgacgtgtacatcaccgataagaccgtgctggacatgcggagcatggacttcaagagcaactccgccgtggcctggtccaacaagtccgatttcgcctgcgccaacgccttcaacaacagcattatccccgaggacacattcttcccaagcagcgacgtgccctgcgacgtgaagctggtggaaaagagcttcgagacagacaccaacctgaacttccagaacctgagcgtgatcggcttcagaatcctgctgctgaaagtggccggctttaacctgctgatgaccctgcggctgtggtccagccgcgccaagagaagcggatctggcgtgaagcagaccctgaatttcgacctgctgaagctggctggcgacgtggaatccaacccaggcccttctagaggccatatgaccgagtacaagcccacggtgcgcctcgccacccgcgacgacgtccccagggccgtacgcaccctcgccgccgcgttcgccgactaccccgccacgcgccacaccgtcgatccggaccgccacatcgagcgggtcaccgagctgcaagaactcttcctcacgcgcgtcgggctcgacatcggcaaggtgtgggtcgcggacgacggcgccgcggtggcggtctggaccacgccggagagcgtcgaagcgggggcggtgttcgccgagatcggcccgcgcatggccgagttgagcggttcccggctggccgcgcagcaacagatggaaggcctcctggcgccgcaccggcccaaggagcccgcgtggttcctggccaccgtcggcgtctcgcccgaccaccagggcaagggtctgggcagcgccgtcgtgctccccggagtggaggcggccgagcgcgccggggtgcccgccttcctggagacctccgcgccccgcaacctccccttctacgagcggctcggcttcaccgtcaccgccgacgtcgaggtgcccgaaggaccgcgcacctggtgcatgacccgcaagcccggtgcctga

SEQ ID NO: 6256 - DNA, 2436 bp, Artificial Sequence
  Synthetic Polynucloetide
atggccttaccagtgaccgccttgctcctgccgctggccttgctgctccacgccgccaggccggaagtgcaggttttggagtctggcggaggactggttcagcctggcggatctctgagactgtcttgtgccgccagcggcttcaccttcagcaactttgccatgagctgggtccgacaggcccctggcaaaggacttgaatgggtgtccacaatcagcggcagcgccggcacaacagattacgccgattctgtgaagggcagattcaccatcagccgggacaacagcaagaaaaccctgtacctccagatgaacagcctgcgcgtggaagataccgccgtgtactactgtgccgatggcagaggccccttcttcgattatcgcggccagggcacactggtcaccgtttcttctggtaccggcggaggcggatctggcggcggaggtagcggtggcggaggatctgaattcgacatccagatgacacagagccctagcagcctgtctgccagcgtgggagacagagtgaccatcacatgcaaggccagcgaccacatcaacaactggctggcctggtatcagcagaagcctggacaggcccctaagctgctgatctacggcgctaccacactggaaacaggcgtgcccagcagattttctggcagcggctctggcaccgactacaccctgacaatatccagcctccagcctgaggacttcgccacctactactgtcagcagagctggaacaccccttggacattcggccagggcaccaagctggaaatcaagagaggcggaggcggaagtggaggcggaggatctggcggcggaggctctcaagttcagcttcaacagcctggcgctgagctggtcaaacctggcgcttctgtgaagatgagctgcaaagccagcggctacgccttcagcagctactggatcaactggatgaagcagaaacccggccagggactcgaatggatcggccaaatctatcccggcgacggcgacaccaactacaacggcaagttcaagggcagagccacactgaccgccgatacctctagcagcacagcctacatgcagctgagcagcctgaccagcgaagatagcgccgtgtacttctgtgcccggtccatcacaacagtcgtgggctgcgctatggactattggggccagggaacaagcgtgaccgtgtctagtctcgaggacctgaagaacgtgttcccacctgaggtggccgtgttcgagcctagcaaggccgagatcgcccacacccagaaagccaccctcgtgtgcctggctaccggcttctaccccgaccatgtggaactgtcttggtgggtcaacggcaaagaggtgcacagcggcgtgtctaccgacccccagccactgaaagaacagcccgccctgaacgacagccggtactgcctgagcagcagactgagagtgtccgccaccttctggcagaacccccggaaccacttcagatgccaggtgcagttctacggcctgagcgagaacgacgagtggacccaggacagagccaagcccgtgacccagatcgtgtctgccgaagcctggggcagagccgattgcggcatcaccagcgccagctaccaccagggcgtgctgagcgccaccatcctgtacgagatcctgctgggcaaggccaccctgtacgccgtgctggtgtctgccctggtgctgatggctatggtcaagcggaaggacagccggggaagggccaagcgatctggatctggagcaacaaacttctcactactcaaacaagcaggtgacgtggaggagaatcccgggcctactagaggccatatgaccgagtacaagcccacggtgcgcctcgccacccgcgacgacgtccccagggccgtacgcaccctcgccgccgcgttcgccgactaccccgccacgcgccacaccgtcgatccggaccgccacatcgagcgggtcaccgagctgcaagaactcttcctcacgcgcgtcgggctcgacatcggcaaggtgtgggtcgcggacgacggcgccgcggtggcggtctggaccacgccggagagcgtcgaagcgggggcggtgttcgccgagatcggcccgcgcatggccgagttgagcggttcccggctggccgcgcagcaacagatggaaggcctcctggcgccgcaccggcccaaggagcccgcgtggttcctggccaccgtcggcgtctcgcccgaccaccagggcaagggtctgggcagcgccgtcgtgctccccggagtggaggcggccgagcgcgccggggtgcccgccttcctggagacctccgcgccccgcaacctccccttctacgagcggctcggcttcaccgtcaccgccgacgtcgaggtgcccgaaggaccgcgcacctggtgcatgacccgcaagcccggtgcctga

SEQ ID NO: 6257 - DNA, 1923 bp, Artificial Sequence
  Synthetic Polynucloetide
atggactggatttggcgcatccttttccttgtcggcgctgctaccggcgcccattccgggcccgaagtgcagctggttgaatctggcggaggactggttcaggctggcggatctctgagactgtcttgtgccgccagcggcagaacctttagcatgggctggtttagacaggcccctggcaaagagagagagttcgtcgccgccatcacatactctggcggcagcccttactacgccgactctgtgaagggcagattcaccatcagccgggacaacgccaagaacaccgtgtacctccagatgaacagcctgaagcctgaggacaccgccgtgtactactgcgccgccaatccaacatacggcagcgactggaacgccgagaattggggccagggaacccaagtgacagtgtctagcggatccggcggcggaggatctggcggaggcggatctgggggcggaggctctttcgaacaagttcagcttcaacagcctggcgctgagctggtcaaacctggcgcttctgtgaagatgagctgcaaagccagcggctacgccttcagcagctactggatcaactggatgaagcagaaacccggccagggactcgaatggatcggccaaatctatcccggcgacggcgacaccaactacaacggcaagttcaagggcagagccacactgaccgccgatacctctagcagcacagcctacatgcagctgagcagcctgaccagcgaagatagcgccgtgtacttctgtgcccggtccatcacaacagtcgtgggctgcgctatggactattggggccagggaacaagcgtgaccgtgtctagtggcggaggcggaagtggaggcggaggatctggcggcggaggctctgacatccagatgacacagagccctagcagcctgtctgccagcgtgggagacagagtgaccatcacatgcaaggccagcgaccacatcaacaactggctggcctggtatcagcagaagcctggacaggcccctaagctgctgatctacggcgctaccacactggaaacaggcgtgcccagcagattttctggcagcggctctggcaccgactacaccctgacaatatccagcctccagcctgaggacttcgccacctactactgtcagcagagctggaacaccccttggacattcggccagggcaccaagctggaaatcaagagaacgcgtgagcagaaactgatctcggaagaggatctggcgaagcccaccacgacgccagcgccgcgaccaccaacaccggcgcccaccatcgcgtcgcagcccctgtccctgcgcccagaggcgtgccggccagcggcggggggcgcagtgcacacgagggggctggacttcgcctgtgacatctacatctgggcgcccttggccgggacttgtggggtccttctcctgtcactggttatcaccctttactgcaaacggggcagaaagaaactcctgtatatattcaaacaaccatttatgagaccagtacaaactactcaagaggaagatggctgtagctgccgatttccagaagaagaagaaggaggatgtgaactgagagtgaagttcagcaggagcgcagacgcccccgcgtaccagcagggccagaaccagctctataacgagctgaatctaggacgaagagaggagtacgatgttttggacaagagacgtggccgggaccctgagatggggggaaagccgagaaggaagaaccctcaggaaggcctgtacaatgaactgcagaaagataagatggcggaggcctacagtgagattgggatgaaaggcgagcgccggaggggcaaggggcacgatggcctttaccagggtctcagtacagccaccaaggacacctacgacgcccttcacatgcaggccctgccccctcgctga

SEQ ID NO: 6258 - DNA, 2982 bp, Artificial Sequence
  Synthetic Polynucloetide
atggccttaccagtgaccgccttgctcctgccgctggccttgctgctccacgccgccaggccggacatccagatgacacagagccctagcagcctgtctgccagcgtgggagacagagtgaccatcacatgcaaggccagcgaccacatcaacaactggctggcctggtatcagcagaagcctggacaggcccctaagctgctgatctacggcgctaccacactggaaacaggcgtgcccagcagattttctggcagcggctctggcaccgactacaccctgacaatatccagcctccagcctgaggacttcgccacctactactgtcagcagagctggaacaccccttggacattcggccagggcaccaagctggaaatcaagagactcgagatccagaaccctgatcctgccgtgtaccagctgcgggatagcaagagcagcgacaagagcgtgtgtctgttcaccgacttcgacagccagaccaacgtgtcccagagcaaggactccgacgtgtacatcaccgataagtgcgtgctggacatgcggagcatggacttcaagagcaactccgccgtggcctggtccaacaagtccgatttcgcctgcgccaacgccttcaacaacagcattatccccgaggacacattcttcccaagcagcgacgtgccctgcgacgtgaagctggtggaaaagagcttcgagacagacaccaacctgaacttccagaacctgagcgtgatcggcttcagaatcctgctgctgaaagtggccggctttaacctgctgatgaccctgcggctgtggtccagccgcgccaagagaagcggatctggcgtgaagcagaccctgaatttcgacctgctgaagctggctggcgacgtggaatccaacccaggccctactagtatggactggatttggcgcatccttttccttgtcggcgctgctaccggcgcccattccgggcccgaagtgcagctggttgaatctggcggaggactggttcaggctggcggatctctgagactgtcttgtgccgccagcggcagaacctttagcatgggctggtttagacaggcccctggcaaagagagagagttcgtcgccgccatcacatactctggcggcagcccttactacgccgactctgtgaagggcagattcaccatcagccgggacaacgccaagaacaccgtgtacctccagatgaacagcctgaagcctgaggacaccgccgtgtactactgcgccgccaatccaacatacggcagcgactggaacgccgagaattggggccagggaacccaagtgacagtgtctagcggatccggcggcggaggatctggcggaggcggatctgggggcggaggctctttcgaacaagttcagcttcaacagcctggcgctgagctggtcaaacctggcgcttctgtgaagatgagctgcaaagccagcggctacgccttcagcagctactggatcaactggatgaagcagaaacccggccagggactcgaatggatcggccaaatctatcccggcgacggcgacaccaactacaacggcaagttcaagggcagagccacactgaccgccgatacctctagcagcacagcctacatgcagctgagcagcctgaccagcgaagatagcgccgtgtacttctgtgcccggtccatcacaacagtcgtgggctgcgctatggactattggggccagggaacaagcgtgaccgtgtctagtacgcgtgaggacctgaagaacgtgttcccacctgaggtggccgtgttcgagcctagcaaggccgagatcgcccacacccagaaagccaccctcgtgtgcctggctaccggcttctaccccgaccatgtggaactgtcttggtgggtcaacggcaaagaggtgcacagcggcgtgtgtaccgacccccagccactgaaagaacagcccgccctgaacgacagccggtactgcctgagcagcagactgagagtgtccgccaccttctggcagaacccccggaaccacttcagatgccaggtgcagttctacggcctgagcgagaacgacgagtggacccaggacagagccaagcccgtgacccagatcgtgtctgccgaagcctggggcagagccgattgcggcatcaccagcgccagctaccaccagggcgtgctgagcgccaccatcctgtacgagatcctgctgggcaaggccaccctgtacgccgtgctggtgtctgccctggtgctgatggctatggtcaagcggaaggacagccggggaagggccaagcgatctggatctggagcaacaaacttctcactactcaaacaagcaggtgacgtggaggagaatcccgggccttctagaggccatatgaccgagtacaagcccacggtgcgcctcgccacccgcgacgacgtccccagggccgtacgcaccctcgccgccgcgttcgccgactaccccgccacgcgccacaccgtcgatccggaccgccacatcgagcgggtcaccgagctgcaagaactcttcctcacgcgcgtcgggctcgacatcggcaaggtgtgggtcgcggacgacggcgccgcggtggcggtctggaccacgccggagagcgtcgaagcgggggcggtgttcgccgagatcggcccgcgcatggccgagttgagcggttcccggctggccgcgcagcaacagatggaaggcctcctggcgccgcaccggcccaaggagcccgcgtggttcctggccaccgtcggcgtctcgcccgaccaccagggcaagggtctgggcagcgccgtcgtgctccccggagtggaggcggccgagcgcgccggggtgcccgccttcctggagacctccgcgccccgcaacctccccttctacgagcggctcggcttcaccgtcaccgccgacgtcgaggtgcccgaaggaccgcgcacctggtgcatgacccgcaagcccggtgcctga

SEQ ID NO: 6259 - DNA, 2979 bp, Artificial Sequence
  Synthetic Polynucloetide
atggccttaccagtgaccgccttgctcctgccgctggccttgctgctccacgccgccaggccggacatccagatgacacagagccctagcagcctgtctgccagcgtgggagacagagtgaccatcacatgcaaggccagcgaccacatcaacaactggctggcctggtatcagcagaagcctggacaggcccctaagctgctgatctacggcgctaccacactggaaacaggcgtgcccagcagattttctggcagcggctctggcaccgactacaccctgacaatatccagcctccagcctgaggacttcgccacctactactgtcagcagagctggaacaccccttggacattcggccagggcaccaagctggaaatcaagagactcgaggacctgaagaacgtgttcccacctgaggtggccgtgttcgagcctagcaaggccgagatcgcccacacccagaaagccaccctcgtgtgcctggctaccggcttctaccccgaccatgtggaactgtcttggtgggtcaacggcaaagaggtgcacagcggcgtgtgtaccgacccccagccactgaaagaacagcccgccctgaacgacagccggtactgcctgagcagcagactgagagtgtccgccaccttctggcagaacccccggaaccacttcagatgccaggtgcagttctacggcctgagcgagaacgacgagtggacccaggacagagccaagcccgtgacccagatcgtgtctgccgaagcctggggcagagccgattgcggcatcaccagcgccagctaccaccagggcgtgctgagcgccaccatcctgtacgagatcctgctgggcaaggccaccctgtacgccgtgctggtgtctgccctggtgctgatggctatggtcaagcggaaggacagccggggaagggccaagcgatctggatctggagcaacaaacttctcactactcaaacaagcaggtgacgtggaggagaatcccgggcctactagtatggactggatttggcgcatccttttccttgtcggcgctgctaccggcgcccattccgggcccgaagtgcagctggttgaatctggcggaggactggttcaggctggcggatctctgagactgtcttgtgccgccagcggcagaacctttagcatgggctggtttagacaggcccctggcaaagagagagagttcgtcgccgccatcacatactctggcggcagcccttactacgccgactctgtgaagggcagattcaccatcagccgggacaacgccaagaacaccgtgtacctccagatgaacagcctgaagcctgaggacaccgccgtgtactactgcgccgccaatccaacatacggcagcgactggaacgccgagaattggggccagggaacccaagtgacagtgtctagcggatccggcggcggaggatctggcggaggcggatctgggggcggaggctctttcgaacaagttcagcttcaacagcctggcgctgagctggtcaaacctggcgcttctgtgaagatgagctgcaaagccagcggctacgccttcagcagctactggatcaactggatgaagcagaaacccggccagggactcgaatggatcggccaaatctatcccggcgacggcgacaccaactacaacggcaagttcaagggcagagccacactgaccgccgatacctctagcagcacagcctacatgcagctgagcagcctgaccagcgaagatagcgccgtgtacttctgtgcccggtccatcacaacagtcgtgggctgcgctatggactattggggccagggaacaagcgtgaccgtgtctagtacgcgtatccagaaccctgatcctgccgtgtaccagctgcgggatagcaagagcagcgacaagagcgtgtgtctgttcaccgacttcgacagccagaccaacgtgtcccagagcaaggactccgacgtgtacatcaccgataagtgcgtgctggacatgcggagcatggacttcaagagcaactccgccgtggcctggtccaacaagtccgatttcgcctgcgccaacgccttcaacaacagcattatccccgaggacacattcttcccaagcagcgacgtgccctgcgacgtgaagctggtggaaaagagcttcgagacagacaccaacctgaacttccagaacctgagcgtgatcggcttcagaatcctgctgctgaaagtggccggctttaacctgctgatgaccctgcggctgtggtccagccgcgccaagagaagcggatctggcgtgaagcagaccctgaatttcgacctgctgaagctggctggcgacgtggaatccaacccaggcccttctagaggccatatgaccgagtacaagcccacggtgcgcctcgccacccgcgacgacgtccccagggccgtacgcaccctcgccgccgcgttcgccgactaccccgccacgcgccacaccgtcgatccggaccgccacatcgagcgggtcaccgagctgcaagaactcttcctcacgcgcgtcgggctcgacatcggcaaggtgtgggtcgcggacgacggcgccgcggtggcggtctggaccacgccggagagcgtcgaagcgggggcggtgttcgccgagatcggcccgcgcatggccgagttgagcggttcccggctggccgcgcagcaacagatggaaggcctcctggcgccgcaccggcccaaggagcccgcgtggttcctggccaccgtcggcgtctcgcccgaccaccagggcaagggtctgggcagcgccgtcgtgctccccggagtggaggcggccgagcgcgccggggtgcccgccttcctggagacctccgcgccccgcaacctccccttctacgagcggctcggcttcaccgtcaccgccgacgtcgaggtgcccgaaggaccgcgcacctggtgcatgacccgcaagcccggtgcctga

SEQ ID NO: 6260 - DNA, 2979 bp, Artificial Sequence
  Synthetic Polynucloetide
atggccttaccagtgaccgccttgctcctgccgctggccttgctgctccacgccgccaggccggacatccagatgacacagagccctagcagcctgtctgccagcgtgggagacagagtgaccatcacatgcaaggccagcgaccacatcaacaactggctggcctggtatcagcagaagcctggacaggcccctaagctgctgatctacggcgctaccacactggaaacaggcgtgcccagcagattttctggcagcggctctggcaccgactacaccctgacaatatccagcctccagcctgaggacttcgccacctactactgtcagcagagctggaacaccccttggacattcggccagggcaccaagctggaaatcaagagactcgaggacctgaagaacgtgttcccacctgaggtggccgtgttcgagcctagcgaggccgagatcagccacacccagaaagccaccctcgtgtgcctggctaccggcttctaccccgaccatgtggaactgtcttggtgggtcaacggcaaagaggtgcacagcggcgtgtgtaccgacccccagccactgaaagaacagcccgccctgaacgacagccggtactgcctgagcagcagactgagagtgtccgccaccttctggcagaacccccggaaccacttcagatgccaggtgcagttctacggcctgagcgagaacgacgagtggacccaggacagagccaagcccgtgacccagatcgtgtctgccgaagcctggggcagagccgattgcggctttaccagcgagagctaccagcagggcgtgctgagcgccaccatcctgtacgagatcctgctgggcaaggccaccctgtacgccgtgctggtgtctgccctggtgctgatggctatggtcaagcggaaggacagccggggaagggccaagcgatctggatctggagcaacaaacttctcactactcaaacaagcaggtgacgtggaggagaatcccgggcctactagtatggactggatttggcgcatccttttccttgtcggcgctgctaccggcgcccattccgggcccgaagtgcagctggttgaatctggcggaggactggttcaggctggcggatctctgagactgtcttgtgccgccagcggcagaacctttagcatgggctggtttagacaggcccctggcaaagagagagagttcgtcgccgccatcacatactctggcggcagcccttactacgccgactctgtgaagggcagattcaccatcagccgggacaacgccaagaacaccgtgtacctccagatgaacagcctgaagcctgaggacaccgccgtgtactactgcgccgccaatccaacatacggcagcgactggaacgccgagaattggggccagggaacccaagtgacagtgtctagcggatccggcggcggaggatctggcggaggcggatctgggggcggaggctctttcgaacaagttcagcttcaacagcctggcgctgagctggtcaaacctggcgcttctgtgaagatgagctgcaaagccagcggctacgccttcagcagctactggatcaactggatgaagcagaaacccggccagggactcgaatggatcggccaaatctatcccggcgacggcgacaccaactacaacggcaagttcaagggcagagccacactgaccgccgatacctctagcagcacagcctacatgcagctgagcagcctgaccagcgaagatagcgccgtgtacttctgtgcccggtccatcacaacagtcgtgggctgcgctatggactattggggccagggaacaagcgtgaccgtgtctagtacgcgtatccagaaccctgatcctgccgtgtaccagctgcgggatagcaagagcagcgacaagagcgtgtgtctgttcaccgacttcgacagccagaccaacgtgtcccagagcaaggactccgacgtgtacatcaccgataagtgcgtgctggacatgcggagcatggacttcaagagcaactccgccgtggcctggtccaacaagtccgatttcgcctgcgccaacgccttcaacaacagcattatccccgaggacacattcttcccaagccccgagagcagctgcgacgtgaagctggtggaaaagagcttcgagacagacaccaacctgaacttccagaacctgagcgtgatcggcttcagaatcctgctgctgaaagtggccggctttaacctgctgatgaccctgcggctgtggtccagccgcgccaagagaagcggatctggcgtgaagcagaccctgaatttcgacctgctgaagctggctggcgacgtggaatccaacccaggcccttctagaggccatatgaccgagtacaagcccacggtgcgcctcgccacccgcgacgacgtccccagggccgtacgcaccctcgccgccgcgttcgccgactaccccgccacgcgccacaccgtcgatccggaccgccacatcgagcgggtcaccgagctgcaagaactcttcctcacgcgcgtcgggctcgacatcggcaaggtgtgggtcgcggacgacggcgccgcggtggcggtctggaccacgccggagagcgtcgaagcgggggcggtgttcgccgagatcggcccgcgcatggccgagttgagcggttcccggctggccgcgcagcaacagatggaaggcctcctggcgccgcaccggcccaaggagcccgcgtggttcctggccaccgtcggcgtctcgcccgaccaccagggcaagggtctgggcagcgccgtcgtgctccccggagtggaggcggccgagcgcgccggggtgcccgccttcctggagacctccgcgccccgcaacctccccttctacgagcggctcggcttcaccgtcaccgccgacgtcgaggtgcccgaaggaccgcgcacctggtgcatgacccgcaagcccggtgcctga

SEQ ID NO: 6261 - DNA, 2277 bp, Artificial Sequence
  Synthetic Polynucloetide
atggccttaccagtgaccgccttgctcctgccgctggccttgctgctccacgccgccaggccggacatccagatgacacagagccctagcagcctgtctgccagcgtgggagacagagtgaccatcacatgcaaggccagcgaccacatcaacaactggctggcctggtatcagcagaagcctggacaggcccctaagctgctgatctacggcgctaccacactggaaacaggcgtgcccagcagattttctggcagcggctctggcaccgactacaccctgacaatatccagcctccagcctgaggacttcgccacctactactgtcagcagagctggaacaccccttggacattcggccagggcaccaagctggaaatcaagagactcgaggacctgaagaacgtgttcccacctgaggtggccgtgttcgagcctagcgaggccgagatcagccacacccagaaagccaccctcgtgtgcctggctaccggcttctaccccgaccatgtggaactgtcttggtgggtcaacggcaaagaggtgcacagcggcgtgtgtaccgacccccagccactgaaagaacagcccgccctgaacgacagccggtactgcctgagcagcagactgagagtgtccgccaccttctggcagaacccccggaaccacttcagatgccaggtgcagttctacggcctgagcgagaacgacgagtggacccaggacagagccaagcccgtgacccagatcgtgtctgccgaagcctggggcagagccgattgcggctttaccagcgagagctaccagcagggcgtgctgagcgccaccatcctgtacgagatcctgctgggcaaggccaccctgtacgccgtgctggtgtctgccctggtgctgatggctatggtcaagcggaaggacagccggggaagggccaagcgatctggatctggagcaacaaacttctcactactcaaacaagcaggtgacgtggaggagaatcccgggcctactagtatggactggatttggcgcatccttttccttgtcggcgctgctaccggcgcccattccgggcccgaagtgcagctggttgaatctggcggaggactggttcaggctggcggatctctgagactgtcttgtgccgccagcggcagaacctttagcatgggctggtttagacaggcccctggcaaagagagagagttcgtcgccgccatcacatactctggcggcagcccttactacgccgactctgtgaagggcagattcaccatcagccgggacaacgccaagaacaccgtgtacctccagatgaacagcctgaagcctgaggacaccgccgtgtactactgcgccgccaatccaacatacggcagcgactggaacgccgagaattggggccagggaacccaagtgacagtgtctagcggatccggcggcggaggatctggcggaggcggatctgggggcggaggctctttcgaacaagttcagcttcaacagcctggcgctgagctggtcaaacctggcgcttctgtgaagatgagctgcaaagccagcggctacgccttcagcagctactggatcaactggatgaagcagaaacccggccagggactcgaatggatcggccaaatctatcccggcgacggcgacaccaactacaacggcaagttcaagggcagagccacactgaccgccgatacctctagcagcacagcctacatgcagctgagcagcctgaccagcgaagatagcgccgtgtacttctgtgcccggtccatcacaacagtcgtgggctgcgctatggactattggggccagggaacaagcgtgaccgtgtctagtacgcgtatccagaaccctgatcctgccgtgtaccagctgcgggatagcaagagcagcgacaagagcgtgtgtctgttcaccgacttcgacagccagaccaacgtgtcccagagcaaggactccgacgtgtacatcaccgataagtgcgtgctggacatgcggagcatggacttcaagagcaactccgccgtggcctggtccaacaagtccgatttcgcctgcgccaacgccttcaacaacagcattatccccgaggacacattcttcccaagccccgagagcagctgcgacgtgaagctggtggaaaagagcttcgagacagacaccaacctgaacttccagaacctgagcgtgatcggcttcagaatcctgctgctgaaagtggccggctttaacctgctgatgaccctgcggctgtggtccagc

SEQ ID NO: 6262 - DNA, 2952 bp, Artificial Sequence
  Synthetic Polynucloetide
atggccttaccagtgaccgccttgctcctgccgctggccttgctgctccacgccgccaggccggacatccagatgacacagagccctagcagcctgtctgccagcgtgggagacagagtgaccatcacatgcaaggccagcgaccacatcaacaactggctggcctggtatcagcagaagcctggacaggcccctaagctgctgatctacggcgctaccacactggaaacaggcgtgcccagcagattttctggcagcggctctggcaccgactacaccctgacaatatccagcctccagcctgaggacttcgccacctactactgtcagcagagctggaacaccccttggacattcggccagggcaccaagctggaaatcaagagactcgaggacctgaagaacgtgttcccacctgaggtggccgtgttcgagcctagcgaggccgagatcagccacacccagaaagccaccctcgtgtgcctggctaccggcttctaccccgaccatgtggaactgtcttggtgggtcaacggcaaagaggtgcacagcggcgtgtgtaccgacccccagccactgaaagaacagcccgccctgaacgacagccggtactgcctgagcagcagactgagagtgtccgccaccttctggcagaacccccggaaccacttcagatgccaggtgcagttctacggcctgagcgagaacgacgagtggacccaggacagagccaagcccgtgacccagatcgtgtctgccgaagcctggggcagagccgattgcggctttaccagcgagagctaccagcagggcgtgctgagcgccaccatcctgtacgagatcctgctgggcaaggccaccctgtacgccgtgctggtgtctgccctggtgctgatggctatggtcaagcggaaggacagccggggaagggccaagcgatctggatctggagcaacaaacttctcactactcaaacaagcaggtgacgtggaggagaatcccgggcctactagtatggactggatttggcgcatccttttccttgtcggcgctgctaccggcgcccattccgggcccgaagtgcagctggttgaatctggcggaggactggttcaggctggcggatctctgagactgtcttgtgccgccagcggcagaacctttagcatgggctggtttagacaggcccctggcaaagagagagagttcgtcgccgccatcacatactctggcggcagcccttactacgccgactctgtgaagggcagattcaccatcagccgggacaacgccaagaacaccgtgtacctccagatgaacagcctgaagcctgaggacaccgccgtgtactactgcgccgccaatccaacatacggcagcgactggaacgccgagaattggggccagggaacccaagtgacagtgtctagcggatccggcggcggaggatctggcggaggcggatctgggggcggaggctctttcgaacaagttcagcttcaacagcctggcgctgagctggtcaaacctggcgcttctgtgaagatgagctgcaaagccagcggctacgccttcagcagctactggatcaactggatgaagcagaaacccggccagggactcgaatggatcggccaaatctatcccggcgacggcgacaccaactacaacggcaagttcaagggcagagccacactgaccgccgatacctctagcagcacagcctacatgcagctgagcagcctgaccagcgaagatagcgccgtgtacttctgtgcccggtccatcacaacagtcgtgggctgcgctatggactattggggccagggaacaagcgtgaccgtgtctagtacgcgtatccagaaccctgatcctgccgtgtaccagctgcgggatagcaagagcagcgacaagagcgtgtgtctgttcaccgacttcgacagccagaccaacgtgtcccagagcaaggactccgacgtgtacatcaccgataagtgcgtgctggacatgcggagcatggacttcaagagcaactccgccgtggcctggtccaacaagtccgatttcgcctgcgccaacgccttcaacaacagcattatccccgaggacacattcttcccaagccccgagagcagctgcgacgtgaagctggtggaaaagagcttcgagacagacaccaacctgaacttccagaacctgagcgtgatcggcttcagaatcctgctgctgaaagtggccggctttaacctgctgatgaccctgcggctgtggtccagccgcgccaagagaagcggatctggcgtgaagcagaccctgaatttcgacctgctgaagctggctggcgacgtggaatccaacccaggcccttctagaggcgggatccacaccatggctacctacgaggtgctgtgcgaggtggcaagaaagctgggcaccgacgacagagaagtggtgctgttcctgctgaacgtgttcatccctcagcctacactggcccagctgatcggtgcactgagagccctgaaagaggaaggccggctgacctttcctctgctggccgaatgcctgttcagagccggaagaagggatctgctgcgggacctgctgcatctggaccccagatttctggaaagacacctggccggcaccatgagctacttcagcccttaccagctgaccgtgctgcacgttgacggcgaactgtgcgccagagatattcggagcctgatcttcctgagcaaggacaccatcggcagccggtctacccctcagacatttctgcactgggtgtactgcatggaaaacctggacctgctcggccccacagatgtggatgccctgatgtccatgctgagaagcctgagcagagtggacctccagagacaggtgcagacactgatgggactgcacctgagcggacctagccacagccagcactacagacacacccct

SEQ ID NO: 6263 - DNA, 2289 bp, Artificial Sequence
  Synthetic Polynucloetide
atggccttaccagtgaccgccttgctcctgccgctggccttgctgctccacgccgccaggccggacatccagatgacacagagccctagcagcctgtctgccagcgtgggagacagagtgaccatcacatgcaaggccagcgaccacatcaacaactggctggcctggtatcagcagaagcctggacaggcccctaagctgctgatctacggcgctaccacactggaaacaggcgtgcccagcagattttctggcagcggctctggcaccgactacaccctgacaatatccagcctccagcctgaggacttcgccacctactactgtcagcagagctggaacaccccttggacattcggccagggcaccaagctggaaatcaagagactcgagatccagaaccctgatcctgccgtgtaccagctgcgggatagcaagagcagcgacaagagcgtgtgtctgttcaccgacttcgacagccagaccaacgtgtcccagagcaaggactccgacgtgtacatcaccgataagtgcgtgctggacatgcggagcatggacttcaagagcaactccgccgtggcctggtccaacaagtccgatttcgcctgcgccaacgccttcaacaacagcattatccccgaggacacattcttcccaagccccgagagcagctgcgacgtgaagctggtggaaaagagcttcgagacagacaccaacctgaacttccagaacctgagcgtgatcggcttcagaatcctgctgctgaaagtggccggctttaacctgctgatgaccctgcggctgtggtccagccgcgccaagagaagcggatctggcgtgaagcagaccctgaatttcgacctgctgaagctggctggcgacgtggaatccaacccaggccctactagtatggactggatttggcgcatccttttccttgtcggcgctgctaccggcgcccattccgggcccgaagtgcagctggttgaatctggcggaggactggttcaggctggcggatctctgagactgtcttgtgccgccagcggcagaacctttagcatgggctggtttagacaggcccctggcaaagagagagagttcgtcgccgccatcacatactctggcggcagcccttactacgccgactctgtgaagggcagattcaccatcagccgggacaacgccaagaacaccgtgtacctccagatgaacagcctgaagcctgaggacaccgccgtgtactactgcgccgccaatccaacatacggcagcgactggaacgccgagaattggggccagggaacccaagtgacagtgtctagcggatccggcggcggaggatctggcggaggcggatctgggggcggaggctctttcgaacaagttcagcttcaacagcctggcgctgagctggtcaaacctggcgcttctgtgaagatgagctgcaaagccagcggctacgccttcagcagctactggatcaactggatgaagcagaaacccggccagggactcgaatggatcggccaaatctatcccggcgacggcgacaccaactacaacggcaagttcaagggcagagccacactgaccgccgatacctctagcagcacagcctacatgcagctgagcagcctgaccagcgaagatagcgccgtgtacttctgtgcccggtccatcacaacagtcgtgggctgcgctatggactattggggccagggaacaagcgtgaccgtgtctagtacgcgtgaggacctgaagaacgtgttcccacctgaggtggccgtgttcgagcctagcgaggccgagatcagccacacccagaaagccaccctcgtgtgcctggctaccggcttctaccccgaccatgtggaactgtcttggtgggtcaacggcaaagaggtgcacagcggcgtgtgtaccgacccccagccactgaaagaacagcccgccctgaacgacagccggtactgcctgagcagcagactgagagtgtccgccaccttctggcagaacccccggaaccacttcagatgccaggtgcagttctacggcctgagcgagaacgacgagtggacccaggacagagccaagcccgtgacccagatcgtgtctgccgaagcctggggcagagccgattgcggctttaccagcgagagctaccagcagggcgtgctgagcgccaccatcctgtacgagatcctgctgggcaaggccaccctgtacgccgtgctggtgtctgccctggtgctgatggctatggtcaagcggaaggacagccgggga

SEQ ID NO: 6264 - DNA, 2955 bp, Artificial Sequence
  Synthetic Polynucloetide
atggccttaccagtgaccgccttgctcctgccgctggccttgctgctccacgccgccaggccggacatccagatgacacagagccctagcagcctgtctgccagcgtgggagacagagtgaccatcacatgcaaggccagcgaccacatcaacaactggctggcctggtatcagcagaagcctggacaggcccctaagctgctgatctacggcgctaccacactggaaacaggcgtgcccagcagattttctggcagcggctctggcaccgactacaccctgacaatatccagcctccagcctgaggacttcgccacctactactgtcagcagagctggaacaccccttggacattcggccagggcaccaagctggaaatcaagagactcgagatccagaaccctgatcctgccgtgtaccagctgcgggatagcaagagcagcgacaagagcgtgtgtctgttcaccgacttcgacagccagaccaacgtgtcccagagcaaggactccgacgtgtacatcaccgataagtgcgtgctggacatgcggagcatggacttcaagagcaactccgccgtggcctggtccaacaagtccgatttcgcctgcgccaacgccttcaacaacagcattatccccgaggacacattcttcccaagccccgagagcagctgcgacgtgaagctggtggaaaagagcttcgagacagacaccaacctgaacttccagaacctgagcgtgatcggcttcagaatcctgctgctgaaagtggccggctttaacctgctgatgaccctgcggctgtggtccagccgcgccaagagaagcggatctggcgtgaagcagaccctgaatttcgacctgctgaagctggctggcgacgtggaatccaacccaggccctactagtatggactggatttggcgcatccttttccttgtcggcgctgctaccggcgcccattccgggcccgaagtgcagctggttgaatctggcggaggactggttcaggctggcggatctctgagactgtcttgtgccgccagcggcagaacctttagcatgggctggtttagacaggcccctggcaaagagagagagttcgtcgccgccatcacatactctggcggcagcccttactacgccgactctgtgaagggcagattcaccatcagccgggacaacgccaagaacaccgtgtacctccagatgaacagcctgaagcctgaggacaccgccgtgtactactgcgccgccaatccaacatacggcagcgactggaacgccgagaattggggccagggaacccaagtgacagtgtctagcggatccggcggcggaggatctggcggaggcggatctgggggcggaggctctttcgaacaagttcagcttcaacagcctggcgctgagctggtcaaacctggcgcttctgtgaagatgagctgcaaagccagcggctacgccttcagcagctactggatcaactggatgaagcagaaacccggccagggactcgaatggatcggccaaatctatcccggcgacggcgacaccaactacaacggcaagttcaagggcagagccacactgaccgccgatacctctagcagcacagcctacatgcagctgagcagcctgaccagcgaagatagcgccgtgtacttctgtgcccggtccatcacaacagtcgtgggctgcgctatggactattggggccagggaacaagcgtgaccgtgtctagtacgcgtgaggacctgaagaacgtgttcccacctgaggtggccgtgttcgagcctagcgaggccgagatcagccacacccagaaagccaccctcgtgtgcctggctaccggcttctaccccgaccatgtggaactgtcttggtgggtcaacggcaaagaggtgcacagcggcgtgtgtaccgacccccagccactgaaagaacagcccgccctgaacgacagccggtactgcctgagcagcagactgagagtgtccgccaccttctggcagaacccccggaaccacttcagatgccaggtgcagttctacggcctgagcgagaacgacgagtggacccaggacagagccaagcccgtgacccagatcgtgtctgccgaagcctggggcagagccgattgcggctttaccagcgagagctaccagcagggcgtgctgagcgccaccatcctgtacgagatcctgctgggcaaggccaccctgtacgccgtgctggtgtctgccctggtgctgatggctatggtcaagcggaaggacagccggggaagggccaagcgatctggatctggagcaacaaacttctcactactcaaacaagcaggtgacgtggaggagaatcccgggccttctagaggcgggatccacaccatggctacctacgaggtgctgtgcgaggtggcaagaaagctgggcaccgacgacagagaagtggtgctgttcctgctgaacgtgttcatccctcagcctacactggcccagctgatcggtgcactgagagccctgaaagaggaaggccggctgacctttcctctgctggccgaatgcctgttcagagccggaagaagggatctgctgcgggacctgctgcatctggaccccagatttctggaaagacacctggccggcaccatgagctacttcagcccttaccagctgaccgtgctgcacgttgacggcgaactgtgcgccagagatattcggagcctgatcttcctgagcaaggacaccatcggcagccggtctacccctcagacatttctgcactgggtgtactgcatggaaaacctggacctgctcggccccacagatgtggatgccctgatgtccatgctgagaagcctgagcagagtggacctccagagacaggtgcagacactgatgggactgcacctgagcggacctagccacagccagcactacagacacacccct

SEQ ID NO: 6265 - DNA, 2979 bp, Artificial Sequence
  Synthetic Polynucloetide
atggccttaccagtgaccgccttgctcctgccgctggccttgctgctccacgccgccaggccggacatccagatgacacagagccctagcagcctgtctgccagcgtgggagacagagtgaccatcacatgcaaggccagcgaccacatcaacaactggctggcctggtatcagcagaagcctggacaggcccctaagctgctgatctacggcgctaccacactggaaacaggcgtgcccagcagattttctggcagcggctctggcaccgactacaccctgacaatatccagcctccagcctgaggacttcgccacctactactgtcagcagagctggaacaccccttggacattcggccagggcaccaagctggaaatcaagagactcgaggacctgaagaacgtgttcccacctgaggtggccgtgttcgagcctagcgaggccgagatcagccacacccagaaagccaccctcgtgtgcctggctaccggcttctaccccgaccatgtggaactgtcttggtgggtcaacggcaaagaggtgcacagcggcgtgtctaccgacccccagccactgaaagaacagcccgccctgaacgacagccggtactgcctgagcagcagactgagagtgtccgccaccttctggcagaacccccggaaccacttcagatgccaggtgcagttctacggcctgagcgagaacgacgagtggacccaggacagagccaagcccgtgacccagatcgtgtctgccgaagcctggggcagagccgattgcggctttaccagcgagagctaccagcagggcgtgctgagcgccaccatcctgtacgagatcctgctgggcaaggccaccctgtacgccgtgctggtgtctgccctggtgctgatggctatggtcaagcggaaggacagccggggaagggccaagcgatctggatctggagcaacaaacttctcactactcaaacaagcaggtgacgtggaggagaatcccgggcctactagtatggactggatttggcgcatccttttccttgtcggcgctgctaccggcgcccattccgggcccgaagtgcagctggttgaatctggcggaggactggttcaggctggcggatctctgagactgtcttgtgccgccagcggcagaacctttagcatgggctggtttagacaggcccctggcaaagagagagagttcgtcgccgccatcacatactctggcggcagcccttactacgccgactctgtgaagggcagattcaccatcagccgggacaacgccaagaacaccgtgtacctccagatgaacagcctgaagcctgaggacaccgccgtgtactactgcgccgccaatccaacatacggcagcgactggaacgccgagaattggggccagggaacccaagtgacagtgtctagcggatccggcggcggaggatctggcggaggcggatctgggggcggaggctctttcgaacaagttcagcttcaacagcctggcgctgagctggtcaaacctggcgcttctgtgaagatgagctgcaaagccagcggctacgccttcagcagctactggatcaactggatgaagcagaaacccggccagggactcgaatggatcggccaaatctatcccggcgacggcgacaccaactacaacggcaagttcaagggcagagccacactgaccgccgatacctctagcagcacagcctacatgcagctgagcagcctgaccagcgaagatagcgccgtgtacttctgtgcccggtccatcacaacagtcgtgggctgcgctatggactattggggccagggaacaagcgtgaccgtgtctagtacgcgtatccagaaccctgatcctgccgtgtaccagctgcgggatagcaagagcagcgacaagagcgtgtgtctgttcaccgacttcgacagccagaccaacgtgtcccagagcaaggactccgacgtgtacatcaccgataagaccgtgctggacatgcggagcatggacttcaagagcaactccgccgtggcctggtccaacaagtccgatttcgcctgcgccaacgccttcaacaacagcattatccccgaggacacattcttcccaagccccgagagcagctgcgacgtgaagctggtggaaaagagcttcgagacagacaccaacctgaacttccagaacctgagcgtgatcggcttcagaatcctgctgctgaaagtggccggctttaacctgctgatgaccctgcggctgtggtccagccgcgccaagagaagcggatctggcgtgaagcagaccctgaatttcgacctgctgaagctggctggcgacgtggaatccaacccaggcccttctagaggccatatgaccgagtacaagcccacggtgcgcctcgccacccgcgacgacgtccccagggccgtacgcaccctcgccgccgcgttcgccgactaccccgccacgcgccacaccgtcgatccggaccgccacatcgagcgggtcaccgagctgcaagaactcttcctcacgcgcgtcgggctcgacatcggcaaggtgtgggtcgcggacgacggcgccgcggtggcggtctggaccacgccggagagcgtcgaagcgggggcggtgttcgccgagatcggcccgcgcatggccgagttgagcggttcccggctggccgcgcagcaacagatggaaggcctcctggcgccgcaccggcccaaggagcccgcgtggttcctggccaccgtcggcgtctcgcccgaccaccagggcaagggtctgggcagcgccgtcgtgctccccggagtggaggcggccgagcgcgccggggtgcccgccttcctggagacctccgcgccccgcaacctccccttctacgagcggctcggcttcaccgtcaccgccgacgtcgaggtgcccgaaggaccgcgcacctggtgcatgacccgcaagcccggtgcctga

SEQ ID NO: 6266 - DNA, 3225 bp, Artificial Sequence
  Synthetic Polynucloetide
atggccttaccagtgaccgccttgctcctgccgctggccttgctgctccacgccgccaggccggacatccagatgacacagagccctagcagcctgtctgccagcgtgggagacagagtgaccatcacatgcaaggccagcgaccacatcaacaactggctggcctggtatcagcagaagcctggacaggcccctaagctgctgatctacggcgctaccacactggaaacaggcgtgcccagcagattttctggcagcggctctggcaccgactacaccctgacaatatccagcctccagcctgaggacttcgccacctactactgtcagcagagctggaacaccccttggacattcggccagggcaccaagctggaaatcaagagactcgaggacctgaagaacgtgttcccacctgaggtggccgtgttcgagcctagcgaggccgagatcagccacacccagaaagccaccctcgtgtgcctggctaccggcttctaccccgaccatgtggaactgtcttggtgggtcaacggcaaagaggtgcacagcggcgtgtctaccgacccccagccactgaaagaacagcccgccctgaacgacagccggtactgcctgagcagcagactgagagtgtccgccaccttctggcagaacccccggaaccacttcagatgccaggtgcagttctacggcctgagcgagaacgacgagtggacccaggacagagccaagcccgtgacccagatcgtgtctgccgaagcctggggcagagccgattgcggctttaccagcgagagctaccagcagggcgtgctgagcgccaccatcctgtacgagatcctgctgggcaaggccaccctgtacgccgtgctggtgtctgccctggtgctgatggctatggtcaagcggaaggacagccggggaagggccaagcgatctggatctggagcaacaaacttctcactactcaaacaagcaggtgacgtggaggagaatcccgggcctactagtatggactggatttggcgcatccttttccttgtcggcgctgctaccggcgcccattccgggcccgaagtgcagctggttgaatctggcggaggactggttcaggctggcggatctctgagactgtcttgtgccgccagcggcagaacctttagcatgggctggtttagacaggcccctggcaaagagagagagttcgtcgccgccatcacatactctggcggcagcccttactacgccgactctgtgaagggcagattcaccatcagccgggacaacgccaagaacaccgtgtacctccagatgaacagcctgaagcctgaggacaccgccgtgtactactgcgccgccaatccaacatacggcagcgactggaacgccgagaattggggccagggaacccaagtgacagtgtctagcggatccggcggcggaggatctggcggaggcggatctgggggcggaggctctttcgaacaagttcagcttcaacagcctggcgctgagctggtcaaacctggcgcttctgtgaagatgagctgcaaagccagcggctacgccttcagcagctactggatcaactggatgaagcagaaacccggccagggactcgaatggatcggccaaatctatcccggcgacggcgacaccaactacaacggcaagttcaagggcagagccacactgaccgccgatacctctagcagcacagcctacatgcagctgagcagcctgaccagcgaagatagcgccgtgtacttctgtgcccggtccatcacaacagtcgtgggctgcgctatggactattggggccagggaacaagcgtgaccgtgtctagtacgcgtgagcagaaactgatctcggaagaggatgggagcggcaccccattcccttctctggcccctcccatcatgctgctggtggacggcaagcagcagatggtggtcgtgtgcctggtgctggatgtggccccacctggactggacagccccatctggtttagcgccggcaatggctctgccctggacgcctttacctacggcccaagccctgccaccgatggcacctggacaaatctggcccacctgagcctgcccagcgaggaactggcttcttgggagcctctcgtgtgccacacaggacctggcgctgagggacacagcagatccacccagcctatgcacctgtctggcgaggccagcaccgccagaacctgtcctcaggaacctctgagaggcacccctggcggagcactgtggctgggagtgctgagactgctgctgttcaagctgctgctgtttgacctgctgctgacctgctcctgtctgtgcgatcctgccggccctctgccttctcctgccaccaccacaagactgagagccctgggcagccacagactgcaccctgccacagagacaggcggcagagaggccacaagcagccctagaccccagcccagagacagaagatggggcgataccccccctggcagaaagcctggatctccagtccgcgccaagagaagcggatctggcgtgaagcagaccctgaatttcgacctgctgaagctggctggcgacgtggaatccaacccaggcccttctagaggccatatgaccgagtacaagcccacggtgcgcctcgccacccgcgacgacgtccccagggccgtacgcaccctcgccgccgcgttcgccgactaccccgccacgcgccacaccgtcgatccggaccgccacatcgagcgggtcaccgagctgcaagaactcttcctcacgcgcgtcgggctcgacatcggcaaggtgtgggtcgcggacgacggcgccgcggtggcggtctggaccacgccggagagcgtcgaagcgggggcggtgttcgccgagatcggcccgcgcatggccgagttgagcggttcccggctggccgcgcagcaacagatggaaggcctcctggcgccgcaccggcccaaggagcccgcgtggttcctggccaccgtcggcgtctcgcccgaccaccagggcaagggtctgggcagcgccgtcgtgctccccggagtggaggcggccgagcgcgccggggtgcccgccttcctggagacctccgcgccccgcaacctccccttctacgagcggctcggcttcaccgtcaccgccgacgtcgaggtgcccgaaggaccgcgcacctggtgcatgacccgcaagcccggtgcctga

SEQ ID NO: 6267 - DNA, 3090 bp, Artificial Sequence
  Synthetic Polynucloetide
atggccttaccagtgaccgccttgctcctgccgctggccttgctgctccacgccgccaggccggacatccagatgacacagagccctagcagcctgtctgccagcgtgggagacagagtgaccatcacatgcaaggccagcgaccacatcaacaactggctggcctggtatcagcagaagcctggacaggcccctaagctgctgatctacggcgctaccacactggaaacaggcgtgcccagcagattttctggcagcggctctggcaccgactacaccctgacaatatccagcctccagcctgaggacttcgccacctactactgtcagcagagctggaacaccccttggacattcggccagggcaccaagctggaaatcaagagactcgaggggaaaccaattcccaaccctcttctgggactggattcaaccggcagcggcgacaagcagctggacgccgacgtgtcccccaagcctaccatcttcctgccctctatcgccgagacaaagctccagaaggccggcacctacctgtgcctgctggaaaagttcttcccagatgtgattaagatccactggcaggaaaagaagtccaacaccatcctgggcagccaggaaggcaacaccatgaagaccaacgacacctacatgaagttcagctggctgaccgtgcccgagaagtccctggacaaagaacacagatgcatcgtgcggcacgaaaacaacaagaacggcgtggaccaggaaatcatcttcccacccatcaagaccgatgtgattacaatggaccccaaggacaactgctccaaggacgccaacgataccctgctgctccagctgaccaacaccagcgcctactacatgtacttgttgctgctgctgaagtccgtggtgtacttcgccatcatcacatgctgcctgctgcggagaaccgccttctgctgcaacggcgagaagtctagggccaagcgatctggatctggagcaacaaacttctcactactcaaacaagcaggtgacgtggaggagaatcccgggcctactagtatggactggatttggcgcatccttttccttgtcggcgctgctaccggcgcccattccgggcccgaagtgcagctggttgaatctggcggaggactggttcaggctggcggatctctgagactgtcttgtgccgccagcggcagaacctttagcatgggctggtttagacaggcccctggcaaagagagagagttcgtcgccgccatcacatactctggcggcagcccttactacgccgactctgtgaagggcagattcaccatcagccgggacaacgccaagaacaccgtgtacctccagatgaacagcctgaagcctgaggacaccgccgtgtactactgcgccgccaatccaacatacggcagcgactggaacgccgagaattggggccagggaacccaagtgacagtgtctagcggatccggcggcggaggatctggcggaggcggatctgggggcggaggctctttcgaacaagttcagcttcaacagcctggcgctgagctggtcaaacctggcgcttctgtgaagatgagctgcaaagccagcggctacgccttcagcagctactggatcaactggatgaagcagaaacccggccagggactcgaatggatcggccaaatctatcccggcgacggcgacaccaactacaacggcaagttcaagggcagagccacactgaccgccgatacctctagcagcacagcctacatgcagctgagcagcctgaccagcgaagatagcgccgtgtacttctgtgcccggtccatcacaacagtcgtgggctgcgctatggactattggggccagggaacaagcgtgaccgtgtctagtacgcgtgagcagaaactgatctcggaagaggatgggagcggcagccagcctcacaccaagcccagcgtgttcgtgatgaagaacggcaccaacgtggcctgcctcgtgaaagagttctaccccaaggacatcaggatcaacctggtgtccagcaagaagatcaccgagttcgaccccgccatcgtgatctcccccagcggcaagtacaacgccgtgaagctggggaagtacgaggacagcaacagcgtgacctgctccgtgcagcacgacaacaagaccgtgcacagcaccgactttgaagtgaaaaccgactccaccgaccacgtgaagcccaaagagacagagaacaccaagcagcccagcaagagctgccacaagcccaaggccatcgtgcacaccgagaaagtgaacatgatgagcctgaccgtgctgggcctgcggatgctgttcgccaaaaccgtggccgtgaacttcctgctgaccgccaagctgttcttcctccgcgccaagagaagcggatctggcgtgaagcagaccctgaatttcgacctgctgaagctggctggcgacgtggaatccaacccaggcccttctagaggccatatgaccgagtacaagcccacggtgcgcctcgccacccgcgacgacgtccccagggccgtacgcaccctcgccgccgcgttcgccgactaccccgccacgcgccacaccgtcgatccggaccgccacatcgagcgggtcaccgagctgcaagaactcttcctcacgcgcgtcgggctcgacatcggcaaggtgtgggtcgcggacgacggcgccgcggtggcggtctggaccacgccggagagcgtcgaagcgggggcggtgttcgccgagatcggcccgcgcatggccgagttgagcggttcccggctggccgcgcagcaacagatggaaggcctcctggcgccgcaccggcccaaggagcccgcgtggttcctggccaccgtcggcgtctcgcccgaccaccagggcaagggtctgggcagcgccgtcgtgctccccggagtggaggcggccgagcgcgccggggtgcccgccttcctggagacctccgcgccccgcaacctccccttctacgagcggctcggcttcaccgtcaccgccgacgtcgaggtgcccgaaggaccgcgcacctggtgcatgacccgcaagcccggtgcctga

SEQ ID NO: 6268 - DNA, 2301 bp, Artificial Sequence
  Synthetic Polynucloetide
atggccttaccagtgaccgccttgctcctgccgctggccttgctgctccacgccgccaggccggacatccagatgacacagagccctagcagcctgtctgccagcgtgggagacagagtgaccatcacatgcaaggccagcgaccacatcaacaactggctggcctggtatcagcagaagcctggacaggcccctaagctgctgatctacggcgctaccacactggaaacaggcgtgcccagcagattttctggcagcggctctggcaccgactacaccctgacaatatccagcctccagcctgaggacttcgccacctactactgtcagcagagctggaacaccccttggacattcggccagggcaccaagctggaaatcaagagactcgagagccagcctcacaccaagcccagcgtgttcgtgatgaagaacggcaccaacgtggcctgcctcgtgaaagagttctaccccaaggacatcaggatcaacctggtgtccagcaagaagatcaccgagttcgaccccgccatcgtgatctcccccagcggcaagtacaacgccgtgaagctggggaagtacgaggacagcaacagcgtgacctgctccgtgcagcacgacaacaagaccgtgcacagcaccgactttgaagtgaaaaccgactccaccgaccacgtgaagcccaaagagacagagaacaccaagcagcccagcaagagctgccacaagcccaaggccatcgtgcacaccgagaaagtgaacatgatgagcctgaccgtgctgggcctgcggatgctgttcgccaaaaccgtggccgtgaacttcctgctgaccgccaagctgttcttcctcagggccaagcgatctggatctggagcaacaaacttctcactactcaaacaagcaggtgacgtggaggagaatcccgggcctactagtatggactggatttggcgcatccttttccttgtcggcgctgctaccggcgcccattccgggcccgaagtgcagctggttgaatctggcggaggactggttcaggctggcggatctctgagactgtcttgtgccgccagcggcagaacctttagcatgggctggtttagacaggcccctggcaaagagagagagttcgtcgccgccatcacatactctggcggcagcccttactacgccgactctgtgaagggcagattcaccatcagccgggacaacgccaagaacaccgtgtacctccagatgaacagcctgaagcctgaggacaccgccgtgtactactgcgccgccaatccaacatacggcagcgactggaacgccgagaattggggccagggaacccaagtgacagtgtctagcggatccggcggcggaggatctggcggaggcggatctgggggcggaggctctttcgaacaagttcagcttcaacagcctggcgctgagctggtcaaacctggcgcttctgtgaagatgagctgcaaagccagcggctacgccttcagcagctactggatcaactggatgaagcagaaacccggccagggactcgaatggatcggccaaatctatcccggcgacggcgacaccaactacaacggcaagttcaagggcagagccacactgaccgccgatacctctagcagcacagcctacatgcagctgagcagcctgaccagcgaagatagcgccgtgtacttctgtgcccggtccatcacaacagtcgtgggctgcgctatggactattggggccagggaacaagcgtgaccgtgtctagtacgcgtgacaagcagctggacgccgacgtgtcccccaagcctaccatcttcctgccctctatcgccgagacaaagctccagaaggccggcacctacctgtgcctgctggaaaagttcttcccagatgtgattaagatccactggcaggaaaagaagtccaacaccatcctgggcagccaggaaggcaacaccatgaagaccaacgacacctacatgaagttcagctggctgaccgtgcccgagaagtccctggacaaagaacacagatgcatcgtgcggcacgaaaacaacaagaacggcgtggaccaggaaatcatcttcccacccatcaagaccgatgtgattacaatggaccccaaggacaactgctccaaggacgccaacgataccctgctgctccagctgaccaacaccagcgcctactacatgtacttgttgctgctgctgaagtccgtggtgtacttcgccatcatcacatgctgcctgctgcggagaaccgccttctgctgcaacggcgagaagtct

SEQ ID NO: 6269 - DNA, 3510 bp, Artificial Sequence
  Synthetic Polynucloetide
atggccttaccagtgaccgccttgctcctgccgctggccttgctgctccacgccgccaggccggacatccagatgacacagagccctagcagcctgtctgccagcgtgggagacagagtgaccatcacatgcaaggccagcgaccacatcaacaactggctggcctggtatcagcagaagcctggacaggcccctaagctgctgatctacggcgctaccacactggaaacaggcgtgcccagcagattttctggcagcggctctggcaccgactacaccctgacaatatccagcctccagcctgaggacttcgccacctactactgtcagcagagctggaacaccccttggacattcggccagggcaccaagctggaaatcaagagaggacagcctaaggccaatcctaccgtgacactgttccctccaagcagcgaagaactccaggccaacaaggccacacttgtgtgcctgatctccgacttctaccctggggctgtgacagtggcttggaaggccgatggatctcctgtgaaagccggcgtggaaaccaccaagccatccaagcagagcaacaacaaatacgccgccagctcctacctgagcctgacacctgagcagtggaagtcccacagatcctacagctgccaagtgacccacgaaggcagcaccgtggaaaagacagtggcccctacagagtgcagcggatcccagagcttcggcctgctggaccccaagctgtgctacctgctggatggcatcctgttcatctacggcgtgatcctgaccgccctgttcctgagagtgaagttcagcagaagcgccgacgcccctgcctaccagcagggacagaaccaactgtacaacgagctgaacctgggcagacgggaagagtacgacgtgctggacaagcggagaggcagggaccctgagatgggcggaaagccccagcggagaaagaacccccaggaaggactgtataacgaactccagaaagacaagatggccgaagcctacagcgagatcggcatgaagggcgagcggagaagaggcaagggccacgatggcctgtaccagggcctgagcaccgccaccaaggacacctatgacgccctgcacatgcaggccctgcctccaagaagggccaagcgatctggatctggagcaacaaacttctcactactcaaacaagcaggtgacgtggaggagaatcccgggcctactagtatggactggatttggcgcatccttttccttgtcggcgctgctaccggcgcccattccgggcccgaagtgcagctggttgaatctggcggaggactggttcaggctggcggatctctgagactgtcttgtgccgccagcggcagaacctttagcatgggctggtttagacaggcccctggcaaagagagagagttcgtcgccgccatcacatactctggcggcagcccttactacgccgactctgtgaagggcagattcaccatcagccgggacaacgccaagaacaccgtgtacctccagatgaacagcctgaagcctgaggacaccgccgtgtactactgcgccgccaatccaacatacggcagcgactggaacgccgagaattggggccagggaacccaagtgacagtgtctagcggatccggcggcggaggatctggcggaggcggatctgggggcggaggctctttcgaacaagttcagcttcaacagcctggcgctgagctggtcaaacctggcgcttctgtgaagatgagctgcaaagccagcggctacgccttcagcagctactggatcaactggatgaagcagaaacccggccagggactcgaatggatcggccaaatctatcccggcgacggcgacaccaactacaacggcaagttcaagggcagagccacactgaccgccgatacctctagcagcacagcctacatgcagctgagcagcctgaccagcgaagatagcgccgtgtacttctgtgcccggtccatcacaacagtcgtgggctgcgctatggactattggggccagggaacaagcgtgaccgtgtctagtgcctctacaaagggaccctccgtgtttcctctggctcccagcagcaagtctacaagcggaggaacagccgctctgggctgcctggtcaaggattactttcccgagcctgtgaccgtgtcctggaatagcggagcactgacaagcggcgtgcacacctttccagccgtgctgcaaagcagcggcctgtactctctgagcagcgtggtcacagtgcctagctctagcctgggcacccagacctacatctgcaatgtgaaccacaagcctagcaacaccaaggtggacaagagagtggaacccaagagctgtggtacccagagttttgggttgttggaccctaaattgtgctatctgttggacggaatcctgttcatttacggagtgatcctgaccgcattgttcctgcgggttaagttttccagatccgcagacgcacccgcttaccaacaagggcagaaccaactctacaatgaacttaatttggggcggagggaagagtacgacgttctggacaaaaggaggggacgagatcccgagatgggcggaaagcctcagcgaaggaagaatccgcaagaggggctttataacgaactccagaaagataaaatggcagaagcctatagtgagattgggatgaagggagaaaggaggaggggtaaaggtcacgatgggttgtaccaaggattgagcacagccactaaagatacctatgatgcgctccacatgcaggccctgccgccaagacgcgccaagagaagcggatctggcgtgaagcagaccctgaatttcgacctgctgaagctggctggcgacgtggaatccaacccaggcccttctagaggccatatgaccgagtacaagcccacggtgcgcctcgccacccgcgacgacgtccccagggccgtacgcaccctcgccgccgcgttcgccgactaccccgccacgcgccacaccgtcgatccggaccgccacatcgagcgggtcaccgagctgcaagaactcttcctcacgcgcgtcgggctcgacatcggcaaggtgtgggtcgcggacgacggcgccgcggtggcggtctggaccacgccggagagcgtcgaagcgggggcggtgttcgccgagatcggcccgcgcatggccgagttgagcggttcccggctggccgcgcagcaacagatggaaggcctcctggcgccgcaccggcccaaggagcccgcgtggttcctggccaccgtcggcgtctcgcccgaccaccagggcaagggtctgggcagcgccgtcgtgctccccggagtggaggcggccgagcgcgccggggtgcccgccttcctggagacctccgcgccccgcaacctccccttctacgagcggctcggcttcaccgtcaccgccgacgtcgaggtgcccgaaggaccgcgcacctggtgcatgacccgcaagcccggtgcctga

SEQ ID NO: 6270 - DNA, 2865 bp, Artificial Sequence
  Synthetic Polynucloetide
atggccttaccagtgaccgccttgctcctgccgctggccttgctgctccacgccgccaggccggacatccagatgacacagagccctagcagcctgtctgccagcgtgggagacagagtgaccatcacatgcaaggccagcgaccacatcaacaactggctggcctggtatcagcagaagcctggacaggcccctaagctgctgatctacggcgctaccacactggaaacaggcgtgcccagcagattttctggcagcggctctggcaccgactacaccctgacaatatccagcctccagcctgaggacttcgccacctactactgtcagcagagctggaacaccccttggacattcggccagggcaccaagctggaaatcaagagactcgaggacctgaagaacgtgttcccacctgaggtggccgtgttcgagcctagcgaggccgagatcagccacacccagaaagccaccctcgtgtgcctggctaccggcttctaccccgaccatgtggaactgtcttggtgggtcaacggcaaagaggtgcacagcggcgtgtctaccgacccccagccactgaaagaacagcccgccctgaacgacagccggtactgcctgagcagcagactgagagtgtccgccaccttctggcagaacccccggaaccacttcagatgccaggtgcagttctacggcctgagcgagaacgacgagtggacccaggacagagccaagcccgtgacccagatcgtgtctgccgaagcctggggcagagccgattgcggatcccagagcttcggcctgctggaccccaagctgtgctacctgctggatggcatcctgttcatctacggcgtgatcctgaccgccctgttcctgagagtgaagttcagcagaagcgccgacgcccctgcctaccagcagggacagaaccaactgtacaacgagctgaacctgggcagacgggaagagtacgacgtgctggacaagcggagaggcagggaccctgagatgggcggaaagccccagcggagaaagaacccccaggaaggactgtataacgaactccagaaagacaagatggccgaagcctacagcgagatcggcatgaagggcgagcggagaagaggcaagggccacgatggcctgtaccagggcctgagcaccgccaccaaggacacctatgacgccctgcacatgcaggccctgcctccaagaagggccaagcgatctggatctggagcaacaaacttctcactactcaaacaagcaggtgacgtggaggagaatcccgggcctactagtatggactggatttggcgcatccttttccttgtcggcgctgctaccggcgcccattccgggcccgaagtgcagctggttgaatctggcggaggactggttcaggctggcggatctctgagactgtcttgtgccgccagcggcagaacctttagcatgggctggtttagacaggcccctggcaaagagagagagttcgtcgccgccatcacatactctggcggcagcccttactacgccgactctgtgaagggcagattcaccatcagccgggacaacgccaagaacaccgtgtacctccagatgaacagcctgaagcctgaggacaccgccgtgtactactgcgccgccaatccaacatacggcagcgactggaacgccgagaattggggccagggaacccaagtgacagtgtctagcggatccggcggcggaggatctggcggaggcggatctgggggcggaggctctttcgaacaagttcagcttcaacagcctggcgctgagctggtcaaacctggcgcttctgtgaagatgagctgcaaagccagcggctacgccttcagcagctactggatcaactggatgaagcagaaacccggccagggactcgaatggatcggccaaatctatcccggcgacggcgacaccaactacaacggcaagttcaagggcagagccacactgaccgccgatacctctagcagcacagcctacatgcagctgagcagcctgaccagcgaagatagcgccgtgtacttctgtgcccggtccatcacaacagtcgtgggctgcgctatggactattggggccagggaacaagcgtgaccgtgtctagtacgcgtatccagaaccctgatcctgccgtgtaccagctgcgggatagcaagagcagcgacaagagcgtgtgtctgttcaccgacttcgacagccagaccaacgtgtcccagagcaaggactccgacgtgtacatcaccgataagaccgtgctggacatgcggagcatggacttcaagagcaactccgccgtggcctggtccaacaagtccgatttcgcctgcgccaacgccttcaacaacagcattatccccgaggacacattcttcccaagccccgagagcagctgcggtacccagagttttgggttgttggaccctaaattgtgctatctgttggacggaatcctgttcatttacggagtgatcctgaccgcattgttcctgcgggttaagttttccagatccgcagacgcacccgcttaccaacaagggcagaaccaactctacaatgaacttaatttggggcggagggaagagtacgacgttctggacaaaaggaggggacgagatcccgagatgggcggaaagcctcagcgaaggaagaatccgcaagaggggctttataacgaactccagaaagataaaatggcagaagcctatagtgagattgggatgaagggagaaaggaggaggggtaaaggtcacgatgggttgtaccaaggattgagcacagccactaaagatacctatgatgcgctccacatgcaggccctgccgccaaga

SEQ ID NO: 6271 - DNA, 2865 bp, Artificial Sequence
  Synthetic Polynucloetide
atggccttaccagtgaccgccttgctcctgccgctggccttgctgctccacgccgccaggccggacatccagatgacacagagccctagcagcctgtctgccagcgtgggagacagagtgaccatcacatgcaaggccagcgaccacatcaacaactggctggcctggtatcagcagaagcctggacaggcccctaagctgctgatctacggcgctaccacactggaaacaggcgtgcccagcagattttctggcagcggctctggcaccgactacaccctgacaatatccagcctccagcctgaggacttcgccacctactactgtcagcagagctggaacaccccttggacattcggccagggcaccaagctggaaatcaagagactcgaggacctgaagaacgtgttcccacctgaggtggccgtgttcgagcctagcaaggccgagatcgcccacacccagaaagccaccctcgtgtgcctggctaccggcttctaccccgaccatgtggaactgtcttggtgggtcaacggcaaagaggtgcacagcggcgtgtgtaccgacccccagccactgaaagaacagcccgccctgaacgacagccggtactgcctgagcagcagactgagagtgtccgccaccttctggcagaacccccggaaccacttcagatgccaggtgcagttctacggcctgagcgagaacgacgagtggacccaggacagagccaagcccgtgacccagatcgtgtctgccgaagcctggggcagagccgattgcggatcccagagcttcggcctgctggaccccaagctgtgctacctgctggatggcatcctgttcatctacggcgtgatcctgaccgccctgttcctgagagtgaagttcagcagaagcgccgacgcccctgcctaccagcagggacagaaccaactgtacaacgagctgaacctgggcagacgggaagagtacgacgtgctggacaagcggagaggcagggaccctgagatgggcggaaagccccagcggagaaagaacccccaggaaggactgtataacgaactccagaaagacaagatggccgaagcctacagcgagatcggcatgaagggcgagcggagaagaggcaagggccacgatggcctgtaccagggcctgagcaccgccaccaaggacacctatgacgccctgcacatgcaggccctgcctccaagaagggccaagcgatctggatctggagcaacaaacttctcactactcaaacaagcaggtgacgtggaggagaatcccgggcctactagtatggactggatttggcgcatccttttccttgtcggcgctgctaccggcgcccattccgggcccgaagtgcagctggttgaatctggcggaggactggttcaggctggcggatctctgagactgtcttgtgccgccagcggcagaacctttagcatgggctggtttagacaggcccctggcaaagagagagagttcgtcgccgccatcacatactctggcggcagcccttactacgccgactctgtgaagggcagattcaccatcagccgggacaacgccaagaacaccgtgtacctccagatgaacagcctgaagcctgaggacaccgccgtgtactactgcgccgccaatccaacatacggcagcgactggaacgccgagaattggggccagggaacccaagtgacagtgtctagcggatccggcggcggaggatctggcggaggcggatctgggggcggaggctctttcgaacaagttcagcttcaacagcctggcgctgagctggtcaaacctggcgcttctgtgaagatgagctgcaaagccagcggctacgccttcagcagctactggatcaactggatgaagcagaaacccggccagggactcgaatggatcggccaaatctatcccggcgacggcgacaccaactacaacggcaagttcaagggcagagccacactgaccgccgatacctctagcagcacagcctacatgcagctgagcagcctgaccagcgaagatagcgccgtgtacttctgtgcccggtccatcacaacagtcgtgggctgcgctatggactattggggccagggaacaagcgtgaccgtgtctagtacgcgtatccagaaccctgatcctgccgtgtaccagctgcgggatagcaagagcagcgacaagagcgtgtgtctgttcaccgacttcgacagccagaccaacgtgtcccagagcaaggactccgacgtgtacatcaccgataagtgcgtgctggacatgcggagcatggacttcaagagcaactccgccgtggcctggtccaacaagtccgatttcgcctgcgccaacgccttcaacaacagcattatccccgaggacacattcttcccaagcagcgacgtgccctgcggtacccagagttttgggttgttggaccctaaattgtgctatctgttggacggaatcctgttcatttacggagtgatcctgaccgcattgttcctgcgggttaagttttccagatccgcagacgcacccgcttaccaacaagggcagaaccaactctacaatgaacttaatttggggcggagggaagagtacgacgttctggacaaaaggaggggacgagatcccgagatgggcggaaagcctcagcgaaggaagaatccgcaagaggggctttataacgaactccagaaagataaaatggcagaagcctatagtgagattgggatgaagggagaaaggaggaggggtaaaggtcacgatgggttgtaccaaggattgagcacagccactaaagatacctatgatgcgctccacatgcaggccctgccgccaaga

SEQ ID NO: 6272 - DNA, 3078 bp, Artificial Sequence
  Synthetic Polynucloetide
atggccttaccagtgaccgccttgctcctgccgctggccttgctgctccacgccgccaggccggacatccagatgacacagagccctagcagcctgtctgccagcgtgggagacagagtgaccatcacatgcaaggccagcgaccacatcaacaactggctggcctggtatcagcagaagcctggacaggcccctaagctgctgatctacggcgctaccacactggaaacaggcgtgcccagcagattttctggcagcggctctggcaccgactacaccctgacaatatccagcctccagcctgaggacttcgccacctactactgtcagcagagctggaacaccccttggacattcggccagggcaccaagctggaaatcaagagactcgaggggaaaccaattcccaaccctcttctgggactggattcaaccggcagcggcgaggacctgaagaacgtgttcccacctgaggtggccgtgttcgagcctagcgaggccgagatcagccacacccagaaagccaccctcgtgtgcctggctaccggcttctaccccgaccatgtggaactgtcttggtgggtcaacggcaaagaggtgcacagcggcgtgtctaccgacccccagccactgaaagaacagcccgccctgaacgacagccggtactgcctgagcagcagactgagagtgtccgccaccttctggcagaacccccggaaccacttcagatgccaggtgcagttctacggcctgagcgagaacgacgagtggacccaggacagagccaagcccgtgacccagatcgtgtctgccgaagcctggggcagagccgattgcggatcccagagcttcggcctgctggaccccaagctgtgctacctgctggatggcatcctgttcatctacggcgtgatcctgaccgccctgttcctgagagtgaagttcagcagaagcgccgacgcccctgcctaccagcagggacagaaccaactgtacaacgagctgaacctgggcagacgggaagagtacgacgtgctggacaagcggagaggcagggaccctgagatgggcggaaagccccagcggagaaagaacccccaggaaggactgtataacgaactccagaaagacaagatggccgaagcctacagcgagatcggcatgaagggcgagcggagaagaggcaagggccacgatggcctgtaccagggcctgagcaccgccaccaaggacacctatgacgccctgcacatgcaggccctgcctccaagaagggccaagcgatctggatctggagcaacaaacttctcactactcaaacaagcaggtgacgtggaggagaatcccgggcctactagtatggactggatttggcgcatccttttccttgtcggcgctgctaccggcgcccattccgggcccgaagtgcagctggttgaatctggcggaggactggttcaggctggcggatctctgagactgtcttgtgccgccagcggcagaacctttagcatgggctggtttagacaggcccctggcaaagagagagagttcgtcgccgccatcacatactctggcggcagcccttactacgccgactctgtgaagggcagattcaccatcagccgggacaacgccaagaacaccgtgtacctccagatgaacagcctgaagcctgaggacaccgccgtgtactactgcgccgccaatccaacatacggcagcgactggaacgccgagaattggggccagggaacccaagtgacagtgtctagcggatccggcggcggaggatctggcggaggcggatctgggggcggaggctctttcgaacaagttcagcttcaacagcctggcgctgagctggtcaaacctggcgcttctgtgaagatgagctgcaaagccagcggctacgccttcagcagctactggatcaactggatgaagcagaaacccggccagggactcgaatggatcggccaaatctatcccggcgacggcgacaccaactacaacggcaagttcaagggcagagccacactgaccgccgatacctctagcagcacagcctacatgcagctgagcagcctgaccagcgaagatagcgccgtgtacttctgtgcccggtccatcacaacagtcgtgggctgcgctatggactattggggccagggaacaagcgtgaccgtgtctagtacgcgtgagcagaaactgatctcggaagaggatgggagcggcatccagaaccctgatcctgccgtgtaccagctgcgggatagcaagagcagcgacaagagcgtgtgtctgttcaccgacttcgacagccagaccaacgtgtcccagagcaaggactccgacgtgtacatcaccgataagaccgtgctggacatgcggagcatggacttcaagagcaactccgccgtggcctggtccaacaagtccgatttcgcctgcgccaacgccttcaacaacagcattatccccgaggacacattcttcccaagccccgagagcagctgcggtacccagagttttgggttgttggaccctaaattgtgctatctgttggacggaatcctgttcatttacggagtgatcctgaccgcattgttcctgaggagcaagcggtcacggctgctccacagcgattacatgaatatgacaccacgaagaccgggtcctactcgcaaacactaccaaccctacgcacctccccgcgactttgcagcgtaccgatctcgggttaagttttccagatccgcagacgcacccgcttaccaacaagggcagaaccaactctacaatgaacttaatttggggcggagggaagagtacgacgttctggacaaaaggaggggacgagatcccgagatgggcggaaagcctcagcgaaggaagaatccgcaagaggggctttataacgaactccagaaagataaaatggcagaagcctatagtgagattgggatgaagggagaaaggaggaggggtaaaggtcacgatgggttgtaccaaggattgagcacagccactaaagatacctatgatgcgctccacatgcaggccctgccgccaaga

SEQ ID NO: 6273 - DNA, 3201 bp, Artificial Sequence
  Synthetic Polynucloetide
atggccttaccagtgaccgccttgctcctgccgctggccttgctgctccacgccgccaggccggacatccagatgacacagagccctagcagcctgtctgccagcgtgggagacagagtgaccatcacatgcaaggccagcgaccacatcaacaactggctggcctggtatcagcagaagcctggacaggcccctaagctgctgatctacggcgctaccacactggaaacaggcgtgcccagcagattttctggcagcggctctggcaccgactacaccctgacaatatccagcctccagcctgaggacttcgccacctactactgtcagcagagctggaacaccccttggacattcggccagggcaccaagctggaaatcaagagactcgaggggaaaccaattcccaaccctcttctgggactggattcaaccggcagcggcgaggacctgaagaacgtgttcccacctgaggtggccgtgttcgagcctagcgaggccgagatcagccacacccagaaagccaccctcgtgtgcctggctaccggcttctaccccgaccatgtggaactgtcttggtgggtcaacggcaaagaggtgcacagcggcgtgtctaccgacccccagccactgaaagaacagcccgccctgaacgacagccggtactgcctgagcagcagactgagagtgtccgccaccttctggcagaacccccggaaccacttcagatgccaggtgcagttctacggcctgagcgagaacgacgagtggacccaggacagagccaagcccgtgacccagatcgtgtctgccgaagcctggggcagagccgattgcggatcccagagcttcggcctgctggaccccaagctgtgctacctgctggatggcatcctgttcatctacggcgtgatcctgaccgccctgttcctgaggagtaagaggagcaggctcctgcacagtgactacatgaacatgactccacgccgccccggacccacccgcaagcattaccagccctatgccccaccacgcgacttcgcagcctatcgctccagagtgaagttcagcagaagcgccgacgcccctgcctaccagcagggacagaaccaactgtacaacgagctgaacctgggcagacgggaagagtacgacgtgctggacaagcggagaggcagggaccctgagatgggcggaaagccccagcggagaaagaacccccaggaaggactgtataacgaactccagaaagacaagatggccgaagcctacagcgagatcggcatgaagggcgagcggagaagaggcaagggccacgatggcctgtaccagggcctgagcaccgccaccaaggacacctatgacgccctgcacatgcaggccctgcctccaagaagggccaagcgatctggatctggagcaacaaacttctcactactcaaacaagcaggtgacgtggaggagaatcccgggcctactagtatggactggatttggcgcatccttttccttgtcggcgctgctaccggcgcccattccgggcccgaagtgcagctggttgaatctggcggaggactggttcaggctggcggatctctgagactgtcttgtgccgccagcggcagaacctttagcatgggctggtttagacaggcccctggcaaagagagagagttcgtcgccgccatcacatactctggcggcagcccttactacgccgactctgtgaagggcagattcaccatcagccgggacaacgccaagaacaccgtgtacctccagatgaacagcctgaagcctgaggacaccgccgtgtactactgcgccgccaatccaacatacggcagcgactggaacgccgagaattggggccagggaacccaagtgacagtgtctagcggatccggcggcggaggatctggcggaggcggatctgggggcggaggctctttcgaacaagttcagcttcaacagcctggcgctgagctggtcaaacctggcgcttctgtgaagatgagctgcaaagccagcggctacgccttcagcagctactggatcaactggatgaagcagaaacccggccagggactcgaatggatcggccaaatctatcccggcgacggcgacaccaactacaacggcaagttcaagggcagagccacactgaccgccgatacctctagcagcacagcctacatgcagctgagcagcctgaccagcgaagatagcgccgtgtacttctgtgcccggtccatcacaacagtcgtgggctgcgctatggactattggggccagggaacaagcgtgaccgtgtctagtacgcgtgagcagaaactgatctcggaagaggatgggagcggcatccagaaccctgatcctgccgtgtaccagctgcgggatagcaagagcagcgacaagagcgtgtgtctgttcaccgacttcgacagccagaccaacgtgtcccagagcaaggactccgacgtgtacatcaccgataagaccgtgctggacatgcggagcatggacttcaagagcaactccgccgtggcctggtccaacaagtccgatttcgcctgcgccaacgccttcaacaacagcattatccccgaggacacattcttcccaagccccgagagcagctgcggtacccagagttttgggttgttggaccctaaattgtgctatctgttggacggaatcctgttcatttacggagtgatcctgaccgcattgttcctgaggagcaagcggtcacggctgctccacagcgattacatgaatatgacaccacgaagaccgggtcctactcgcaaacactaccaaccctacgcacctccccgcgactttgcagcgtaccgatctcgggttaagttttccagatccgcagacgcacccgcttaccaacaagggcagaaccaactctacaatgaacttaatttggggcggagggaagagtacgacgttctggacaaaaggaggggacgagatcccgagatgggcggaaagcctcagcgaaggaagaatccgcaagaggggctttataacgaactccagaaagataaaatggcagaagcctatagtgagattgggatgaagggagaaaggaggaggggtaaaggtcacgatgggttgtaccaaggattgagcacagccactaaagatacctatgatgcgctccacatgcaggccctgccgccaaga

SEQ ID NO: 6274 - DNA, 3084 bp, Artificial Sequence
  Synthetic Polynucloetide
atggccttaccagtgaccgccttgctcctgccgctggccttgctgctccacgccgccaggccggacatccagatgacacagagccctagcagcctgtctgccagcgtgggagacagagtgaccatcacatgcaaggccagcgaccacatcaacaactggctggcctggtatcagcagaagcctggacaggcccctaagctgctgatctacggcgctaccacactggaaacaggcgtgcccagcagattttctggcagcggctctggcaccgactacaccctgacaatatccagcctccagcctgaggacttcgccacctactactgtcagcagagctggaacaccccttggacattcggccagggcaccaagctggaaatcaagagactcgaggggaaaccaattcccaaccctcttctgggactggattcaaccggcagcggcgaggacctgaagaacgtgttcccacctgaggtggccgtgttcgagcctagcgaggccgagatcagccacacccagaaagccaccctcgtgtgcctggctaccggcttctaccccgaccatgtggaactgtcttggtgggtcaacggcaaagaggtgcacagcggcgtgtctaccgacccccagccactgaaagaacagcccgccctgaacgacagccggtactgcctgagcagcagactgagagtgtccgccaccttctggcagaacccccggaaccacttcagatgccaggtgcagttctacggcctgagcgagaacgacgagtggacccaggacagagccaagcccgtgacccagatcgtgtctgccgaagcctggggcagagccgattgcggatcccagagcttcggcctgctggaccccaagctgtgctacctgctggatggcatcctgttcatctacggcgtgatcctgaccgccctgttcctgagagtgaagttcagcagaagcgccgacgcccctgcctaccagcagggacagaaccaactgtacaacgagctgaacctgggcagacgggaagagtacgacgtgctggacaagcggagaggcagggaccctgagatgggcggaaagccccagcggagaaagaacccccaggaaggactgtataacgaactccagaaagacaagatggccgaagcctacagcgagatcggcatgaagggcgagcggagaagaggcaagggccacgatggcctgtaccagggcctgagcaccgccaccaaggacacctatgacgccctgcacatgcaggccctgcctccaagaagggccaagcgatctggatctggagcaacaaacttctcactactcaaacaagcaggtgacgtggaggagaatcccgggcctactagtatggactggatttggcgcatccttttccttgtcggcgctgctaccggcgcccattccgggcccgaagtgcagctggttgaatctggcggaggactggttcaggctggcggatctctgagactgtcttgtgccgccagcggcagaacctttagcatgggctggtttagacaggcccctggcaaagagagagagttcgtcgccgccatcacatactctggcggcagcccttactacgccgactctgtgaagggcagattcaccatcagccgggacaacgccaagaacaccgtgtacctccagatgaacagcctgaagcctgaggacaccgccgtgtactactgcgccgccaatccaacatacggcagcgactggaacgccgagaattggggccagggaacccaagtgacagtgtctagcggatccggcggcggaggatctggcggaggcggatctgggggcggaggctctttcgaacaagttcagcttcaacagcctggcgctgagctggtcaaacctggcgcttctgtgaagatgagctgcaaagccagcggctacgccttcagcagctactggatcaactggatgaagcagaaacccggccagggactcgaatggatcggccaaatctatcccggcgacggcgacaccaactacaacggcaagttcaagggcagagccacactgaccgccgatacctctagcagcacagcctacatgcagctgagcagcctgaccagcgaagatagcgccgtgtacttctgtgcccggtccatcacaacagtcgtgggctgcgctatggactattggggccagggaacaagcgtgaccgtgtctagtacgcgtgagcagaaactgatctcggaagaggatctggggagcggcatccagaaccctgatcctgccgtgtaccagctgcgggatagcaagagcagcgacaagagcgtgtgtctgttcaccgacttcgacagccagaccaacgtgtcccagagcaaggactccgacgtgtacatcaccgataagaccgtgctggacatgcggagcatggacttcaagagcaactccgccgtggcctggtccaacaagtccgatttcgcctgcgccaacgccttcaacaacagcattatccccgaggacacattcttcccaagccccgagagcagctgcggtacccagagttttgggttgttggaccctaaattgtgctatctgttggacggaatcctgttcatttacggagtgatcctgaccgcattgttcctgaagagaggccggaagaagctgctgtacatcttcaagcagcctttcatgcggcccgtgcagaccacccaggaagaggacggctgctcctgccggttccccgaggaagaagaaggcggctgcgagctgcgggttaagttttccagatccgcagacgcacccgcttaccaacaagggcagaaccaactctacaatgaacttaatttggggcggagggaagagtacgacgttctggacaaaaggaggggacgagatcccgagatgggcggaaagcctcagcgaaggaagaatccgcaagaggggctttataacgaactccagaaagataaaatggcagaagcctatagtgagattgggatgaagggagaaaggaggaggggtaaaggtcacgatgggttgtaccaaggattgagcacagccactaaagatacctatgatgcgctccacatgcaggccctgccgccaaga

SEQ ID NO: 6275 - DNA, 3210 bp, Artificial Sequence
  Synthetic Polynucloetide
atggccttaccagtgaccgccttgctcctgccgctggccttgctgctccacgccgccaggccggacatccagatgacacagagccctagcagcctgtctgccagcgtgggagacagagtgaccatcacatgcaaggccagcgaccacatcaacaactggctggcctggtatcagcagaagcctggacaggcccctaagctgctgatctacggcgctaccacactggaaacaggcgtgcccagcagattttctggcagcggctctggcaccgactacaccctgacaatatccagcctccagcctgaggacttcgccacctactactgtcagcagagctggaacaccccttggacattcggccagggcaccaagctggaaatcaagagactcgaggggaaaccaattcccaaccctcttctgggactggattcaaccggcagcggcgaggacctgaagaacgtgttcccacctgaggtggccgtgttcgagcctagcgaggccgagatcagccacacccagaaagccaccctcgtgtgcctggctaccggcttctaccccgaccatgtggaactgtcttggtgggtcaacggcaaagaggtgcacagcggcgtgtctaccgacccccagccactgaaagaacagcccgccctgaacgacagccggtactgcctgagcagcagactgagagtgtccgccaccttctggcagaacccccggaaccacttcagatgccaggtgcagttctacggcctgagcgagaacgacgagtggacccaggacagagccaagcccgtgacccagatcgtgtctgccgaagcctggggcagagccgattgcggatcccagagcttcggcctgctggaccccaagctgtgctacctgctggatggcatcctgttcatctacggcgtgatcctgaccgccctgttcctgaaacggggcagaaagaaactcctgtatatattcaaacaaccatttatgagaccagtacaaactactcaagaggaagatggctgtagctgccgatttccagaagaagaagaaggaggatgtgaactgagagtgaagttcagcagaagcgccgacgcccctgcctaccagcagggacagaaccaactgtacaacgagctgaacctgggcagacgggaagagtacgacgtgctggacaagcggagaggcagggaccctgagatgggcggaaagccccagcggagaaagaacccccaggaaggactgtataacgaactccagaaagacaagatggccgaagcctacagcgagatcggcatgaagggcgagcggagaagaggcaagggccacgatggcctgtaccagggcctgagcaccgccaccaaggacacctatgacgccctgcacatgcaggccctgcctccaagaagggccaagcgatctggatctggagcaacaaacttctcactactcaaacaagcaggtgacgtggaggagaatcccgggcctactagtatggactggatttggcgcatccttttccttgtcggcgctgctaccggcgcccattccgggcccgaagtgcagctggttgaatctggcggaggactggttcaggctggcggatctctgagactgtcttgtgccgccagcggcagaacctttagcatgggctggtttagacaggcccctggcaaagagagagagttcgtcgccgccatcacatactctggcggcagcccttactacgccgactctgtgaagggcagattcaccatcagccgggacaacgccaagaacaccgtgtacctccagatgaacagcctgaagcctgaggacaccgccgtgtactactgcgccgccaatccaacatacggcagcgactggaacgccgagaattggggccagggaacccaagtgacagtgtctagcggatccggcggcggaggatctggcggaggcggatctgggggcggaggctctttcgaacaagttcagcttcaacagcctggcgctgagctggtcaaacctggcgcttctgtgaagatgagctgcaaagccagcggctacgccttcagcagctactggatcaactggatgaagcagaaacccggccagggactcgaatggatcggccaaatctatcccggcgacggcgacaccaactacaacggcaagttcaagggcagagccacactgaccgccgatacctctagcagcacagcctacatgcagctgagcagcctgaccagcgaagatagcgccgtgtacttctgtgcccggtccatcacaacagtcgtgggctgcgctatggactattggggccagggaacaagcgtgaccgtgtctagtacgcgtgagcagaaactgatctcggaagaggatctggggagcggcatccagaaccctgatcctgccgtgtaccagctgcgggatagcaagagcagcgacaagagcgtgtgtctgttcaccgacttcgacagccagaccaacgtgtcccagagcaaggactccgacgtgtacatcaccgataagaccgtgctggacatgcggagcatggacttcaagagcaactccgccgtggcctggtccaacaagtccgatttcgcctgcgccaacgccttcaacaacagcattatccccgaggacacattcttcccaagccccgagagcagctgcggtacccagagttttgggttgttggaccctaaattgtgctatctgttggacggaatcctgttcatttacggagtgatcctgaccgcattgttcctgaagagaggccggaagaagctgctgtacatcttcaagcagcctttcatgcggcccgtgcagaccacccaggaagaggacggctgctcctgccggttccccgaggaagaagaaggcggctgcgagctgcgggttaagttttccagatccgcagacgcacccgcttaccaacaagggcagaaccaactctacaatgaacttaatttggggcggagggaagagtacgacgttctggacaaaaggaggggacgagatcccgagatgggcggaaagcctcagcgaaggaagaatccgcaagaggggctttataacgaactccagaaagataaaatggcagaagcctatagtgagattgggatgaagggagaaaggaggaggggtaaaggtcacgatgggttgtaccaaggattgagcacagccactaaagatacctatgatgcgctccacatgcaggccctgccgccaaga

SEQ ID NO: 6276 - DNA, 2883 bp, Artificial Sequence
  Synthetic Polynucloetide
atggccttaccagtgaccgccttgctcctgccgctggccttgctgctccacgccgccaggccggacatccagatgacacagagccctagcagcctgtctgccagcgtgggagacagagtgaccatcacatgcaaggccagcgaccacatcaacaactggctggcctggtatcagcagaagcctggacaggcccctaagctgctgatctacggcgctaccacactggaaacaggcgtgcccagcagattttctggcagcggctctggcaccgactacaccctgacaatatccagcctccagcctgaggacttcgccacctactactgtcagcagagctggaacaccccttggacattcggccagggcaccaagctggaaatcaagagactcgagcagagcttcggcctgctggaccccaagctgtgctacctgctggatggcatcctgttcatctacggcgtgatcctgaccgccctgttcctgagagtgaagttcagcagaagcgccgacgcccctgcctaccagcagggacagaaccaactgtacaacgagctgaacctgggcagacgggaagagtacgacgtgctggacaagcggagaggcagggaccctgagatgggcggaaagccccagcggagaaagaacccccaggaaggactgtataacgaactccagaaagacaagatggccgaagcctacagcgagatcggcatgaagggcgagcggagaagaggcaagggccacgatggcctgtaccagggcctgagcaccgccaccaaggacacctatgacgccctgcacatgcaggccctgcctccaagaagggccaagcgatctggatctggagcaacaaacttctcactactcaaacaagcaggtgacgtggaggagaatcccgggcctactagtatggactggatttggcgcatccttttccttgtcggcgctgctaccggcgcccattccgggcccgaagtgcagctggttgaatctggcggaggactggttcaggctggcggatctctgagactgtcttgtgccgccagcggcagaacctttagcatgggctggtttagacaggcccctggcaaagagagagagttcgtcgccgccatcacatactctggcggcagcccttactacgccgactctgtgaagggcagattcaccatcagccgggacaacgccaagaacaccgtgtacctccagatgaacagcctgaagcctgaggacaccgccgtgtactactgcgccgccaatccaacatacggcagcgactggaacgccgagaattggggccagggaacccaagtgacagtgtctagcggatccggcggcggaggatctggcggaggcggatctgggggcggaggctctttcgaacaagttcagcttcaacagcctggcgctgagctggtcaaacctggcgcttctgtgaagatgagctgcaaagccagcggctacgccttcagcagctactggatcaactggatgaagcagaaacccggccagggactcgaatggatcggccaaatctatcccggcgacggcgacaccaactacaacggcaagttcaagggcagagccacactgaccgccgatacctctagcagcacagcctacatgcagctgagcagcctgaccagcgaagatagcgccgtgtacttctgtgcccggtccatcacaacagtcgtgggctgcgctatggactattggggccagggaacaagcgtgaccgtgtctagtacgcgtcagagttttgggttgttggaccctaaattgtgctatctgttggacggaatcctgttcatttacggagtgatcctgaccgcattgttcctgcgggttaagttttccagatccgcagacgcacccgcttaccaacaagggcagaaccaactctacaatgaacttaatttggggcggagggaagagtacgacgttctggacaaaaggaggggacgagatcccgagatgggcggaaagcctcagcgaaggaagaatccgcaagaggggctttataacgaactccagaaagataaaatggcagaagcctatagtgagattgggatgaagggagaaaggaggaggggtaaaggtcacgatgggttgtaccaaggattgagcacagccactaaagatacctatgatgcgctccacatgcaggccctgccgccaagacgcgccaagagaagcggatctggcgtgaagcagaccctgaatttcgacctgctgaagctggctggcgacgtggaatccaacccaggcccttctagaggccatatgaccgagtacaagcccacggtgcgcctcgccacccgcgacgacgtccccagggccgtacgcaccctcgccgccgcgttcgccgactaccccgccacgcgccacaccgtcgatccggaccgccacatcgagcgggtcaccgagctgcaagaactcttcctcacgcgcgtcgggctcgacatcggcaaggtgtgggtcgcggacgacggcgccgcggtggcggtctggaccacgccggagagcgtcgaagcgggggcggtgttcgccgagatcggcccgcgcatggccgagttgagcggttcccggctggccgcgcagcaacagatggaaggcctcctggcgccgcaccggcccaaggagcccgcgtggttcctggccaccgtcggcgtctcgcccgaccaccagggcaagggtctgggcagcgccgtcgtgctccccggagtggaggcggccgagcgcgccggggtgcccgccttcctggagacctccgcgccccgcaacctccccttctacgagcggctcggcttcaccgtcaccgccgacgtcgaggtgcccgaaggaccgcgcacctggtgcatgacccgcaagcccggtgcctga

SEQ ID NO: 6277 - DNA, 2355 bp, Artificial Sequence
  Synthetic Polynucloetide
atggccttaccagtgaccgccttgctcctgccgctggccttgctgctccacgccgccaggccggacatccagatgacacagagccctagcagcctgtctgccagcgtgggagacagagtgaccatcacatgcaaggccagcgaccacatcaacaactggctggcctggtatcagcagaagcctggacaggcccctaagctgctgatctacggcgctaccacactggaaacaggcgtgcccagcagattttctggcagcggctctggcaccgactacaccctgacaatatccagcctccagcctgaggacttcgccacctactactgtcagcagagctggaacaccccttggacattcggccagggcaccaagctggaaatcaagagactcgagggacagcctaaggccaatcctaccgtgacactgttccctccaagcagcgaagaactccaggccaacaaggccacacttgtgtgcctgatctccgacttctaccctggggctgtgacagtggcttggaaggccgatggatctcctgtgaaagccggcgtggaaaccaccaagccatccaagcagagcaacaacaaatacgccgccagctcctacctgagcctgacacctgagcagtggaagtcccacagatcctacagctgccaagtgacccacgaaggcagcaccgtggaaaagacagtggcccctacagagtgcagccccatcaagaccgatgtgattacaatggaccccaaggacaactgctccaaggacgccaacgataccctgctgctccagctgaccaacaccagcgcctactacatgtacttgttgctgctgctgaagtccgtggtgtacttcgccatcatcacatgctgcctgctgcggagaaccgccttctgctgcaacggcgagaagtctagggccaagcgatctggatctggagcaacaaacttctcactactcaaacaagcaggtgacgtggaggagaatcccgggcctactagtatggactggatttggcgcatccttttccttgtcggcgctgctaccggcgcccattccgggcccgaagtgcagctggttgaatctggcggaggactggttcaggctggcggatctctgagactgtcttgtgccgccagcggcagaacctttagcatgggctggtttagacaggcccctggcaaagagagagagttcgtcgccgccatcacatactctggcggcagcccttactacgccgactctgtgaagggcagattcaccatcagccgggacaacgccaagaacaccgtgtacctccagatgaacagcctgaagcctgaggacaccgccgtgtactactgcgccgccaatccaacatacggcagcgactggaacgccgagaattggggccagggaacccaagtgacagtgtctagcggatccggcggcggaggatctggcggaggcggatctgggggcggaggctctttcgaacaagttcagcttcaacagcctggcgctgagctggtcaaacctggcgcttctgtgaagatgagctgcaaagccagcggctacgccttcagcagctactggatcaactggatgaagcagaaacccggccagggactcgaatggatcggccaaatctatcccggcgacggcgacaccaactacaacggcaagttcaagggcagagccacactgaccgccgatacctctagcagcacagcctacatgcagctgagcagcctgaccagcgaagatagcgccgtgtacttctgtgcccggtccatcacaacagtcgtgggctgcgctatggactattggggccagggaacaagcgtgaccgtgtctagtacgcgtgcctctacaaagggaccctccgtgtttcctctggctcccagcagcaagtctacaagcggaggaacagccgctctgggctgcctggtcaaggattactttcccgagcctgtgaccgtgtcctggaatagcggagcactgacaagcggcgtgcacacctttccagccgtgctgcaaagcagcggcctgtactctctgagcagcgtggtcacagtgcctagctctagcctgggcacccagacctacatctgcaatgtgaaccacaagcctagcaacaccaaggtggacaagagagtggaacccaagagctgtgaagtgaaaaccgactccaccgaccacgtgaagcccaaagagacagagaacaccaagcagcccagcaagagctgccacaagcccaaggccatcgtgcacaccgagaaagtgaacatgatgagcctgaccgtgctgggcctgcggatgctgttcgccaaaaccgtggccgtgaacttcctgctgaccgccaagctgttcttcctc

SEQ ID NO: 6278 - DNA, 2289 bp, Artificial Sequence
  Synthetic Polynucloetide
atggccttaccagtgaccgccttgctcctgccgctggccttgctgctccacgccgccaggccggacatccagatgacacagagccctagcagcctgtctgccagcgtgggagacagagtgaccatcacatgcaaggccagcgaccacatcaacaactggctggcctggtatcagcagaagcctggacaggcccctaagctgctgatctacggcgctaccacactggaaacaggcgtgcccagcagattttctggcagcggctctggcaccgactacaccctgacaatatccagcctccagcctgaggacttcgccacctactactgtcagcagagctggaacaccccttggacattcggccagggcaccaagctggaaatcaagagactcgagggacagcctaaggccaatcctaccgtgacactgttccctccaagcagcgaagaactccaggccaacaaggccacacttgtgtgcctgatctccgacttctaccctggggctgtgacagtggcttggaaggccgatggatctcctgtgaaagccggcgtggaaaccaccaagccatccaagcagagcaacaacaaatacgccgccagctcctacctgagcctgacacctgagcagtggaagtcccacagatcctacagctgccaagtgacccacgaaggcagcaccgtggaaaagacagtggcccctacagagtgcagcggcagagccgattgcggcatcaccagcgccagctaccaccagggcgtgctgagcgccaccatcctgtacgagatcctgctgggcaaggccaccctgtacgccgtgctggtgtctgccctggtgctgatggctatggtcaagcggaaggacagccggggaagggccaagcgatctggatctggagcaacaaacttctcactactcaaacaagcaggtgacgtggaggagaatcccgggcctactagtatggactggatttggcgcatccttttccttgtcggcgctgctaccggcgcccattccgggcccgaagtgcagctggttgaatctggcggaggactggttcaggctggcggatctctgagactgtcttgtgccgccagcggcagaacctttagcatgggctggtttagacaggcccctggcaaagagagagagttcgtcgccgccatcacatactctggcggcagcccttactacgccgactctgtgaagggcagattcaccatcagccgggacaacgccaagaacaccgtgtacctccagatgaacagcctgaagcctgaggacaccgccgtgtactactgcgccgccaatccaacatacggcagcgactggaacgccgagaattggggccagggaacccaagtgacagtgtctagcggatccggcggcggaggatctggcggaggcggatctgggggcggaggctctttcgaacaagttcagcttcaacagcctggcgctgagctggtcaaacctggcgcttctgtgaagatgagctgcaaagccagcggctacgccttcagcagctactggatcaactggatgaagcagaaacccggccagggactcgaatggatcggccaaatctatcccggcgacggcgacaccaactacaacggcaagttcaagggcagagccacactgaccgccgatacctctagcagcacagcctacatgcagctgagcagcctgaccagcgaagatagcgccgtgtacttctgtgcccggtccatcacaacagtcgtgggctgcgctatggactattggggccagggaacaagcgtgaccgtgtctagtacgcgtgcctctacaaagggaccctccgtgtttcctctggctcccagcagcaagtctacaagcggaggaacagccgctctgggctgcctggtcaaggattactttcccgagcctgtgaccgtgtcctggaatagcggagcactgacaagcggcgtgcacacctttccagccgtgctgcaaagcagcggcctgtactctctgagcagcgtggtcacagtgcctagctctagcctgggcacccagacctacatctgcaatgtgaaccacaagcctagcaacaccaaggtggacaagagagtggaacccaagagctgtatccccgaggacacattcttcccaagcagcgacgtgccctgcgacgtgaagctggtggaaaagagcttcgagacagacaccaacctgaacttccagaacctgagcgtgatcggcttcagaatcctgctgctgaaagtggccggctttaacctgctgatgaccctgcggctgtggtccagc

SEQ ID NO: 6279 - DNA, 2289 bp, Artificial Sequence
  Synthetic Polynucloetide
atggccttaccagtgaccgccttgctcctgccgctggccttgctgctccacgccgccaggccggacatccagatgacacagagccctagcagcctgtctgccagcgtgggagacagagtgaccatcacatgcaaggccagcgaccacatcaacaactggctggcctggtatcagcagaagcctggacaggcccctaagctgctgatctacggcgctaccacactggaaacaggcgtgcccagcagattttctggcagcggctctggcaccgactacaccctgacaatatccagcctccagcctgaggacttcgccacctactactgtcagcagagctggaacaccccttggacattcggccagggcaccaagctggaaatcaagagactcgagggacagcctaaggccaatcctaccgtgacactgttccctccaagcagcgaagaactccaggccaacaaggccacacttgtgtgcctgatctccgacttctaccctggggctgtgacagtggcttggaaggccgatggatctcctgtgaaagccggcgtggaaaccaccaagccatccaagcagagcaacaacaaatacgccgccagctcctacctgagcctgacacctgagcagtggaagtcccacagatcctacagctgccaagtgacccacgaaggcagcaccgtggaaaagacagtggcccctacagagtgcagcggcagagccgattgcggctttaccagcgagagctaccagcagggcgtgctgagcgccaccatcctgtacgagatcctgctgggcaaggccaccctgtacgccgtgctggtgtctgccctggtgctgatggctatggtcaagcggaaggacagccggggaagggccaagcgatctggatctggagcaacaaacttctcactactcaaacaagcaggtgacgtggaggagaatcccgggcctactagtatggactggatttggcgcatccttttccttgtcggcgctgctaccggcgcccattccgggcccgaagtgcagctggttgaatctggcggaggactggttcaggctggcggatctctgagactgtcttgtgccgccagcggcagaacctttagcatgggctggtttagacaggcccctggcaaagagagagagttcgtcgccgccatcacatactctggcggcagcccttactacgccgactctgtgaagggcagattcaccatcagccgggacaacgccaagaacaccgtgtacctccagatgaacagcctgaagcctgaggacaccgccgtgtactactgcgccgccaatccaacatacggcagcgactggaacgccgagaattggggccagggaacccaagtgacagtgtctagcggatccggcggcggaggatctggcggaggcggatctgggggcggaggctctttcgaacaagttcagcttcaacagcctggcgctgagctggtcaaacctggcgcttctgtgaagatgagctgcaaagccagcggctacgccttcagcagctactggatcaactggatgaagcagaaacccggccagggactcgaatggatcggccaaatctatcccggcgacggcgacaccaactacaacggcaagttcaagggcagagccacactgaccgccgatacctctagcagcacagcctacatgcagctgagcagcctgaccagcgaagatagcgccgtgtacttctgtgcccggtccatcacaacagtcgtgggctgcgctatggactattggggccagggaacaagcgtgaccgtgtctagtacgcgtgcctctacaaagggaccctccgtgtttcctctggctcccagcagcaagtctacaagcggaggaacagccgctctgggctgcctggtcaaggattactttcccgagcctgtgaccgtgtcctggaatagcggagcactgacaagcggcgtgcacacctttccagccgtgctgcaaagcagcggcctgtactctctgagcagcgtggtcacagtgcctagctctagcctgggcacccagacctacatctgcaatgtgaaccacaagcctagcaacaccaaggtggacaagagagtggaacccaagagctgtatccccgaggacacattcttcccaagccccgagagcagctgcgacgtgaagctggtggaaaagagcttcgagacagacaccaacctgaacttccagaacctgagcgtgatcggcttcagaatcctgctgctgaaagtggccggctttaacctgctgatgaccctgcggctgtggtccagc

SEQ ID NO: 6280 - DNA, 1779 bp, Artificial Sequence
  Synthetic Polynucloetide
atggactggatttggcgcatccttttccttgtcggcgctgctaccggcgcccattccgggcccgaagtgcagctggttgaatctggcggaggactggttcaggctggcggatctctgagactgtcttgtgccgccagcggcagaacctttagcatgggctggtttagacaggcccctggcaaagagagagagttcgtcgccgccatcacatactctggcggcagcccttactacgccgactctgtgaagggcagattcaccatcagccgggacaacgccaagaacaccgtgtacctccagatgaacagcctgaagcctgaggacaccgccgtgtactactgcgccgccaatccaacatacggcagcgactggaacgccgagaattggggccagggaacccaagtgacagtgtctagcggatccggcggcggaggatctggcggaggcggatctgggggcggaggctctttcgaacaagttcagcttcaacagcctggcgctgagctggtcaaacctggcgcttctgtgaagatgagctgcaaagccagcggctacgccttcagcagctactggatcaactggatgaagcagaaacccggccagggactcgaatggatcggccaaatctatcccggcgacggcgacaccaactacaacggcaagttcaagggcagagccacactgaccgccgatacctctagcagcacagcctacatgcagctgagcagcctgaccagcgaagatagcgccgtgtacttctgtgcccggtccatcacaacagtcgtgggctgcgctatggactattggggccagggaacaagcgtgaccgtgtctagtggcggaggcggaagtggaggcggaggatctggcggcggaggctctgacatccagatgacacagagccctagcagcctgtctgccagcgtgggagacagagtgaccatcacatgcaaggccagcgaccacatcaacaactggctggcctggtatcagcagaagcctggacaggcccctaagctgctgatctacggcgctaccacactggaaacaggcgtgcccagcagattttctggcagcggctctggcaccgactacaccctgacaatatccagcctccagcctgaggacttcgccacctactactgtcagcagagctggaacaccccttggacattcggccagggcaccaagctggaaatcaagagaacgcgtggcggaggcagcgacggtaacgaggagatgggaggaatcactcaaaccccttacaaagtctcaatttcaggaacaactgttatccttacatgtccccagtatcctggcagcgagatcctttggcagcataacgacaagaatatagggggagatgaagacgataagaatatcggatctgacgaggatcacttgagcctgaaagagttctccgagcttgaacaaagcggatattatgtgtgctatccgcgcgggtcaaagccggaagacgctaacttttacctttatctccgagccagagtgtgcgaaaattgcatggaaatggacgttatgtccgttgctacaatagttatcgtagatatatgcatcacgggtggactgcttctgctggtttattattggtccaagaatagaaaggccaaagctaaacccgtgaccagaggcgctggcgcaggcggaaggcaaaggggacaaaacaaagaacggccaccaccagtgccaaatccagattatgagcctattcggaaaggacagagggacctgtactctggcctgaatcagagaagaatc

SEQ ID NO: 6281 - DNA, 1674 bp, Artificial Sequence
  Synthetic Polynucloetide
atggactggatttggcgcatccttttccttgtcggcgctgctaccggcgcccattccgggcccgaagtgcagctggttgaatctggcggaggactggttcaggctggcggatctctgagactgtcttgtgccgccagcggcagaacctttagcatgggctggtttagacaggcccctggcaaagagagagagttcgtcgccgccatcacatactctggcggcagcccttactacgccgactctgtgaagggcagattcaccatcagccgggacaacgccaagaacaccgtgtacctccagatgaacagcctgaagcctgaggacaccgccgtgtactactgcgccgccaatccaacatacggcagcgactggaacgccgagaattggggccagggaacccaagtgacagtgtctagcggatccggcggcggaggatctggcggaggcggatctgggggcggaggctctttcgaacaagttcagcttcaacagcctggcgctgagctggtcaaacctggcgcttctgtgaagatgagctgcaaagccagcggctacgccttcagcagctactggatcaactggatgaagcagaaacccggccagggactcgaatggatcggccaaatctatcccggcgacggcgacaccaactacaacggcaagttcaagggcagagccacactgaccgccgatacctctagcagcacagcctacatgcagctgagcagcctgaccagcgaagatagcgccgtgtacttctgtgcccggtccatcacaacagtcgtgggctgcgctatggactattggggccagggaacaagcgtgaccgtgtctagtggcggaggcggaagtggaggcggaggatctggcggcggaggctctgacatccagatgacacagagccctagcagcctgtctgccagcgtgggagacagagtgaccatcacatgcaaggccagcgaccacatcaacaactggctggcctggtatcagcagaagcctggacaggcccctaagctgctgatctacggcgctaccacactggaaacaggcgtgcccagcagattttctggcagcggctctggcaccgactacaccctgacaatatccagcctccagcctgaggacttcgccacctactactgtcagcagagctggaacaccccttggacattcggccagggcaccaagctggaaatcaagagaacgcgtggcggaggcagcttcaagatccccatcgaggaactggaagatcgggtgttcgtgaactgcaacacctctatcacctgggtggaaggcaccgtgggaacactgctgagcgacatcaccagactggacctcggcaagcggattctggaccctcggggcatctacagatgcaacggcaccgacatctacaaggacaaagaaagcaccgtgcaggtccactacagaatgtgccagtcctgcgtggaactggaccctgctacagtggccggcatcatcgtgaccgatgtgatcgctactctgctgctggctctgggagtgttctgcttcgccggacacgaaacaggcagactgtctggcgctgccgatacacaggccctgctgagaaacgaccaagtgtatcagcccctgcgcgacagagatgatgcccagtattctcacctcggcggcaactgggctagaaacaag

SEQ ID NO: 6282 - DNA, 1704 bp, Artificial Sequence
  Synthetic Polynucloetide
atggactggatttggcgcatccttttccttgtcggcgctgctaccggcgcccattccgggcccgaagtgcagctggttgaatctggcggaggactggttcaggctggcggatctctgagactgtcttgtgccgccagcggcagaacctttagcatgggctggtttagacaggcccctggcaaagagagagagttcgtcgccgccatcacatactctggcggcagcccttactacgccgactctgtgaagggcagattcaccatcagccgggacaacgccaagaacaccgtgtacctccagatgaacagcctgaagcctgaggacaccgccgtgtactactgcgccgccaatccaacatacggcagcgactggaacgccgagaattggggccagggaacccaagtgacagtgtctagcggatccggcggcggaggatctggcggaggcggatctgggggcggaggctctttcgaacaagttcagcttcaacagcctggcgctgagctggtcaaacctggcgcttctgtgaagatgagctgcaaagccagcggctacgccttcagcagctactggatcaactggatgaagcagaaacccggccagggactcgaatggatcggccaaatctatcccggcgacggcgacaccaactacaacggcaagttcaagggcagagccacactgaccgccgatacctctagcagcacagcctacatgcagctgagcagcctgaccagcgaagatagcgccgtgtacttctgtgcccggtccatcacaacagtcgtgggctgcgctatggactattggggccagggaacaagcgtgaccgtgtctagtggcggaggcggaagtggaggcggaggatctggcggcggaggctctgacatccagatgacacagagccctagcagcctgtctgccagcgtgggagacagagtgaccatcacatgcaaggccagcgaccacatcaacaactggctggcctggtatcagcagaagcctggacaggcccctaagctgctgatctacggcgctaccacactggaaacaggcgtgcccagcagattttctggcagcggctctggcaccgactacaccctgacaatatccagcctccagcctgaggacttcgccacctactactgtcagcagagctggaacaccccttggacattcggccagggcaccaagctggaaatcaagagaacgcgtggcggaggcagccagagcatcaagggcaaccacctggtcaaggtgtacgactaccaagaggacggcagcgtgctgctgacatgtgatgccgaggccaagaacatcacctggtttaaggacggcaagatgatcggcttcctgaccgaggacaagaagaagtggaacctgggcagcaacgctaaggaccccagaggcatgtatcagtgcaagggcagccagaacaagagcaagcccctccaggtgtactaccggatgtgccagaactgcatcgagctgaacgccgctaccatcagcggctttctgttcgccgagatcgtgtccatcttcgtgctggccgtgggcgtgtactttatcgctggacaggatggcgtgcggcagagcagagcttccgataagcaaaccctgctgcctaacgaccagctgtaccagcctctgaaggacagagaggacgaccagtacagccacctccagggcaatcagctgagaagaaac

SEQ ID NO: 6283 - DNA, 1653 bp, Artificial Sequence
  Synthetic Polynucloetide
atggactggatttggcgcatccttttccttgtcggcgctgctaccggcgcccattccgggcccgaagtgcagctggttgaatctggcggaggactggttcaggctggcggatctctgagactgtcttgtgccgccagcggcagaacctttagcatgggctggtttagacaggcccctggcaaagagagagagttcgtcgccgccatcacatactctggcggcagcccttactacgccgactctgtgaagggcagattcaccatcagccgggacaacgccaagaacaccgtgtacctccagatgaacagcctgaagcctgaggacaccgccgtgtactactgcgccgccaatccaacatacggcagcgactggaacgccgagaattggggccagggaacccaagtgacagtgtctagcggatccggcggcggaggatctggcggaggcggatctgggggcggaggctctttcgaacaagttcagcttcaacagcctggcgctgagctggtcaaacctggcgcttctgtgaagatgagctgcaaagccagcggctacgccttcagcagctactggatcaactggatgaagcagaaacccggccagggactcgaatggatcggccaaatctatcccggcgacggcgacaccaactacaacggcaagttcaagggcagagccacactgaccgccgatacctctagcagcacagcctacatgcagctgagcagcctgaccagcgaagatagcgccgtgtacttctgtgcccggtccatcacaacagtcgtgggctgcgctatggactattggggccagggaacaagcgtgaccgtgtctagtggcggaggcggaagtggaggcggaggatctggcggcggaggctctgacatccagatgacacagagccctagcagcctgtctgccagcgtgggagacagagtgaccatcacatgcaaggccagcgaccacatcaacaactggctggcctggtatcagcagaagcctggacaggcccctaagctgctgatctacggcgctaccacactggaaacaggcgtgcccagcagattttctggcagcggctctggcaccgactacaccctgacaatatccagcctccagcctgaggacttcgccacctactactgtcagcagagctggaacaccccttggacattcggccagggcaccaagctggaaatcaagagaacgcgtggcggaggcagccagagttttgggttgttggaccctaaattgtgctatctgttggacggaatcctgttcatttacggagtgatcctgaccgcattgttcctgcgggttaagttttccagatccgcagacgcacccgcttaccaacaagggcagaaccaactctacaatgaacttaatttggggcggagggaagagtacgacgttctggacaaaaggaggggacgagatcccgagatgggcggaaagcctcagcgaaggaagaatccgcaagaggggctttataacgaactccagaaagataaaatggcagaagcctatagtgagattgggatgaagggagaaaggaggaggggtaaaggtcacgatgggttgtaccaaggattgagcacagccactaaagatacctatgatgcgctccacatgcaggccctgccgccaaga

SEQ ID NO: 6284 - DNA, 1764 bp, Artificial Sequence
  Synthetic Polynucloetide
atggactggatttggcgcatccttttccttgtcggcgctgctaccggcgcccattccgggcccgaagtgcagctggttgaatctggcggaggactggttcaggctggcggatctctgagactgtcttgtgccgccagcggcagaacctttagcatgggctggtttagacaggcccctggcaaagagagagagttcgtcgccgccatcacatactctggcggcagcccttactacgccgactctgtgaagggcagattcaccatcagccgggacaacgccaagaacaccgtgtacctccagatgaacagcctgaagcctgaggacaccgccgtgtactactgcgccgccaatccaacatacggcagcgactggaacgccgagaattggggccagggaacccaagtgacagtgtctagcggatccggcggcggaggatctggcggaggcggatctgggggcggaggctctttcgaacaagttcagcttcaacagcctggcgctgagctggtcaaacctggcgcttctgtgaagatgagctgcaaagccagcggctacgccttcagcagctactggatcaactggatgaagcagaaacccggccagggactcgaatggatcggccaaatctatcccggcgacggcgacaccaactacaacggcaagttcaagggcagagccacactgaccgccgatacctctagcagcacagcctacatgcagctgagcagcctgaccagcgaagatagcgccgtgtacttctgtgcccggtccatcacaacagtcgtgggctgcgctatggactattggggccagggaacaagcgtgaccgtgtctagtacgcgtatccagaaccctgatcctgccgtgtaccagctgcgggatagcaagagcagcgacaagagcgtgtgtctgttcaccgacttcgacagccagaccaacgtgtcccagagcaaggactccgacgtgtacatcaccgataagaccgtgctggacatgcggagcatggacttcaagagcaactccgccgtggcctggtccaacaagtccgatttcgcctgcgccaacgccttcaacaacagcattatccccgaggacacattcttcccaagccccgagagcagctgcgacgtgaagctggtggaaaagagcttcgagacagacaccaacctgaacttccagaacctgagcgtgatcggcttcagaatcctgctgctgaaagtggccggctttaacctgctgatgaccctgcggctgtggtccagccgcgccaagagaagcggatctggcgtgaagcagaccctgaatttcgacctgctgaagctggctggcgacgtggaatccaacccaggcccttctagaggccatatggccaagcctttgtctcaagaagaatccaccctcattgaaagagcaacggctacaatcaacagcatccccatctctgaagactacagcgtcgccagcgcagctctctctagcgacggccgcatcttcactggtgtcaatgtatatcattttactgggggaccttgtgcagaactcgtggtgctgggcactgctgctgctgcggcagctggcaacctgacttgtatcgtcgcgatcggaaatgagaacaggggcatcttgagcccctgcggacggtgccgacaggtgcttctcgatctgcatcctgggatcaaagccatagtgaaggacagtgatggacagccgacggcagttgggattcgtgaattgctgccctctggttatgtgtgggagggctga

SEQ ID NO: 6285 - DNA, 1263 bp, Artificial Sequence
  Synthetic Polynucloetide
atggactggatttggcgcatccttttccttgtcggcgctgctaccggcgcccattccgggcccgaagtgcagctggttgaatctggcggaggactggttcaggctggcggatctctgagactgtcttgtgccgccagcggcagaacctttagcatgggctggtttagacaggcccctggcaaagagagagagttcgtcgccgccatcacatactctggcggcagcccttactacgccgactctgtgaagggcagattcaccatcagccgggacaacgccaagaacaccgtgtacctccagatgaacagcctgaagcctgaggacaccgccgtgtactactgcgccgccaatccaacatacggcagcgactggaacgccgagaattggggccagggaacccaagtgacagtgtctagcggatccggcggcggaggatctggcggaggcggatctgggggcggaggctctttcgaacaagttcagcttcaacagcctggcgctgagctggtcaaacctggcgcttctgtgaagatgagctgcaaagccagcggctacgccttcagcagctactggatcaactggatgaagcagaaacccggccagggactcgaatggatcggccaaatctatcccggcgacggcgacaccaactacaacggcaagttcaagggcagagccacactgaccgccgatacctctagcagcacagcctacatgcagctgagcagcctgaccagcgaagatagcgccgtgtacttctgtgcccggtccatcacaacagtcgtgggctgcgctatggactattggggccagggaacaagcgtgaccgtgtctagtacgcgtatccagaaccctgatcctgccgtgtaccagctgcgggatagcaagagcagcgacaagagcgtgtgtctgttcaccgacttcgacagccagaccaacgtgtcccagagcaaggactccgacgtgtacatcaccgataagaccgtgctggacatgcggagcatggacttcaagagcaactccgccgtggcctggtccaacaagtccgatttcgcctgcgccaacgccttcaacaacagcattatccccgaggacacattcttcccaagccccgagagcagctgcgacgtgaagctggtggaaaagagcttcgagacagacaccaacctgaacttccagaacctgagcgtgatcggcttcagaatcctgctgctgaaagtggccggctttaacctgctgatgaccctgcggctgtggtccagc

SEQ ID NO: 6286 - DNA, 1800 bp, Artificial Sequence
  Synthetic Polynucloetide
atggactggatttggcgcatccttttccttgtcggcgctgctaccggcgcccattccgggcccgaagtgcagctggttgaatctggcggaggactggttcaggctggcggatctctgagactgtcttgtgccgccagcggcagaacctttagcatgggctggtttagacaggcccctggcaaagagagagagttcgtcgccgccatcacatactctggcggcagcccttactacgccgactctgtgaagggcagattcaccatcagccgggacaacgccaagaacaccgtgtacctccagatgaacagcctgaagcctgaggacaccgccgtgtactactgcgccgccaatccaacatacggcagcgactggaacgccgagaattggggccagggaacccaagtgacagtgtctagcggatccggcggcggaggatctggcggaggcggatctgggggcggaggctctttcgaacaagttcagcttcaacagcctggcgctgagctggtcaaacctggcgcttctgtgaagatgagctgcaaagccagcggctacgccttcagcagctactggatcaactggatgaagcagaaacccggccagggactcgaatggatcggccaaatctatcccggcgacggcgacaccaactacaacggcaagttcaagggcagagccacactgaccgccgatacctctagcagcacagcctacatgcagctgagcagcctgaccagcgaagatagcgccgtgtacttctgtgcccggtccatcacaacagtcgtgggctgcgctatggactattggggccagggaacaagcgtgaccgtgtctagtacgcgtgagcagaaactgatctcggaagaggatgggagcggcatccagaaccctgatcctgccgtgtaccagctgcgggatagcaagagcagcgacaagagcgtgtgtctgttcaccgacttcgacagccagaccaacgtgtcccagagcaaggactccgacgtgtacatcaccgataagtgcgtgctggacatgcggagcatggacttcaagagcaactccgccgtggcctggtccaacaagtccgatttcgcctgcgccaacgccttcaacaacagcattatccccgaggacacattcttcccaagccccgagagcagctgcgacgtgaagctggtggaaaagagcttcgagacagacaccaacctgaacttccagaacctgagcgtgatcggcttcagaatcctgctgctgaaagtggccggctttaacctgctgatgaccctgcggctgtggtccagccgcgccaagagaagcggatctggcgtgaagcagaccctgaatttcgacctgctgaagctggctggcgacgtggaatccaacccaggcccttctagaggccatatggccaagcctttgtctcaagaagaatccaccctcattgaaagagcaacggctacaatcaacagcatccccatctctgaagactacagcgtcgccagcgcagctctctctagcgacggccgcatcttcactggtgtcaatgtatatcattttactgggggaccttgtgcagaactcgtggtgctgggcactgctgctgctgcggcagctggcaacctgacttgtatcgtcgcgatcggaaatgagaacaggggcatcttgagcccctgcggacggtgccgacaggtgcttctcgatctgcatcctgggatcaaagccatagtgaaggacagtgatggacagccgacggcagttgggattcgtgaattgctgccctctggttatgtgtgggagggctga

SEQ ID NO: 6287 - DNA, 1302 bp, Artificial Sequence
  Synthetic Polynucloetide
atggactggatttggcgcatccttttccttgtcggcgctgctaccggcgcccattccgggcccgaagtgcagctggttgaatctggcggaggactggttcaggctggcggatctctgagactgtcttgtgccgccagcggcagaacctttagcatgggctggtttagacaggcccctggcaaagagagagagttcgtcgccgccatcacatactctggcggcagcccttactacgccgactctgtgaagggcagattcaccatcagccgggacaacgccaagaacaccgtgtacctccagatgaacagcctgaagcctgaggacaccgccgtgtactactgcgccgccaatccaacatacggcagcgactggaacgccgagaattggggccagggaacccaagtgacagtgtctagcggatccggcggcggaggatctggcggaggcggatctgggggcggaggctctttcgaacaagttcagcttcaacagcctggcgctgagctggtcaaacctggcgcttctgtgaagatgagctgcaaagccagcggctacgccttcagcagctactggatcaactggatgaagcagaaacccggccagggactcgaatggatcggccaaatctatcccggcgacggcgacaccaactacaacggcaagttcaagggcagagccacactgaccgccgatacctctagcagcacagcctacatgcagctgagcagcctgaccagcgaagatagcgccgtgtacttctgtgcccggtccatcacaacagtcgtgggctgcgctatggactattggggccagggaacaagcgtgaccgtgtctagtacgcgtgagcagaaactgatctcggaagaggatgggagcggcatccagaaccctgatcctgccgtgtaccagctgcgggatagcaagagcagcgacaagagcgtgtgtctgttcaccgacttcgacagccagaccaacgtgtcccagagcaaggactccgacgtgtacatcaccgataagtgcgtgctggacatgcggagcatggacttcaagagcaactccgccgtggcctggtccaacaagtccgatttcgcctgcgccaacgccttcaacaacagcattatccccgaggacacattcttcccaagccccgagagcagctgcgacgtgaagctggtggaaaagagcttcgagacagacaccaacctgaacttccagaacctgagcgtgatcggcttcagaatcctgctgctgaaagtggccggctttaacctgctgatgaccctgcggctgtggtccagctga

SEQ ID NO: 6288 - DNA, 3390 bp, Artificial Sequence
  Synthetic Polynucloetide
atggccttaccagtgaccgccttgctcctgccgctggccttgctgctccacgccgccaggccggaagtgcaggttttggagtctggcggaggactggttcagcctggcggatctctgagactgtcttgtgccgccagcggcttcaccttcagcaactttgccatgagctgggtccgacaggcccctggcaaaggacttgaatgggtgtccacaatcagcggcagcgccggcacaacagattacgccgattctgtgaagggcagattcaccatcagccgggacaacagcaagaaaaccctgtacctccagatgaacagcctgcgcgtggaagataccgccgtgtactactgtgccgatggcagaggccccttcttcgattatcgcggccagggcacactggtcaccgtttcttctggtaccggcggaggcggatctggcggcggaggtagcggtggcggaggatctgaattcgacatccagatgacacagagccctagcagcctgtctgccagcgtgggagacagagtgaccatcacatgcaaggccagcgaccacatcaacaactggctggcctggtatcagcagaagcctggacaggcccctaagctgctgatctacggcgctaccacactggaaacaggcgtgcccagcagattttctggcagcggctctggcaccgactacaccctgacaatatccagcctccagcctgaggacttcgccacctactactgtcagcagagctggaacaccccttggacattcggccagggcaccaagctggaaatcaagagactcgagatccagaaccctgatcctgccgtgtaccagctgcgggatagcaagagcagcgacaagagcgtgtgtctgttcaccgacttcgacagccagaccaacgtgtcccagagcaaggactccgacgtgtacatcaccgataagtgcgtgctggacatgcggagcatggacttcaagagcaactccgccgtggcctggtccaacaagtccgatttcgcctgcgccaacgccttcaacaacagcattatccccgaggacacattcttcccaagcagcgacgtgccctgcgacgtgaagctggtggaaaagagcttcgagacagacaccaacctgaacttccagaacctgagcgtgatcggcttcagaatcctgctgctgaaagtggccggctttaacctgctgatgaccctgcggctgtggtccagccgcgccaagagaagcggatctggcgtgaagcagaccctgaatttcgacctgctgaagctggctggcgacgtggaatccaacccaggccctactagtatggactggatttggcgcatccttttccttgtcggcgctgctaccggcgcccattccgggcccgaagtgcagctggttgaatctggcggaggactggttcaggctggcggatctctgagactgtcttgtgccgccagcggcagaacctttagcatgggctggtttagacaggcccctggcaaagagagagagttcgtcgccgccatcacatactctggcggcagcccttactacgccgactctgtgaagggcagattcaccatcagccgggacaacgccaagaacaccgtgtacctccagatgaacagcctgaagcctgaggacaccgccgtgtactactgcgccgccaatccaacatacggcagcgactggaacgccgagaattggggccagggaacccaagtgacagtgtctagcggatccggcggcggaggatctggcggaggcggatctgggggcggaggctctttcgaacaagttcagcttcaacagcctggcgctgagctggtcaaacctggcgcttctgtgaagatgagctgcaaagccagcggctacgccttcagcagctactggatcaactggatgaagcagaaacccggccagggactcgaatggatcggccaaatctatcccggcgacggcgacaccaactacaacggcaagttcaagggcagagccacactgaccgccgatacctctagcagcacagcctacatgcagctgagcagcctgaccagcgaagatagcgccgtgtacttctgtgcccggtccatcacaacagtcgtgggctgcgctatggactattggggccagggaacaagcgtgaccgtgtctagtacgcgtgaggacctgaagaacgtgttcccacctgaggtggccgtgttcgagcctagcaaggccgagatcgcccacacccagaaagccaccctcgtgtgcctggctaccggcttctaccccgaccatgtggaactgtcttggtgggtcaacggcaaagaggtgcacagcggcgtgtgtaccgacccccagccactgaaagaacagcccgccctgaacgacagccggtactgcctgagcagcagactgagagtgtccgccaccttctggcagaacccccggaaccacttcagatgccaggtgcagttctacggcctgagcgagaacgacgagtggacccaggacagagccaagcccgtgacccagatcgtgtctgccgaagcctggggcagagccgattgcggcatcaccagcgccagctaccaccagggcgtgctgagcgccaccatcctgtacgagatcctgctgggcaaggccaccctgtacgccgtgctggtgtctgccctggtgctgatggctatggtcaagcggaaggacagccggggaagggccaagcgatctggatctggagcaacaaacttctcactactcaaacaagcaggtgacgtggaggagaatcccgggccttctagaggccatatgaccgagtacaagcccacggtgcgcctcgccacccgcgacgacgtccccagggccgtacgcaccctcgccgccgcgttcgccgactaccccgccacgcgccacaccgtcgatccggaccgccacatcgagcgggtcaccgagctgcaagaactcttcctcacgcgcgtcgggctcgacatcggcaaggtgtgggtcgcggacgacggcgccgcggtggcggtctggaccacgccggagagcgtcgaagcgggggcggtgttcgccgagatcggcccgcgcatggccgagttgagcggttcccggctggccgcgcagcaacagatggaaggcctcctggcgccgcaccggcccaaggagcccgcgtggttcctggccaccgtcggcgtctcgcccgaccaccagggcaagggtctgggcagcgccgtcgtgctccccggagtggaggcggccgagcgcgccggggtgcccgccttcctggagacctccgcgccccgcaacctccccttctacgagcggctcggcttcaccgtcaccgccgacgtcgaggtgcccgaaggaccgcgcacctggtgcatgacccgcaagcccggtgcctga

SEQ ID NO: 6289 - DNA, 3387 bp, Artificial Sequence
  Synthetic Polynucloetide
atggccttaccagtgaccgccttgctcctgccgctggccttgctgctccacgccgccaggccggaagtgcaggttttggagtctggcggaggactggttcagcctggcggatctctgagactgtcttgtgccgccagcggcttcaccttcagcaactttgccatgagctgggtccgacaggcccctggcaaaggacttgaatgggtgtccacaatcagcggcagcgccggcacaacagattacgccgattctgtgaagggcagattcaccatcagccgggacaacagcaagaaaaccctgtacctccagatgaacagcctgcgcgtggaagataccgccgtgtactactgtgccgatggcagaggccccttcttcgattatcgcggccagggcacactggtcaccgtttcttctggtaccggcggaggcggatctggcggcggaggtagcggtggcggaggatctgaattcgacatccagatgacacagagccctagcagcctgtctgccagcgtgggagacagagtgaccatcacatgcaaggccagcgaccacatcaacaactggctggcctggtatcagcagaagcctggacaggcccctaagctgctgatctacggcgctaccacactggaaacaggcgtgcccagcagattttctggcagcggctctggcaccgactacaccctgacaatatccagcctccagcctgaggacttcgccacctactactgtcagcagagctggaacaccccttggacattcggccagggcaccaagctggaaatcaagagactcgaggacctgaagaacgtgttcccacctgaggtggccgtgttcgagcctagcaaggccgagatcgcccacacccagaaagccaccctcgtgtgcctggctaccggcttctaccccgaccatgtggaactgtcttggtgggtcaacggcaaagaggtgcacagcggcgtgtgtaccgacccccagccactgaaagaacagcccgccctgaacgacagccggtactgcctgagcagcagactgagagtgtccgccaccttctggcagaacccccggaaccacttcagatgccaggtgcagttctacggcctgagcgagaacgacgagtggacccaggacagagccaagcccgtgacccagatcgtgtctgccgaagcctggggcagagccgattgcggcatcaccagcgccagctaccaccagggcgtgctgagcgccaccatcctgtacgagatcctgctgggcaaggccaccctgtacgccgtgctggtgtctgccctggtgctgatggctatggtcaagcggaaggacagccggggaagggccaagcgatctggatctggagcaacaaacttctcactactcaaacaagcaggtgacgtggaggagaatcccgggcctactagtatggactggatttggcgcatccttttccttgtcggcgctgctaccggcgcccattccgggcccgaagtgcagctggttgaatctggcggaggactggttcaggctggcggatctctgagactgtcttgtgccgccagcggcagaacctttagcatgggctggtttagacaggcccctggcaaagagagagagttcgtcgccgccatcacatactctggcggcagcccttactacgccgactctgtgaagggcagattcaccatcagccgggacaacgccaagaacaccgtgtacctccagatgaacagcctgaagcctgaggacaccgccgtgtactactgcgccgccaatccaacatacggcagcgactggaacgccgagaattggggccagggaacccaagtgacagtgtctagcggatccggcggcggaggatctggcggaggcggatctgggggcggaggctctttcgaacaagttcagcttcaacagcctggcgctgagctggtcaaacctggcgcttctgtgaagatgagctgcaaagccagcggctacgccttcagcagctactggatcaactggatgaagcagaaacccggccagggactcgaatggatcggccaaatctatcccggcgacggcgacaccaactacaacggcaagttcaagggcagagccacactgaccgccgatacctctagcagcacagcctacatgcagctgagcagcctgaccagcgaagatagcgccgtgtacttctgtgcccggtccatcacaacagtcgtgggctgcgctatggactattggggccagggaacaagcgtgaccgtgtctagtacgcgtatccagaaccctgatcctgccgtgtaccagctgcgggatagcaagagcagcgacaagagcgtgtgtctgttcaccgacttcgacagccagaccaacgtgtcccagagcaaggactccgacgtgtacatcaccgataagtgcgtgctggacatgcggagcatggacttcaagagcaactccgccgtggcctggtccaacaagtccgatttcgcctgcgccaacgccttcaacaacagcattatccccgaggacacattcttcccaagcagcgacgtgccctgcgacgtgaagctggtggaaaagagcttcgagacagacaccaacctgaacttccagaacctgagcgtgatcggcttcagaatcctgctgctgaaagtggccggctttaacctgctgatgaccctgcggctgtggtccagccgcgccaagagaagcggatctggcgtgaagcagaccctgaatttcgacctgctgaagctggctggcgacgtggaatccaacccaggcccttctagaggccatatgaccgagtacaagcccacggtgcgcctcgccacccgcgacgacgtccccagggccgtacgcaccctcgccgccgcgttcgccgactaccccgccacgcgccacaccgtcgatccggaccgccacatcgagcgggtcaccgagctgcaagaactcttcctcacgcgcgtcgggctcgacatcggcaaggtgtgggtcgcggacgacggcgccgcggtggcggtctggaccacgccggagagcgtcgaagcgggggcggtgttcgccgagatcggcccgcgcatggccgagttgagcggttcccggctggccgcgcagcaacagatggaaggcctcctggcgccgcaccggcccaaggagcccgcgtggttcctggccaccgtcggcgtctcgcccgaccaccagggcaagggtctgggcagcgccgtcgtgctccccggagtggaggcggccgagcgcgccggggtgcccgccttcctggagacctccgcgccccgcaacctccccttctacgagcggctcggcttcaccgtcaccgccgacgtcgaggtgcccgaaggaccgcgcacctggtgcatgacccgcaagcccggtgcctga

SEQ ID NO: 6290 - DNA, 3387 bp, Artificial Sequence
  Synthetic Polynucloetide
atggccttaccagtgaccgccttgctcctgccgctggccttgctgctccacgccgccaggccggaagtgcaggttttggagtctggcggaggactggttcagcctggcggatctctgagactgtcttgtgccgccagcggcttcaccttcagcaactttgccatgagctgggtccgacaggcccctggcaaaggacttgaatgggtgtccacaatcagcggcagcgccggcacaacagattacgccgattctgtgaagggcagattcaccatcagccgggacaacagcaagaaaaccctgtacctccagatgaacagcctgcgcgtggaagataccgccgtgtactactgtgccgatggcagaggccccttcttcgattatcgcggccagggcacactggtcaccgtttcttctggtaccggcggaggcggatctggcggcggaggtagcggtggcggaggatctgaattcgacatccagatgacacagagccctagcagcctgtctgccagcgtgggagacagagtgaccatcacatgcaaggccagcgaccacatcaacaactggctggcctggtatcagcagaagcctggacaggcccctaagctgctgatctacggcgctaccacactggaaacaggcgtgcccagcagattttctggcagcggctctggcaccgactacaccctgacaatatccagcctccagcctgaggacttcgccacctactactgtcagcagagctggaacaccccttggacattcggccagggcaccaagctggaaatcaagagactcgaggacctgaagaacgtgttcccacctgaggtggccgtgttcgagcctagcgaggccgagatcagccacacccagaaagccaccctcgtgtgcctggctaccggcttctaccccgaccatgtggaactgtcttggtgggtcaacggcaaagaggtgcacagcggcgtgtgtaccgacccccagccactgaaagaacagcccgccctgaacgacagccggtactgcctgagcagcagactgagagtgtccgccaccttctggcagaacccccggaaccacttcagatgccaggtgcagttctacggcctgagcgagaacgacgagtggacccaggacagagccaagcccgtgacccagatcgtgtctgccgaagcctggggcagagccgattgcggctttaccagcgagagctaccagcagggcgtgctgagcgccaccatcctgtacgagatcctgctgggcaaggccaccctgtacgccgtgctggtgtctgccctggtgctgatggctatggtcaagcggaaggacagccggggaagggccaagcgatctggatctggagcaacaaacttctcactactcaaacaagcaggtgacgtggaggagaatcccgggcctactagtatggactggatttggcgcatccttttccttgtcggcgctgctaccggcgcccattccgggcccgaagtgcagctggttgaatctggcggaggactggttcaggctggcggatctctgagactgtcttgtgccgccagcggcagaacctttagcatgggctggtttagacaggcccctggcaaagagagagagttcgtcgccgccatcacatactctggcggcagcccttactacgccgactctgtgaagggcagattcaccatcagccgggacaacgccaagaacaccgtgtacctccagatgaacagcctgaagcctgaggacaccgccgtgtactactgcgccgccaatccaacatacggcagcgactggaacgccgagaattggggccagggaacccaagtgacagtgtctagcggatccggcggcggaggatctggcggaggcggatctgggggcggaggctctttcgaacaagttcagcttcaacagcctggcgctgagctggtcaaacctggcgcttctgtgaagatgagctgcaaagccagcggctacgccttcagcagctactggatcaactggatgaagcagaaacccggccagggactcgaatggatcggccaaatctatcccggcgacggcgacaccaactacaacggcaagttcaagggcagagccacactgaccgccgatacctctagcagcacagcctacatgcagctgagcagcctgaccagcgaagatagcgccgtgtacttctgtgcccggtccatcacaacagtcgtgggctgcgctatggactattggggccagggaacaagcgtgaccgtgtctagtacgcgtatccagaaccctgatcctgccgtgtaccagctgcgggatagcaagagcagcgacaagagcgtgtgtctgttcaccgacttcgacagccagaccaacgtgtcccagagcaaggactccgacgtgtacatcaccgataagtgcgtgctggacatgcggagcatggacttcaagagcaactccgccgtggcctggtccaacaagtccgatttcgcctgcgccaacgccttcaacaacagcattatccccgaggacacattcttcccaagccccgagagcagctgcgacgtgaagctggtggaaaagagcttcgagacagacaccaacctgaacttccagaacctgagcgtgatcggcttcagaatcctgctgctgaaagtggccggctttaacctgctgatgaccctgcggctgtggtccagccgcgccaagagaagcggatctggcgtgaagcagaccctgaatttcgacctgctgaagctggctggcgacgtggaatccaacccaggcccttctagaggccatatgaccgagtacaagcccacggtgcgcctcgccacccgcgacgacgtccccagggccgtacgcaccctcgccgccgcgttcgccgactaccccgccacgcgccacaccgtcgatccggaccgccacatcgagcgggtcaccgagctgcaagaactcttcctcacgcgcgtcgggctcgacatcggcaaggtgtgggtcgcggacgacggcgccgcggtggcggtctggaccacgccggagagcgtcgaagcgggggcggtgttcgccgagatcggcccgcgcatggccgagttgagcggttcccggctggccgcgcagcaacagatggaaggcctcctggcgccgcaccggcccaaggagcccgcgtggttcctggccaccgtcggcgtctcgcccgaccaccagggcaagggtctgggcagcgccgtcgtgctccccggagtggaggcggccgagcgcgccggggtgcccgccttcctggagacctccgcgccccgcaacctccccttctacgagcggctcggcttcaccgtcaccgccgacgtcgaggtgcccgaaggaccgcgcacctggtgcatgacccgcaagcccggtgcctga

SEQ ID NO: 6291 - DNA, 2685 bp, Artificial Sequence
  Synthetic Polynucloetide
atggccttaccagtgaccgccttgctcctgccgctggccttgctgctccacgccgccaggccggaagtgcaggttttggagtctggcggaggactggttcagcctggcggatctctgagactgtcttgtgccgccagcggcttcaccttcagcaactttgccatgagctgggtccgacaggcccctggcaaaggacttgaatgggtgtccacaatcagcggcagcgccggcacaacagattacgccgattctgtgaagggcagattcaccatcagccgggacaacagcaagaaaaccctgtacctccagatgaacagcctgcgcgtggaagataccgccgtgtactactgtgccgatggcagaggccccttcttcgattatcgcggccagggcacactggtcaccgtttcttctggtaccggcggaggcggatctggcggcggaggtagcggtggcggaggatctgaattcgacatccagatgacacagagccctagcagcctgtctgccagcgtgggagacagagtgaccatcacatgcaaggccagcgaccacatcaacaactggctggcctggtatcagcagaagcctggacaggcccctaagctgctgatctacggcgctaccacactggaaacaggcgtgcccagcagattttctggcagcggctctggcaccgactacaccctgacaatatccagcctccagcctgaggacttcgccacctactactgtcagcagagctggaacaccccttggacattcggccagggcaccaagctggaaatcaagagactcgaggacctgaagaacgtgttcccacctgaggtggccgtgttcgagcctagcgaggccgagatcagccacacccagaaagccaccctcgtgtgcctggctaccggcttctaccccgaccatgtggaactgtcttggtgggtcaacggcaaagaggtgcacagcggcgtgtgtaccgacccccagccactgaaagaacagcccgccctgaacgacagccggtactgcctgagcagcagactgagagtgtccgccaccttctggcagaacccccggaaccacttcagatgccaggtgcagttctacggcctgagcgagaacgacgagtggacccaggacagagccaagcccgtgacccagatcgtgtctgccgaagcctggggcagagccgattgcggctttaccagcgagagctaccagcagggcgtgctgagcgccaccatcctgtacgagatcctgctgggcaaggccaccctgtacgccgtgctggtgtctgccctggtgctgatggctatggtcaagcggaaggacagccggggaagggccaagcgatctggatctggagcaacaaacttctcactactcaaacaagcaggtgacgtggaggagaatcccgggcctactagtatggactggatttggcgcatccttttccttgtcggcgctgctaccggcgcccattccgggcccgaagtgcagctggttgaatctggcggaggactggttcaggctggcggatctctgagactgtcttgtgccgccagcggcagaacctttagcatgggctggtttagacaggcccctggcaaagagagagagttcgtcgccgccatcacatactctggcggcagcccttactacgccgactctgtgaagggcagattcaccatcagccgggacaacgccaagaacaccgtgtacctccagatgaacagcctgaagcctgaggacaccgccgtgtactactgcgccgccaatccaacatacggcagcgactggaacgccgagaattggggccagggaacccaagtgacagtgtctagcggatccggcggcggaggatctggcggaggcggatctgggggcggaggctctttcgaacaagttcagcttcaacagcctggcgctgagctggtcaaacctggcgcttctgtgaagatgagctgcaaagccagcggctacgccttcagcagctactggatcaactggatgaagcagaaacccggccagggactcgaatggatcggccaaatctatcccggcgacggcgacaccaactacaacggcaagttcaagggcagagccacactgaccgccgatacctctagcagcacagcctacatgcagctgagcagcctgaccagcgaagatagcgccgtgtacttctgtgcccggtccatcacaacagtcgtgggctgcgctatggactattggggccagggaacaagcgtgaccgtgtctagtacgcgtatccagaaccctgatcctgccgtgtaccagctgcgggatagcaagagcagcgacaagagcgtgtgtctgttcaccgacttcgacagccagaccaacgtgtcccagagcaaggactccgacgtgtacatcaccgataagtgcgtgctggacatgcggagcatggacttcaagagcaactccgccgtggcctggtccaacaagtccgatttcgcctgcgccaacgccttcaacaacagcattatccccgaggacacattcttcccaagccccgagagcagctgcgacgtgaagctggtggaaaagagcttcgagacagacaccaacctgaacttccagaacctgagcgtgatcggcttcagaatcctgctgctgaaagtggccggctttaacctgctgatgaccctgcggctgtggtccagc

SEQ ID NO: 6292 - DNA, 3360 bp, Artificial Sequence
  Synthetic Polynucloetide
atggccttaccagtgaccgccttgctcctgccgctggccttgctgctccacgccgccaggccggaagtgcaggttttggagtctggcggaggactggttcagcctggcggatctctgagactgtcttgtgccgccagcggcttcaccttcagcaactttgccatgagctgggtccgacaggcccctggcaaaggacttgaatgggtgtccacaatcagcggcagcgccggcacaacagattacgccgattctgtgaagggcagattcaccatcagccgggacaacagcaagaaaaccctgtacctccagatgaacagcctgcgcgtggaagataccgccgtgtactactgtgccgatggcagaggccccttcttcgattatcgcggccagggcacactggtcaccgtttcttctggtaccggcggaggcggatctggcggcggaggtagcggtggcggaggatctgaattcgacatccagatgacacagagccctagcagcctgtctgccagcgtgggagacagagtgaccatcacatgcaaggccagcgaccacatcaacaactggctggcctggtatcagcagaagcctggacaggcccctaagctgctgatctacggcgctaccacactggaaacaggcgtgcccagcagattttctggcagcggctctggcaccgactacaccctgacaatatccagcctccagcctgaggacttcgccacctactactgtcagcagagctggaacaccccttggacattcggccagggcaccaagctggaaatcaagagactcgaggacctgaagaacgtgttcccacctgaggtggccgtgttcgagcctagcgaggccgagatcagccacacccagaaagccaccctcgtgtgcctggctaccggcttctaccccgaccatgtggaactgtcttggtgggtcaacggcaaagaggtgcacagcggcgtgtgtaccgacccccagccactgaaagaacagcccgccctgaacgacagccggtactgcctgagcagcagactgagagtgtccgccaccttctggcagaacccccggaaccacttcagatgccaggtgcagttctacggcctgagcgagaacgacgagtggacccaggacagagccaagcccgtgacccagatcgtgtctgccgaagcctggggcagagccgattgcggctttaccagcgagagctaccagcagggcgtgctgagcgccaccatcctgtacgagatcctgctgggcaaggccaccctgtacgccgtgctggtgtctgccctggtgctgatggctatggtcaagcggaaggacagccggggaagggccaagcgatctggatctggagcaacaaacttctcactactcaaacaagcaggtgacgtggaggagaatcccgggcctactagtatggactggatttggcgcatccttttccttgtcggcgctgctaccggcgcccattccgggcccgaagtgcagctggttgaatctggcggaggactggttcaggctggcggatctctgagactgtcttgtgccgccagcggcagaacctttagcatgggctggtttagacaggcccctggcaaagagagagagttcgtcgccgccatcacatactctggcggcagcccttactacgccgactctgtgaagggcagattcaccatcagccgggacaacgccaagaacaccgtgtacctccagatgaacagcctgaagcctgaggacaccgccgtgtactactgcgccgccaatccaacatacggcagcgactggaacgccgagaattggggccagggaacccaagtgacagtgtctagcggatccggcggcggaggatctggcggaggcggatctgggggcggaggctctttcgaacaagttcagcttcaacagcctggcgctgagctggtcaaacctggcgcttctgtgaagatgagctgcaaagccagcggctacgccttcagcagctactggatcaactggatgaagcagaaacccggccagggactcgaatggatcggccaaatctatcccggcgacggcgacaccaactacaacggcaagttcaagggcagagccacactgaccgccgatacctctagcagcacagcctacatgcagctgagcagcctgaccagcgaagatagcgccgtgtacttctgtgcccggtccatcacaacagtcgtgggctgcgctatggactattggggccagggaacaagcgtgaccgtgtctagtacgcgtatccagaaccctgatcctgccgtgtaccagctgcgggatagcaagagcagcgacaagagcgtgtgtctgttcaccgacttcgacagccagaccaacgtgtcccagagcaaggactccgacgtgtacatcaccgataagtgcgtgctggacatgcggagcatggacttcaagagcaactccgccgtggcctggtccaacaagtccgatttcgcctgcgccaacgccttcaacaacagcattatccccgaggacacattcttcccaagccccgagagcagctgcgacgtgaagctggtggaaaagagcttcgagacagacaccaacctgaacttccagaacctgagcgtgatcggcttcagaatcctgctgctgaaagtggccggctttaacctgctgatgaccctgcggctgtggtccagccgcgccaagagaagcggatctggcgtgaagcagaccctgaatttcgacctgctgaagctggctggcgacgtggaatccaacccaggcccttctagaggcgggatccacaccatggctacctacgaggtgctgtgcgaggtggcaagaaagctgggcaccgacgacagagaagtggtgctgttcctgctgaacgtgttcatccctcagcctacactggcccagctgatcggtgcactgagagccctgaaagaggaaggccggctgacctttcctctgctggccgaatgcctgttcagagccggaagaagggatctgctgcgggacctgctgcatctggaccccagatttctggaaagacacctggccggcaccatgagctacttcagcccttaccagctgaccgtgctgcacgttgacggcgaactgtgcgccagagatattcggagcctgatcttcctgagcaaggacaccatcggcagccggtctacccctcagacatttctgcactgggtgtactgcatggaaaacctggacctgctcggccccacagatgtggatgccctgatgtccatgctgagaagcctgagcagagtggacctccagagacaggtgcagacactgatgggactgcacctgagcggacctagccacagccagcactacagacacacccct

SEQ ID NO: 6293 - DNA, 2697 bp, Artificial Sequence
  Synthetic Polynucloetide
atggccttaccagtgaccgccttgctcctgccgctggccttgctgctccacgccgccaggccggaagtgcaggttttggagtctggcggaggactggttcagcctggcggatctctgagactgtcttgtgccgccagcggcttcaccttcagcaactttgccatgagctgggtccgacaggcccctggcaaaggacttgaatgggtgtccacaatcagcggcagcgccggcacaacagattacgccgattctgtgaagggcagattcaccatcagccgggacaacagcaagaaaaccctgtacctccagatgaacagcctgcgcgtggaagataccgccgtgtactactgtgccgatggcagaggccccttcttcgattatcgcggccagggcacactggtcaccgtttcttctggtaccggcggaggcggatctggcggcggaggtagcggtggcggaggatctgaattcgacatccagatgacacagagccctagcagcctgtctgccagcgtgggagacagagtgaccatcacatgcaaggccagcgaccacatcaacaactggctggcctggtatcagcagaagcctggacaggcccctaagctgctgatctacggcgctaccacactggaaacaggcgtgcccagcagattttctggcagcggctctggcaccgactacaccctgacaatatccagcctccagcctgaggacttcgccacctactactgtcagcagagctggaacaccccttggacattcggccagggcaccaagctggaaatcaagagactcgagatccagaaccctgatcctgccgtgtaccagctgcgggatagcaagagcagcgacaagagcgtgtgtctgttcaccgacttcgacagccagaccaacgtgtcccagagcaaggactccgacgtgtacatcaccgataagtgcgtgctggacatgcggagcatggacttcaagagcaactccgccgtggcctggtccaacaagtccgatttcgcctgcgccaacgccttcaacaacagcattatccccgaggacacattcttcccaagccccgagagcagctgcgacgtgaagctggtggaaaagagcttcgagacagacaccaacctgaacttccagaacctgagcgtgatcggcttcagaatcctgctgctgaaagtggccggctttaacctgctgatgaccctgcggctgtggtccagccgcgccaagagaagcggatctggcgtgaagcagaccctgaatttcgacctgctgaagctggctggcgacgtggaatccaacccaggccctactagtatggactggatttggcgcatccttttccttgtcggcgctgctaccggcgcccattccgggcccgaagtgcagctggttgaatctggcggaggactggttcaggctggcggatctctgagactgtcttgtgccgccagcggcagaacctttagcatgggctggtttagacaggcccctggcaaagagagagagttcgtcgccgccatcacatactctggcggcagcccttactacgccgactctgtgaagggcagattcaccatcagccgggacaacgccaagaacaccgtgtacctccagatgaacagcctgaagcctgaggacaccgccgtgtactactgcgccgccaatccaacatacggcagcgactggaacgccgagaattggggccagggaacccaagtgacagtgtctagcggatccggcggcggaggatctggcggaggcggatctgggggcggaggctctttcgaacaagttcagcttcaacagcctggcgctgagctggtcaaacctggcgcttctgtgaagatgagctgcaaagccagcggctacgccttcagcagctactggatcaactggatgaagcagaaacccggccagggactcgaatggatcggccaaatctatcccggcgacggcgacaccaactacaacggcaagttcaagggcagagccacactgaccgccgatacctctagcagcacagcctacatgcagctgagcagcctgaccagcgaagatagcgccgtgtacttctgtgcccggtccatcacaacagtcgtgggctgcgctatggactattggggccagggaacaagcgtgaccgtgtctagtacgcgtgaggacctgaagaacgtgttcccacctgaggtggccgtgttcgagcctagcgaggccgagatcagccacacccagaaagccaccctcgtgtgcctggctaccggcttctaccccgaccatgtggaactgtcttggtgggtcaacggcaaagaggtgcacagcggcgtgtgtaccgacccccagccactgaaagaacagcccgccctgaacgacagccggtactgcctgagcagcagactgagagtgtccgccaccttctggcagaacccccggaaccacttcagatgccaggtgcagttctacggcctgagcgagaacgacgagtggacccaggacagagccaagcccgtgacccagatcgtgtctgccgaagcctggggcagagccgattgcggctttaccagcgagagctaccagcagggcgtgctgagcgccaccatcctgtacgagatcctgctgggcaaggccaccctgtacgccgtgctggtgtctgccctggtgctgatggctatggtcaagcggaaggacagccgggga

SEQ ID NO: 6294 - DNA, 3363 bp, Artificial Sequence
  Synthetic Polynucloetide
atggccttaccagtgaccgccttgctcctgccgctggccttgctgctccacgccgccaggccggaagtgcaggttttggagtctggcggaggactggttcagcctggcggatctctgagactgtcttgtgccgccagcggcttcaccttcagcaactttgccatgagctgggtccgacaggcccctggcaaaggacttgaatgggtgtccacaatcagcggcagcgccggcacaacagattacgccgattctgtgaagggcagattcaccatcagccgggacaacagcaagaaaaccctgtacctccagatgaacagcctgcgcgtggaagataccgccgtgtactactgtgccgatggcagaggccccttcttcgattatcgcggccagggcacactggtcaccgtttcttctggtaccggcggaggcggatctggcggcggaggtagcggtggcggaggatctgaattcgacatccagatgacacagagccctagcagcctgtctgccagcgtgggagacagagtgaccatcacatgcaaggccagcgaccacatcaacaactggctggcctggtatcagcagaagcctggacaggcccctaagctgctgatctacggcgctaccacactggaaacaggcgtgcccagcagattttctggcagcggctctggcaccgactacaccctgacaatatccagcctccagcctgaggacttcgccacctactactgtcagcagagctggaacaccccttggacattcggccagggcaccaagctggaaatcaagagactcgagatccagaaccctgatcctgccgtgtaccagctgcgggatagcaagagcagcgacaagagcgtgtgtctgttcaccgacttcgacagccagaccaacgtgtcccagagcaaggactccgacgtgtacatcaccgataagtgcgtgctggacatgcggagcatggacttcaagagcaactccgccgtggcctggtccaacaagtccgatttcgcctgcgccaacgccttcaacaacagcattatccccgaggacacattcttcccaagccccgagagcagctgcgacgtgaagctggtggaaaagagcttcgagacagacaccaacctgaacttccagaacctgagcgtgatcggcttcagaatcctgctgctgaaagtggccggctttaacctgctgatgaccctgcggctgtggtccagccgcgccaagagaagcggatctggcgtgaagcagaccctgaatttcgacctgctgaagctggctggcgacgtggaatccaacccaggccctactagtatggactggatttggcgcatccttttccttgtcggcgctgctaccggcgcccattccgggcccgaagtgcagctggttgaatctggcggaggactggttcaggctggcggatctctgagactgtcttgtgccgccagcggcagaacctttagcatgggctggtttagacaggcccctggcaaagagagagagttcgtcgccgccatcacatactctggcggcagcccttactacgccgactctgtgaagggcagattcaccatcagccgggacaacgccaagaacaccgtgtacctccagatgaacagcctgaagcctgaggacaccgccgtgtactactgcgccgccaatccaacatacggcagcgactggaacgccgagaattggggccagggaacccaagtgacagtgtctagcggatccggcggcggaggatctggcggaggcggatctgggggcggaggctctttcgaacaagttcagcttcaacagcctggcgctgagctggtcaaacctggcgcttctgtgaagatgagctgcaaagccagcggctacgccttcagcagctactggatcaactggatgaagcagaaacccggccagggactcgaatggatcggccaaatctatcccggcgacggcgacaccaactacaacggcaagttcaagggcagagccacactgaccgccgatacctctagcagcacagcctacatgcagctgagcagcctgaccagcgaagatagcgccgtgtacttctgtgcccggtccatcacaacagtcgtgggctgcgctatggactattggggccagggaacaagcgtgaccgtgtctagtacgcgtgaggacctgaagaacgtgttcccacctgaggtggccgtgttcgagcctagcgaggccgagatcagccacacccagaaagccaccctcgtgtgcctggctaccggcttctaccccgaccatgtggaactgtcttggtgggtcaacggcaaagaggtgcacagcggcgtgtgtaccgacccccagccactgaaagaacagcccgccctgaacgacagccggtactgcctgagcagcagactgagagtgtccgccaccttctggcagaacccccggaaccacttcagatgccaggtgcagttctacggcctgagcgagaacgacgagtggacccaggacagagccaagcccgtgacccagatcgtgtctgccgaagcctggggcagagccgattgcggctttaccagcgagagctaccagcagggcgtgctgagcgccaccatcctgtacgagatcctgctgggcaaggccaccctgtacgccgtgctggtgtctgccctggtgctgatggctatggtcaagcggaaggacagccggggaagggccaagcgatctggatctggagcaacaaacttctcactactcaaacaagcaggtgacgtggaggagaatcccgggccttctagaggcgggatccacaccatggctacctacgaggtgctgtgcgaggtggcaagaaagctgggcaccgacgacagagaagtggtgctgttcctgctgaacgtgttcatccctcagcctacactggcccagctgatcggtgcactgagagccctgaaagaggaaggccggctgacctttcctctgctggccgaatgcctgttcagagccggaagaagggatctgctgcgggacctgctgcatctggaccccagatttctggaaagacacctggccggcaccatgagctacttcagcccttaccagctgaccgtgctgcacgttgacggcgaactgtgcgccagagatattcggagcctgatcttcctgagcaaggacaccatcggcagccggtctacccctcagacatttctgcactgggtgtactgcatggaaaacctggacctgctcggccccacagatgtggatgccctgatgtccatgctgagaagcctgagcagagtggacctccagagacaggtgcagacactgatgggactgcacctgagcggacctagccacagccagcactacagacacacccct

SEQ ID NO: 6295 - DNA, 3387 bp, Artificial Sequence
  Synthetic Polynucloetide
atggccttaccagtgaccgccttgctcctgccgctggccttgctgctccacgccgccaggccggaagtgcaggttttggagtctggcggaggactggttcagcctggcggatctctgagactgtcttgtgccgccagcggcttcaccttcagcaactttgccatgagctgggtccgacaggcccctggcaaaggacttgaatgggtgtccacaatcagcggcagcgccggcacaacagattacgccgattctgtgaagggcagattcaccatcagccgggacaacagcaagaaaaccctgtacctccagatgaacagcctgcgcgtggaagataccgccgtgtactactgtgccgatggcagaggccccttcttcgattatcgcggccagggcacactggtcaccgtttcttctggtaccggcggaggcggatctggcggcggaggtagcggtggcggaggatctgaattcgacatccagatgacacagagccctagcagcctgtctgccagcgtgggagacagagtgaccatcacatgcaaggccagcgaccacatcaacaactggctggcctggtatcagcagaagcctggacaggcccctaagctgctgatctacggcgctaccacactggaaacaggcgtgcccagcagattttctggcagcggctctggcaccgactacaccctgacaatatccagcctccagcctgaggacttcgccacctactactgtcagcagagctggaacaccccttggacattcggccagggcaccaagctggaaatcaagagactcgaggacctgaagaacgtgttcccacctgaggtggccgtgttcgagcctagcgaggccgagatcagccacacccagaaagccaccctcgtgtgcctggctaccggcttctaccccgaccatgtggaactgtcttggtgggtcaacggcaaagaggtgcacagcggcgtgtctaccgacccccagccactgaaagaacagcccgccctgaacgacagccggtactgcctgagcagcagactgagagtgtccgccaccttctggcagaacccccggaaccacttcagatgccaggtgcagttctacggcctgagcgagaacgacgagtggacccaggacagagccaagcccgtgacccagatcgtgtctgccgaagcctggggcagagccgattgcggctttaccagcgagagctaccagcagggcgtgctgagcgccaccatcctgtacgagatcctgctgggcaaggccaccctgtacgccgtgctggtgtctgccctggtgctgatggctatggtcaagcggaaggacagccggggaagggccaagcgatctggatctggagcaacaaacttctcactactcaaacaagcaggtgacgtggaggagaatcccgggcctactagtatggactggatttggcgcatccttttccttgtcggcgctgctaccggcgcccattccgggcccgaagtgcagctggttgaatctggcggaggactggttcaggctggcggatctctgagactgtcttgtgccgccagcggcagaacctttagcatgggctggtttagacaggcccctggcaaagagagagagttcgtcgccgccatcacatactctggcggcagcccttactacgccgactctgtgaagggcagattcaccatcagccgggacaacgccaagaacaccgtgtacctccagatgaacagcctgaagcctgaggacaccgccgtgtactactgcgccgccaatccaacatacggcagcgactggaacgccgagaattggggccagggaacccaagtgacagtgtctagcggatccggcggcggaggatctggcggaggcggatctgggggcggaggctctttcgaacaagttcagcttcaacagcctggcgctgagctggtcaaacctggcgcttctgtgaagatgagctgcaaagccagcggctacgccttcagcagctactggatcaactggatgaagcagaaacccggccagggactcgaatggatcggccaaatctatcccggcgacggcgacaccaactacaacggcaagttcaagggcagagccacactgaccgccgatacctctagcagcacagcctacatgcagctgagcagcctgaccagcgaagatagcgccgtgtacttctgtgcccggtccatcacaacagtcgtgggctgcgctatggactattggggccagggaacaagcgtgaccgtgtctagtacgcgtatccagaaccctgatcctgccgtgtaccagctgcgggatagcaagagcagcgacaagagcgtgtgtctgttcaccgacttcgacagccagaccaacgtgtcccagagcaaggactccgacgtgtacatcaccgataagaccgtgctggacatgcggagcatggacttcaagagcaactccgccgtggcctggtccaacaagtccgatttcgcctgcgccaacgccttcaacaacagcattatccccgaggacacattcttcccaagccccgagagcagctgcgacgtgaagctggtggaaaagagcttcgagacagacaccaacctgaacttccagaacctgagcgtgatcggcttcagaatcctgctgctgaaagtggccggctttaacctgctgatgaccctgcggctgtggtccagccgcgccaagagaagcggatctggcgtgaagcagaccctgaatttcgacctgctgaagctggctggcgacgtggaatccaacccaggcccttctagaggccatatgaccgagtacaagcccacggtgcgcctcgccacccgcgacgacgtccccagggccgtacgcaccctcgccgccgcgttcgccgactaccccgccacgcgccacaccgtcgatccggaccgccacatcgagcgggtcaccgagctgcaagaactcttcctcacgcgcgtcgggctcgacatcggcaaggtgtgggtcgcggacgacggcgccgcggtggcggtctggaccacgccggagagcgtcgaagcgggggcggtgttcgccgagatcggcccgcgcatggccgagttgagcggttcccggctggccgcgcagcaacagatggaaggcctcctggcgccgcaccggcccaaggagcccgcgtggttcctggccaccgtcggcgtctcgcccgaccaccagggcaagggtctgggcagcgccgtcgtgctccccggagtggaggcggccgagcgcgccggggtgcccgccttcctggagacctccgcgccccgcaacctccccttctacgagcggctcggcttcaccgtcaccgccgacgtcgaggtgcccgaaggaccgcgcacctggtgcatgacccgcaagcccggtgcctga

SEQ ID NO: 6296 - DNA, 3633 bp, Artificial Sequence
  Synthetic Polynucloetide
atggccttaccagtgaccgccttgctcctgccgctggccttgctgctccacgccgccaggccggaagtgcaggttttggagtctggcggaggactggttcagcctggcggatctctgagactgtcttgtgccgccagcggcttcaccttcagcaactttgccatgagctgggtccgacaggcccctggcaaaggacttgaatgggtgtccacaatcagcggcagcgccggcacaacagattacgccgattctgtgaagggcagattcaccatcagccgggacaacagcaagaaaaccctgtacctccagatgaacagcctgcgcgtggaagataccgccgtgtactactgtgccgatggcagaggccccttcttcgattatcgcggccagggcacactggtcaccgtttcttctggtaccggcggaggcggatctggcggcggaggtagcggtggcggaggatctgaattcgacatccagatgacacagagccctagcagcctgtctgccagcgtgggagacagagtgaccatcacatgcaaggccagcgaccacatcaacaactggctggcctggtatcagcagaagcctggacaggcccctaagctgctgatctacggcgctaccacactggaaacaggcgtgcccagcagattttctggcagcggctctggcaccgactacaccctgacaatatccagcctccagcctgaggacttcgccacctactactgtcagcagagctggaacaccccttggacattcggccagggcaccaagctggaaatcaagagactcgaggacctgaagaacgtgttcccacctgaggtggccgtgttcgagcctagcgaggccgagatcagccacacccagaaagccaccctcgtgtgcctggctaccggcttctaccccgaccatgtggaactgtcttggtgggtcaacggcaaagaggtgcacagcggcgtgtctaccgacccccagccactgaaagaacagcccgccctgaacgacagccggtactgcctgagcagcagactgagagtgtccgccaccttctggcagaacccccggaaccacttcagatgccaggtgcagttctacggcctgagcgagaacgacgagtggacccaggacagagccaagcccgtgacccagatcgtgtctgccgaagcctggggcagagccgattgcggctttaccagcgagagctaccagcagggcgtgctgagcgccaccatcctgtacgagatcctgctgggcaaggccaccctgtacgccgtgctggtgtctgccctggtgctgatggctatggtcaagcggaaggacagccggggaagggccaagcgatctggatctggagcaacaaacttctcactactcaaacaagcaggtgacgtggaggagaatcccgggcctactagtatggactggatttggcgcatccttttccttgtcggcgctgctaccggcgcccattccgggcccgaagtgcagctggttgaatctggcggaggactggttcaggctggcggatctctgagactgtcttgtgccgccagcggcagaacctttagcatgggctggtttagacaggcccctggcaaagagagagagttcgtcgccgccatcacatactctggcggcagcccttactacgccgactctgtgaagggcagattcaccatcagccgggacaacgccaagaacaccgtgtacctccagatgaacagcctgaagcctgaggacaccgccgtgtactactgcgccgccaatccaacatacggcagcgactggaacgccgagaattggggccagggaacccaagtgacagtgtctagcggatccggcggcggaggatctggcggaggcggatctgggggcggaggctctttcgaacaagttcagcttcaacagcctggcgctgagctggtcaaacctggcgcttctgtgaagatgagctgcaaagccagcggctacgccttcagcagctactggatcaactggatgaagcagaaacccggccagggactcgaatggatcggccaaatctatcccggcgacggcgacaccaactacaacggcaagttcaagggcagagccacactgaccgccgatacctctagcagcacagcctacatgcagctgagcagcctgaccagcgaagatagcgccgtgtacttctgtgcccggtccatcacaacagtcgtgggctgcgctatggactattggggccagggaacaagcgtgaccgtgtctagtacgcgtgagcagaaactgatctcggaagaggatgggagcggcaccccattcccttctctggcccctcccatcatgctgctggtggacggcaagcagcagatggtggtcgtgtgcctggtgctggatgtggccccacctggactggacagccccatctggtttagcgccggcaatggctctgccctggacgcctttacctacggcccaagccctgccaccgatggcacctggacaaatctggcccacctgagcctgcccagcgaggaactggcttcttgggagcctctcgtgtgccacacaggacctggcgctgagggacacagcagatccacccagcctatgcacctgtctggcgaggccagcaccgccagaacctgtcctcaggaacctctgagaggcacccctggcggagcactgtggctgggagtgctgagactgctgctgttcaagctgctgctgtttgacctgctgctgacctgctcctgtctgtgcgatcctgccggccctctgccttctcctgccaccaccacaagactgagagccctgggcagccacagactgcaccctgccacagagacaggcggcagagaggccacaagcagccctagaccccagcccagagacagaagatggggcgataccccccctggcagaaagcctggatctccagtccgcgccaagagaagcggatctggcgtgaagcagaccctgaatttcgacctgctgaagctggctggcgacgtggaatccaacccaggcccttctagaggccatatgaccgagtacaagcccacggtgcgcctcgccacccgcgacgacgtccccagggccgtacgcaccctcgccgccgcgttcgccgactaccccgccacgcgccacaccgtcgatccggaccgccacatcgagcgggtcaccgagctgcaagaactcttcctcacgcgcgtcgggctcgacatcggcaaggtgtgggtcgcggacgacggcgccgcggtggcggtctggaccacgccggagagcgtcgaagcgggggcggtgttcgccgagatcggcccgcgcatggccgagttgagcggttcccggctggccgcgcagcaacagatggaaggcctcctggcgccgcaccggcccaaggagcccgcgtggttcctggccaccgtcggcgtctcgcccgaccaccagggcaagggtctgggcagcgccgtcgtgctccccggagtggaggcggccgagcgcgccggggtgcccgccttcctggagacctccgcgccccgcaacctccccttctacgagcggctcggcttcaccgtcaccgccgacgtcgaggtgcccgaaggaccgcgcacctggtgcatgacccgcaagcccggtgcctga

SEQ ID NO: 6297 - DNA, 3498 bp, Artificial Sequence
  Synthetic Polynucloetide
atggccttaccagtgaccgccttgctcctgccgctggccttgctgctccacgccgccaggccggaagtgcaggttttggagtctggcggaggactggttcagcctggcggatctctgagactgtcttgtgccgccagcggcttcaccttcagcaactttgccatgagctgggtccgacaggcccctggcaaaggacttgaatgggtgtccacaatcagcggcagcgccggcacaacagattacgccgattctgtgaagggcagattcaccatcagccgggacaacagcaagaaaaccctgtacctccagatgaacagcctgcgcgtggaagataccgccgtgtactactgtgccgatggcagaggccccttcttcgattatcgcggccagggcacactggtcaccgtttcttctggtaccggcggaggcggatctggcggcggaggtagcggtggcggaggatctgaattcgacatccagatgacacagagccctagcagcctgtctgccagcgtgggagacagagtgaccatcacatgcaaggccagcgaccacatcaacaactggctggcctggtatcagcagaagcctggacaggcccctaagctgctgatctacggcgctaccacactggaaacaggcgtgcccagcagattttctggcagcggctctggcaccgactacaccctgacaatatccagcctccagcctgaggacttcgccacctactactgtcagcagagctggaacaccccttggacattcggccagggcaccaagctggaaatcaagagactcgaggggaaaccaattcccaaccctcttctgggactggattcaaccggcagcggcgacaagcagctggacgccgacgtgtcccccaagcctaccatcttcctgccctctatcgccgagacaaagctccagaaggccggcacctacctgtgcctgctggaaaagttcttcccagatgtgattaagatccactggcaggaaaagaagtccaacaccatcctgggcagccaggaaggcaacaccatgaagaccaacgacacctacatgaagttcagctggctgaccgtgcccgagaagtccctggacaaagaacacagatgcatcgtgcggcacgaaaacaacaagaacggcgtggaccaggaaatcatcttcccacccatcaagaccgatgtgattacaatggaccccaaggacaactgctccaaggacgccaacgataccctgctgctccagctgaccaacaccagcgcctactacatgtacttgttgctgctgctgaagtccgtggtgtacttcgccatcatcacatgctgcctgctgcggagaaccgccttctgctgcaacggcgagaagtctagggccaagcgatctggatctggagcaacaaacttctcactactcaaacaagcaggtgacgtggaggagaatcccgggcctactagtatggactggatttggcgcatccttttccttgtcggcgctgctaccggcgcccattccgggcccgaagtgcagctggttgaatctggcggaggactggttcaggctggcggatctctgagactgtcttgtgccgccagcggcagaacctttagcatgggctggtttagacaggcccctggcaaagagagagagttcgtcgccgccatcacatactctggcggcagcccttactacgccgactctgtgaagggcagattcaccatcagccgggacaacgccaagaacaccgtgtacctccagatgaacagcctgaagcctgaggacaccgccgtgtactactgcgccgccaatccaacatacggcagcgactggaacgccgagaattggggccagggaacccaagtgacagtgtctagcggatccggcggcggaggatctggcggaggcggatctgggggcggaggctctttcgaacaagttcagcttcaacagcctggcgctgagctggtcaaacctggcgcttctgtgaagatgagctgcaaagccagcggctacgccttcagcagctactggatcaactggatgaagcagaaacccggccagggactcgaatggatcggccaaatctatcccggcgacggcgacaccaactacaacggcaagttcaagggcagagccacactgaccgccgatacctctagcagcacagcctacatgcagctgagcagcctgaccagcgaagatagcgccgtgtacttctgtgcccggtccatcacaacagtcgtgggctgcgctatggactattggggccagggaacaagcgtgaccgtgtctagtacgcgtgagcagaaactgatctcggaagaggatgggagcggcagccagcctcacaccaagcccagcgtgttcgtgatgaagaacggcaccaacgtggcctgcctcgtgaaagagttctaccccaaggacatcaggatcaacctggtgtccagcaagaagatcaccgagttcgaccccgccatcgtgatctcccccagcggcaagtacaacgccgtgaagctggggaagtacgaggacagcaacagcgtgacctgctccgtgcagcacgacaacaagaccgtgcacagcaccgactttgaagtgaaaaccgactccaccgaccacgtgaagcccaaagagacagagaacaccaagcagcccagcaagagctgccacaagcccaaggccatcgtgcacaccgagaaagtgaacatgatgagcctgaccgtgctgggcctgcggatgctgttcgccaaaaccgtggccgtgaacttcctgctgaccgccaagctgttcttcctccgcgccaagagaagcggatctggcgtgaagcagaccctgaatttcgacctgctgaagctggctggcgacgtggaatccaacccaggcccttctagaggccatatgaccgagtacaagcccacggtgcgcctcgccacccgcgacgacgtccccagggccgtacgcaccctcgccgccgcgttcgccgactaccccgccacgcgccacaccgtcgatccggaccgccacatcgagcgggtcaccgagctgcaagaactcttcctcacgcgcgtcgggctcgacatcggcaaggtgtgggtcgcggacgacggcgccgcggtggcggtctggaccacgccggagagcgtcgaagcgggggcggtgttcgccgagatcggcccgcgcatggccgagttgagcggttcccggctggccgcgcagcaacagatggaaggcctcctggcgccgcaccggcccaaggagcccgcgtggttcctggccaccgtcggcgtctcgcccgaccaccagggcaagggtctgggcagcgccgtcgtgctccccggagtggaggcggccgagcgcgccggggtgcccgccttcctggagacctccgcgccccgcaacctccccttctacgagcggctcggcttcaccgtcaccgccgacgtcgaggtgcccgaaggaccgcgcacctggtgcatgacccgcaagcccggtgcctga

SEQ ID NO: 6298 - DNA, 2709 bp, Artificial Sequence
  Synthetic Polynucloetide
atggccttaccagtgaccgccttgctcctgccgctggccttgctgctccacgccgccaggccggaagtgcaggttttggagtctggcggaggactggttcagcctggcggatctctgagactgtcttgtgccgccagcggcttcaccttcagcaactttgccatgagctgggtccgacaggcccctggcaaaggacttgaatgggtgtccacaatcagcggcagcgccggcacaacagattacgccgattctgtgaagggcagattcaccatcagccgggacaacagcaagaaaaccctgtacctccagatgaacagcctgcgcgtggaagataccgccgtgtactactgtgccgatggcagaggccccttcttcgattatcgcggccagggcacactggtcaccgtttcttctggtaccggcggaggcggatctggcggcggaggtagcggtggcggaggatctgaattcgacatccagatgacacagagccctagcagcctgtctgccagcgtgggagacagagtgaccatcacatgcaaggccagcgaccacatcaacaactggctggcctggtatcagcagaagcctggacaggcccctaagctgctgatctacggcgctaccacactggaaacaggcgtgcccagcagattttctggcagcggctctggcaccgactacaccctgacaatatccagcctccagcctgaggacttcgccacctactactgtcagcagagctggaacaccccttggacattcggccagggcaccaagctggaaatcaagagactcgagagccagcctcacaccaagcccagcgtgttcgtgatgaagaacggcaccaacgtggcctgcctcgtgaaagagttctaccccaaggacatcaggatcaacctggtgtccagcaagaagatcaccgagttcgaccccgccatcgtgatctcccccagcggcaagtacaacgccgtgaagctggggaagtacgaggacagcaacagcgtgacctgctccgtgcagcacgacaacaagaccgtgcacagcaccgactttgaagtgaaaaccgactccaccgaccacgtgaagcccaaagagacagagaacaccaagcagcccagcaagagctgccacaagcccaaggccatcgtgcacaccgagaaagtgaacatgatgagcctgaccgtgctgggcctgcggatgctgttcgccaaaaccgtggccgtgaacttcctgctgaccgccaagctgttcttcctcagggccaagcgatctggatctggagcaacaaacttctcactactcaaacaagcaggtgacgtggaggagaatcccgggcctactagtatggactggatttggcgcatccttttccttgtcggcgctgctaccggcgcccattccgggcccgaagtgcagctggttgaatctggcggaggactggttcaggctggcggatctctgagactgtcttgtgccgccagcggcagaacctttagcatgggctggtttagacaggcccctggcaaagagagagagttcgtcgccgccatcacatactctggcggcagcccttactacgccgactctgtgaagggcagattcaccatcagccgggacaacgccaagaacaccgtgtacctccagatgaacagcctgaagcctgaggacaccgccgtgtactactgcgccgccaatccaacatacggcagcgactggaacgccgagaattggggccagggaacccaagtgacagtgtctagcggatccggcggcggaggatctggcggaggcggatctgggggcggaggctctttcgaacaagttcagcttcaacagcctggcgctgagctggtcaaacctggcgcttctgtgaagatgagctgcaaagccagcggctacgccttcagcagctactggatcaactggatgaagcagaaacccggccagggactcgaatggatcggccaaatctatcccggcgacggcgacaccaactacaacggcaagttcaagggcagagccacactgaccgccgatacctctagcagcacagcctacatgcagctgagcagcctgaccagcgaagatagcgccgtgtacttctgtgcccggtccatcacaacagtcgtgggctgcgctatggactattggggccagggaacaagcgtgaccgtgtctagtacgcgtgacaagcagctggacgccgacgtgtcccccaagcctaccatcttcctgccctctatcgccgagacaaagctccagaaggccggcacctacctgtgcctgctggaaaagttcttcccagatgtgattaagatccactggcaggaaaagaagtccaacaccatcctgggcagccaggaaggcaacaccatgaagaccaacgacacctacatgaagttcagctggctgaccgtgcccgagaagtccctggacaaagaacacagatgcatcgtgcggcacgaaaacaacaagaacggcgtggaccaggaaatcatcttcccacccatcaagaccgatgtgattacaatggaccccaaggacaactgctccaaggacgccaacgataccctgctgctccagctgaccaacaccagcgcctactacatgtacttgttgctgctgctgaagtccgtggtgtacttcgccatcatcacatgctgcctgctgcggagaaccgccttctgctgcaacggcgagaagtct

SEQ ID NO: 6299 - DNA, 3918 bp, Artificial Sequence
  Synthetic Polynucloetide
atggccttaccagtgaccgccttgctcctgccgctggccttgctgctccacgccgccaggccggaagtgcaggttttggagtctggcggaggactggttcagcctggcggatctctgagactgtcttgtgccgccagcggcttcaccttcagcaactttgccatgagctgggtccgacaggcccctggcaaaggacttgaatgggtgtccacaatcagcggcagcgccggcacaacagattacgccgattctgtgaagggcagattcaccatcagccgggacaacagcaagaaaaccctgtacctccagatgaacagcctgcgcgtggaagataccgccgtgtactactgtgccgatggcagaggccccttcttcgattatcgcggccagggcacactggtcaccgtttcttctggtaccggcggaggcggatctggcggcggaggtagcggtggcggaggatctgaattcgacatccagatgacacagagccctagcagcctgtctgccagcgtgggagacagagtgaccatcacatgcaaggccagcgaccacatcaacaactggctggcctggtatcagcagaagcctggacaggcccctaagctgctgatctacggcgctaccacactggaaacaggcgtgcccagcagattttctggcagcggctctggcaccgactacaccctgacaatatccagcctccagcctgaggacttcgccacctactactgtcagcagagctggaacaccccttggacattcggccagggcaccaagctggaaatcaagagaggacagcctaaggccaatcctaccgtgacactgttccctccaagcagcgaagaactccaggccaacaaggccacacttgtgtgcctgatctccgacttctaccctggggctgtgacagtggcttggaaggccgatggatctcctgtgaaagccggcgtggaaaccaccaagccatccaagcagagcaacaacaaatacgccgccagctcctacctgagcctgacacctgagcagtggaagtcccacagatcctacagctgccaagtgacccacgaaggcagcaccgtggaaaagacagtggcccctacagagtgcagcggatcccagagcttcggcctgctggaccccaagctgtgctacctgctggatggcatcctgttcatctacggcgtgatcctgaccgccctgttcctgagagtgaagttcagcagaagcgccgacgcccctgcctaccagcagggacagaaccaactgtacaacgagctgaacctgggcagacgggaagagtacgacgtgctggacaagcggagaggcagggaccctgagatgggcggaaagccccagcggagaaagaacccccaggaaggactgtataacgaactccagaaagacaagatggccgaagcctacagcgagatcggcatgaagggcgagcggagaagaggcaagggccacgatggcctgtaccagggcctgagcaccgccaccaaggacacctatgacgccctgcacatgcaggccctgcctccaagaagggccaagcgatctggatctggagcaacaaacttctcactactcaaacaagcaggtgacgtggaggagaatcccgggcctactagtatggactggatttggcgcatccttttccttgtcggcgctgctaccggcgcccattccgggcccgaagtgcagctggttgaatctggcggaggactggttcaggctggcggatctctgagactgtcttgtgccgccagcggcagaacctttagcatgggctggtttagacaggcccctggcaaagagagagagttcgtcgccgccatcacatactctggcggcagcccttactacgccgactctgtgaagggcagattcaccatcagccgggacaacgccaagaacaccgtgtacctccagatgaacagcctgaagcctgaggacaccgccgtgtactactgcgccgccaatccaacatacggcagcgactggaacgccgagaattggggccagggaacccaagtgacagtgtctagcggatccggcggcggaggatctggcggaggcggatctgggggcggaggctctttcgaacaagttcagcttcaacagcctggcgctgagctggtcaaacctggcgcttctgtgaagatgagctgcaaagccagcggctacgccttcagcagctactggatcaactggatgaagcagaaacccggccagggactcgaatggatcggccaaatctatcccggcgacggcgacaccaactacaacggcaagttcaagggcagagccacactgaccgccgatacctctagcagcacagcctacatgcagctgagcagcctgaccagcgaagatagcgccgtgtacttctgtgcccggtccatcacaacagtcgtgggctgcgctatggactattggggccagggaacaagcgtgaccgtgtctagtgcctctacaaagggaccctccgtgtttcctctggctcccagcagcaagtctacaagcggaggaacagccgctctgggctgcctggtcaaggattactttcccgagcctgtgaccgtgtcctggaatagcggagcactgacaagcggcgtgcacacctttccagccgtgctgcaaagcagcggcctgtactctctgagcagcgtggtcacagtgcctagctctagcctgggcacccagacctacatctgcaatgtgaaccacaagcctagcaacaccaaggtggacaagagagtggaacccaagagctgtggtacccagagttttgggttgttggaccctaaattgtgctatctgttggacggaatcctgttcatttacggagtgatcctgaccgcattgttcctgcgggttaagttttccagatccgcagacgcacccgcttaccaacaagggcagaaccaactctacaatgaacttaatttggggcggagggaagagtacgacgttctggacaaaaggaggggacgagatcccgagatgggcggaaagcctcagcgaaggaagaatccgcaagaggggctttataacgaactccagaaagataaaatggcagaagcctatagtgagattgggatgaagggagaaaggaggaggggtaaaggtcacgatgggttgtaccaaggattgagcacagccactaaagatacctatgatgcgctccacatgcaggccctgccgccaagacgcgccaagagaagcggatctggcgtgaagcagaccctgaatttcgacctgctgaagctggctggcgacgtggaatccaacccaggcccttctagaggccatatgaccgagtacaagcccacggtgcgcctcgccacccgcgacgacgtccccagggccgtacgcaccctcgccgccgcgttcgccgactaccccgccacgcgccacaccgtcgatccggaccgccacatcgagcgggtcaccgagctgcaagaactcttcctcacgcgcgtcgggctcgacatcggcaaggtgtgggtcgcggacgacggcgccgcggtggcggtctggaccacgccggagagcgtcgaagcgggggcggtgttcgccgagatcggcccgcgcatggccgagttgagcggttcccggctggccgcgcagcaacagatggaaggcctcctggcgccgcaccggcccaaggagcccgcgtggttcctggccaccgtcggcgtctcgcccgaccaccagggcaagggtctgggcagcgccgtcgtgctccccggagtggaggcggccgagcgcgccggggtgcccgccttcctggagacctccgcgccccgcaacctccccttctacgagcggctcggcttcaccgtcaccgccgacgtcgaggtgcccgaaggaccgcgcacctggtgcatgacccgcaagcccggtgcctga

SEQ ID NO: 6300 - DNA, 3273 bp, Artificial Sequence
  Synthetic Polynucloetide
atggccttaccagtgaccgccttgctcctgccgctggccttgctgctccacgccgccaggccggaagtgcaggttttggagtctggcggaggactggttcagcctggcggatctctgagactgtcttgtgccgccagcggcttcaccttcagcaactttgccatgagctgggtccgacaggcccctggcaaaggacttgaatgggtgtccacaatcagcggcagcgccggcacaacagattacgccgattctgtgaagggcagattcaccatcagccgggacaacagcaagaaaaccctgtacctccagatgaacagcctgcgcgtggaagataccgccgtgtactactgtgccgatggcagaggccccttcttcgattatcgcggccagggcacactggtcaccgtttcttctggtaccggcggaggcggatctggcggcggaggtagcggtggcggaggatctgaattcgacatccagatgacacagagccctagcagcctgtctgccagcgtgggagacagagtgaccatcacatgcaaggccagcgaccacatcaacaactggctggcctggtatcagcagaagcctggacaggcccctaagctgctgatctacggcgctaccacactggaaacaggcgtgcccagcagattttctggcagcggctctggcaccgactacaccctgacaatatccagcctccagcctgaggacttcgccacctactactgtcagcagagctggaacaccccttggacattcggccagggcaccaagctggaaatcaagagactcgaggacctgaagaacgtgttcccacctgaggtggccgtgttcgagcctagcgaggccgagatcagccacacccagaaagccaccctcgtgtgcctggctaccggcttctaccccgaccatgtggaactgtcttggtgggtcaacggcaaagaggtgcacagcggcgtgtctaccgacccccagccactgaaagaacagcccgccctgaacgacagccggtactgcctgagcagcagactgagagtgtccgccaccttctggcagaacccccggaaccacttcagatgccaggtgcagttctacggcctgagcgagaacgacgagtggacccaggacagagccaagcccgtgacccagatcgtgtctgccgaagcctggggcagagccgattgcggatcccagagcttcggcctgctggaccccaagctgtgctacctgctggatggcatcctgttcatctacggcgtgatcctgaccgccctgttcctgagagtgaagttcagcagaagcgccgacgcccctgcctaccagcagggacagaaccaactgtacaacgagctgaacctgggcagacgggaagagtacgacgtgctggacaagcggagaggcagggaccctgagatgggcggaaagccccagcggagaaagaacccccaggaaggactgtataacgaactccagaaagacaagatggccgaagcctacagcgagatcggcatgaagggcgagcggagaagaggcaagggccacgatggcctgtaccagggcctgagcaccgccaccaaggacacctatgacgccctgcacatgcaggccctgcctccaagaagggccaagcgatctggatctggagcaacaaacttctcactactcaaacaagcaggtgacgtggaggagaatcccgggcctactagtatggactggatttggcgcatccttttccttgtcggcgctgctaccggcgcccattccgggcccgaagtgcagctggttgaatctggcggaggactggttcaggctggcggatctctgagactgtcttgtgccgccagcggcagaacctttagcatgggctggtttagacaggcccctggcaaagagagagagttcgtcgccgccatcacatactctggcggcagcccttactacgccgactctgtgaagggcagattcaccatcagccgggacaacgccaagaacaccgtgtacctccagatgaacagcctgaagcctgaggacaccgccgtgtactactgcgccgccaatccaacatacggcagcgactggaacgccgagaattggggccagggaacccaagtgacagtgtctagcggatccggcggcggaggatctggcggaggcggatctgggggcggaggctctttcgaacaagttcagcttcaacagcctggcgctgagctggtcaaacctggcgcttctgtgaagatgagctgcaaagccagcggctacgccttcagcagctactggatcaactggatgaagcagaaacccggccagggactcgaatggatcggccaaatctatcccggcgacggcgacaccaactacaacggcaagttcaagggcagagccacactgaccgccgatacctctagcagcacagcctacatgcagctgagcagcctgaccagcgaagatagcgccgtgtacttctgtgcccggtccatcacaacagtcgtgggctgcgctatggactattggggccagggaacaagcgtgaccgtgtctagtacgcgtatccagaaccctgatcctgccgtgtaccagctgcgggatagcaagagcagcgacaagagcgtgtgtctgttcaccgacttcgacagccagaccaacgtgtcccagagcaaggactccgacgtgtacatcaccgataagaccgtgctggacatgcggagcatggacttcaagagcaactccgccgtggcctggtccaacaagtccgatttcgcctgcgccaacgccttcaacaacagcattatccccgaggacacattcttcccaagccccgagagcagctgcggtacccagagttttgggttgttggaccctaaattgtgctatctgttggacggaatcctgttcatttacggagtgatcctgaccgcattgttcctgcgggttaagttttccagatccgcagacgcacccgcttaccaacaagggcagaaccaactctacaatgaacttaatttggggcggagggaagagtacgacgttctggacaaaaggaggggacgagatcccgagatgggcggaaagcctcagcgaaggaagaatccgcaagaggggctttataacgaactccagaaagataaaatggcagaagcctatagtgagattgggatgaagggagaaaggaggaggggtaaaggtcacgatgggttgtaccaaggattgagcacagccactaaagatacctatgatgcgctccacatgcaggccctgccgccaaga

SEQ ID NO: 6301 - DNA, 3273 bp, Artificial Sequence
  Synthetic Polynucloetide
atggccttaccagtgaccgccttgctcctgccgctggccttgctgctccacgccgccaggccggaagtgcaggttttggagtctggcggaggactggttcagcctggcggatctctgagactgtcttgtgccgccagcggcttcaccttcagcaactttgccatgagctgggtccgacaggcccctggcaaaggacttgaatgggtgtccacaatcagcggcagcgccggcacaacagattacgccgattctgtgaagggcagattcaccatcagccgggacaacagcaagaaaaccctgtacctccagatgaacagcctgcgcgtggaagataccgccgtgtactactgtgccgatggcagaggccccttcttcgattatcgcggccagggcacactggtcaccgtttcttctggtaccggcggaggcggatctggcggcggaggtagcggtggcggaggatctgaattcgacatccagatgacacagagccctagcagcctgtctgccagcgtgggagacagagtgaccatcacatgcaaggccagcgaccacatcaacaactggctggcctggtatcagcagaagcctggacaggcccctaagctgctgatctacggcgctaccacactggaaacaggcgtgcccagcagattttctggcagcggctctggcaccgactacaccctgacaatatccagcctccagcctgaggacttcgccacctactactgtcagcagagctggaacaccccttggacattcggccagggcaccaagctggaaatcaagagactcgaggacctgaagaacgtgttcccacctgaggtggccgtgttcgagcctagcaaggccgagatcgcccacacccagaaagccaccctcgtgtgcctggctaccggcttctaccccgaccatgtggaactgtcttggtgggtcaacggcaaagaggtgcacagcggcgtgtgtaccgacccccagccactgaaagaacagcccgccctgaacgacagccggtactgcctgagcagcagactgagagtgtccgccaccttctggcagaacccccggaaccacttcagatgccaggtgcagttctacggcctgagcgagaacgacgagtggacccaggacagagccaagcccgtgacccagatcgtgtctgccgaagcctggggcagagccgattgcggatcccagagcttcggcctgctggaccccaagctgtgctacctgctggatggcatcctgttcatctacggcgtgatcctgaccgccctgttcctgagagtgaagttcagcagaagcgccgacgcccctgcctaccagcagggacagaaccaactgtacaacgagctgaacctgggcagacgggaagagtacgacgtgctggacaagcggagaggcagggaccctgagatgggcggaaagccccagcggagaaagaacccccaggaaggactgtataacgaactccagaaagacaagatggccgaagcctacagcgagatcggcatgaagggcgagcggagaagaggcaagggccacgatggcctgtaccagggcctgagcaccgccaccaaggacacctatgacgccctgcacatgcaggccctgcctccaagaagggccaagcgatctggatctggagcaacaaacttctcactactcaaacaagcaggtgacgtggaggagaatcccgggcctactagtatggactggatttggcgcatccttttccttgtcggcgctgctaccggcgcccattccgggcccgaagtgcagctggttgaatctggcggaggactggttcaggctggcggatctctgagactgtcttgtgccgccagcggcagaacctttagcatgggctggtttagacaggcccctggcaaagagagagagttcgtcgccgccatcacatactctggcggcagcccttactacgccgactctgtgaagggcagattcaccatcagccgggacaacgccaagaacaccgtgtacctccagatgaacagcctgaagcctgaggacaccgccgtgtactactgcgccgccaatccaacatacggcagcgactggaacgccgagaattggggccagggaacccaagtgacagtgtctagcggatccggcggcggaggatctggcggaggcggatctgggggcggaggctctttcgaacaagttcagcttcaacagcctggcgctgagctggtcaaacctggcgcttctgtgaagatgagctgcaaagccagcggctacgccttcagcagctactggatcaactggatgaagcagaaacccggccagggactcgaatggatcggccaaatctatcccggcgacggcgacaccaactacaacggcaagttcaagggcagagccacactgaccgccgatacctctagcagcacagcctacatgcagctgagcagcctgaccagcgaagatagcgccgtgtacttctgtgcccggtccatcacaacagtcgtgggctgcgctatggactattggggccagggaacaagcgtgaccgtgtctagtacgcgtatccagaaccctgatcctgccgtgtaccagctgcgggatagcaagagcagcgacaagagcgtgtgtctgttcaccgacttcgacagccagaccaacgtgtcccagagcaaggactccgacgtgtacatcaccgataagtgcgtgctggacatgcggagcatggacttcaagagcaactccgccgtggcctggtccaacaagtccgatttcgcctgcgccaacgccttcaacaacagcattatccccgaggacacattcttcccaagcagcgacgtgccctgcggtacccagagttttgggttgttggaccctaaattgtgctatctgttggacggaatcctgttcatttacggagtgatcctgaccgcattgttcctgcgggttaagttttccagatccgcagacgcacccgcttaccaacaagggcagaaccaactctacaatgaacttaatttggggcggagggaagagtacgacgttctggacaaaaggaggggacgagatcccgagatgggcggaaagcctcagcgaaggaagaatccgcaagaggggctttataacgaactccagaaagataaaatggcagaagcctatagtgagattgggatgaagggagaaaggaggaggggtaaaggtcacgatgggttgtaccaaggattgagcacagccactaaagatacctatgatgcgctccacatgcaggccctgccgccaaga

SEQ ID NO: 6302 - DNA, 3486 bp, Artificial Sequence
  Synthetic Polynucloetide
atggccttaccagtgaccgccttgctcctgccgctggccttgctgctccacgccgccaggccggaagtgcaggttttggagtctggcggaggactggttcagcctggcggatctctgagactgtcttgtgccgccagcggcttcaccttcagcaactttgccatgagctgggtccgacaggcccctggcaaaggacttgaatgggtgtccacaatcagcggcagcgccggcacaacagattacgccgattctgtgaagggcagattcaccatcagccgggacaacagcaagaaaaccctgtacctccagatgaacagcctgcgcgtggaagataccgccgtgtactactgtgccgatggcagaggccccttcttcgattatcgcggccagggcacactggtcaccgtttcttctggtaccggcggaggcggatctggcggcggaggtagcggtggcggaggatctgaattcgacatccagatgacacagagccctagcagcctgtctgccagcgtgggagacagagtgaccatcacatgcaaggccagcgaccacatcaacaactggctggcctggtatcagcagaagcctggacaggcccctaagctgctgatctacggcgctaccacactggaaacaggcgtgcccagcagattttctggcagcggctctggcaccgactacaccctgacaatatccagcctccagcctgaggacttcgccacctactactgtcagcagagctggaacaccccttggacattcggccagggcaccaagctggaaatcaagagactcgaggggaaaccaattcccaaccctcttctgggactggattcaaccggcagcggcgaggacctgaagaacgtgttcccacctgaggtggccgtgttcgagcctagcgaggccgagatcagccacacccagaaagccaccctcgtgtgcctggctaccggcttctaccccgaccatgtggaactgtcttggtgggtcaacggcaaagaggtgcacagcggcgtgtctaccgacccccagccactgaaagaacagcccgccctgaacgacagccggtactgcctgagcagcagactgagagtgtccgccaccttctggcagaacccccggaaccacttcagatgccaggtgcagttctacggcctgagcgagaacgacgagtggacccaggacagagccaagcccgtgacccagatcgtgtctgccgaagcctggggcagagccgattgcggatcccagagcttcggcctgctggaccccaagctgtgctacctgctggatggcatcctgttcatctacggcgtgatcctgaccgccctgttcctgagagtgaagttcagcagaagcgccgacgcccctgcctaccagcagggacagaaccaactgtacaacgagctgaacctgggcagacgggaagagtacgacgtgctggacaagcggagaggcagggaccctgagatgggcggaaagccccagcggagaaagaacccccaggaaggactgtataacgaactccagaaagacaagatggccgaagcctacagcgagatcggcatgaagggcgagcggagaagaggcaagggccacgatggcctgtaccagggcctgagcaccgccaccaaggacacctatgacgccctgcacatgcaggccctgcctccaagaagggccaagcgatctggatctggagcaacaaacttctcactactcaaacaagcaggtgacgtggaggagaatcccgggcctactagtatggactggatttggcgcatccttttccttgtcggcgctgctaccggcgcccattccgggcccgaagtgcagctggttgaatctggcggaggactggttcaggctggcggatctctgagactgtcttgtgccgccagcggcagaacctttagcatgggctggtttagacaggcccctggcaaagagagagagttcgtcgccgccatcacatactctggcggcagcccttactacgccgactctgtgaagggcagattcaccatcagccgggacaacgccaagaacaccgtgtacctccagatgaacagcctgaagcctgaggacaccgccgtgtactactgcgccgccaatccaacatacggcagcgactggaacgccgagaattggggccagggaacccaagtgacagtgtctagcggatccggcggcggaggatctggcggaggcggatctgggggcggaggctctttcgaacaagttcagcttcaacagcctggcgctgagctggtcaaacctggcgcttctgtgaagatgagctgcaaagccagcggctacgccttcagcagctactggatcaactggatgaagcagaaacccggccagggactcgaatggatcggccaaatctatcccggcgacggcgacaccaactacaacggcaagttcaagggcagagccacactgaccgccgatacctctagcagcacagcctacatgcagctgagcagcctgaccagcgaagatagcgccgtgtacttctgtgcccggtccatcacaacagtcgtgggctgcgctatggactattggggccagggaacaagcgtgaccgtgtctagtacgcgtgagcagaaactgatctcggaagaggatgggagcggcatccagaaccctgatcctgccgtgtaccagctgcgggatagcaagagcagcgacaagagcgtgtgtctgttcaccgacttcgacagccagaccaacgtgtcccagagcaaggactccgacgtgtacatcaccgataagaccgtgctggacatgcggagcatggacttcaagagcaactccgccgtggcctggtccaacaagtccgatttcgcctgcgccaacgccttcaacaacagcattatccccgaggacacattcttcccaagccccgagagcagctgcggtacccagagttttgggttgttggaccctaaattgtgctatctgttggacggaatcctgttcatttacggagtgatcctgaccgcattgttcctgaggagcaagcggtcacggctgctccacagcgattacatgaatatgacaccacgaagaccgggtcctactcgcaaacactaccaaccctacgcacctccccgcgactttgcagcgtaccgatctcgggttaagttttccagatccgcagacgcacccgcttaccaacaagggcagaaccaactctacaatgaacttaatttggggcggagggaagagtacgacgttctggacaaaaggaggggacgagatcccgagatgggcggaaagcctcagcgaaggaagaatccgcaagaggggctttataacgaactccagaaagataaaatggcagaagcctatagtgagattgggatgaagggagaaaggaggaggggtaaaggtcacgatgggttgtaccaaggattgagcacagccactaaagatacctatgatgcgctccacatgcaggccctgccgccaaga

SEQ ID NO: 6303 - DNA, 3609 bp, Artificial Sequence
  Synthetic Polynucloetide
atggccttaccagtgaccgccttgctcctgccgctggccttgctgctccacgccgccaggccggaagtgcaggttttggagtctggcggaggactggttcagcctggcggatctctgagactgtcttgtgccgccagcggcttcaccttcagcaactttgccatgagctgggtccgacaggcccctggcaaaggacttgaatgggtgtccacaatcagcggcagcgccggcacaacagattacgccgattctgtgaagggcagattcaccatcagccgggacaacagcaagaaaaccctgtacctccagatgaacagcctgcgcgtggaagataccgccgtgtactactgtgccgatggcagaggccccttcttcgattatcgcggccagggcacactggtcaccgtttcttctggtaccggcggaggcggatctggcggcggaggtagcggtggcggaggatctgaattcgacatccagatgacacagagccctagcagcctgtctgccagcgtgggagacagagtgaccatcacatgcaaggccagcgaccacatcaacaactggctggcctggtatcagcagaagcctggacaggcccctaagctgctgatctacggcgctaccacactggaaacaggcgtgcccagcagattttctggcagcggctctggcaccgactacaccctgacaatatccagcctccagcctgaggacttcgccacctactactgtcagcagagctggaacaccccttggacattcggccagggcaccaagctggaaatcaagagactcgaggggaaaccaattcccaaccctcttctgggactggattcaaccggcagcggcgaggacctgaagaacgtgttcccacctgaggtggccgtgttcgagcctagcgaggccgagatcagccacacccagaaagccaccctcgtgtgcctggctaccggcttctaccccgaccatgtggaactgtcttggtgggtcaacggcaaagaggtgcacagcggcgtgtctaccgacccccagccactgaaagaacagcccgccctgaacgacagccggtactgcctgagcagcagactgagagtgtccgccaccttctggcagaacccccggaaccacttcagatgccaggtgcagttctacggcctgagcgagaacgacgagtggacccaggacagagccaagcccgtgacccagatcgtgtctgccgaagcctggggcagagccgattgcggatcccagagcttcggcctgctggaccccaagctgtgctacctgctggatggcatcctgttcatctacggcgtgatcctgaccgccctgttcctgaggagtaagaggagcaggctcctgcacagtgactacatgaacatgactccacgccgccccggacccacccgcaagcattaccagccctatgccccaccacgcgacttcgcagcctatcgctccagagtgaagttcagcagaagcgccgacgcccctgcctaccagcagggacagaaccaactgtacaacgagctgaacctgggcagacgggaagagtacgacgtgctggacaagcggagaggcagggaccctgagatgggcggaaagccccagcggagaaagaacccccaggaaggactgtataacgaactccagaaagacaagatggccgaagcctacagcgagatcggcatgaagggcgagcggagaagaggcaagggccacgatggcctgtaccagggcctgagcaccgccaccaaggacacctatgacgccctgcacatgcaggccctgcctccaagaagggccaagcgatctggatctggagcaacaaacttctcactactcaaacaagcaggtgacgtggaggagaatcccgggcctactagtatggactggatttggcgcatccttttccttgtcggcgctgctaccggcgcccattccgggcccgaagtgcagctggttgaatctggcggaggactggttcaggctggcggatctctgagactgtcttgtgccgccagcggcagaacctttagcatgggctggtttagacaggcccctggcaaagagagagagttcgtcgccgccatcacatactctggcggcagcccttactacgccgactctgtgaagggcagattcaccatcagccgggacaacgccaagaacaccgtgtacctccagatgaacagcctgaagcctgaggacaccgccgtgtactactgcgccgccaatccaacatacggcagcgactggaacgccgagaattggggccagggaacccaagtgacagtgtctagcggatccggcggcggaggatctggcggaggcggatctgggggcggaggctctttcgaacaagttcagcttcaacagcctggcgctgagctggtcaaacctggcgcttctgtgaagatgagctgcaaagccagcggctacgccttcagcagctactggatcaactggatgaagcagaaacccggccagggactcgaatggatcggccaaatctatcccggcgacggcgacaccaactacaacggcaagttcaagggcagagccacactgaccgccgatacctctagcagcacagcctacatgcagctgagcagcctgaccagcgaagatagcgccgtgtacttctgtgcccggtccatcacaacagtcgtgggctgcgctatggactattggggccagggaacaagcgtgaccgtgtctagtacgcgtgagcagaaactgatctcggaagaggatgggagcggcatccagaaccctgatcctgccgtgtaccagctgcgggatagcaagagcagcgacaagagcgtgtgtctgttcaccgacttcgacagccagaccaacgtgtcccagagcaaggactccgacgtgtacatcaccgataagaccgtgctggacatgcggagcatggacttcaagagcaactccgccgtggcctggtccaacaagtccgatttcgcctgcgccaacgccttcaacaacagcattatccccgaggacacattcttcccaagccccgagagcagctgcggtacccagagttttgggttgttggaccctaaattgtgctatctgttggacggaatcctgttcatttacggagtgatcctgaccgcattgttcctgaggagcaagcggtcacggctgctccacagcgattacatgaatatgacaccacgaagaccgggtcctactcgcaaacactaccaaccctacgcacctccccgcgactttgcagcgtaccgatctcgggttaagttttccagatccgcagacgcacccgcttaccaacaagggcagaaccaactctacaatgaacttaatttggggcggagggaagagtacgacgttctggacaaaaggaggggacgagatcccgagatgggcggaaagcctcagcgaaggaagaatccgcaagaggggctttataacgaactccagaaagataaaatggcagaagcctatagtgagattgggatgaagggagaaaggaggaggggtaaaggtcacgatgggttgtaccaaggattgagcacagccactaaagatacctatgatgcgctccacatgcaggccctgccgccaaga

SEQ ID NO: 6304 - DNA, 3492 bp, Artificial Sequence
  Synthetic Polynucloetide
atggccttaccagtgaccgccttgctcctgccgctggccttgctgctccacgccgccaggccggaagtgcaggttttggagtctggcggaggactggttcagcctggcggatctctgagactgtcttgtgccgccagcggcttcaccttcagcaactttgccatgagctgggtccgacaggcccctggcaaaggacttgaatgggtgtccacaatcagcggcagcgccggcacaacagattacgccgattctgtgaagggcagattcaccatcagccgggacaacagcaagaaaaccctgtacctccagatgaacagcctgcgcgtggaagataccgccgtgtactactgtgccgatggcagaggccccttcttcgattatcgcggccagggcacactggtcaccgtttcttctggtaccggcggaggcggatctggcggcggaggtagcggtggcggaggatctgaattcgacatccagatgacacagagccctagcagcctgtctgccagcgtgggagacagagtgaccatcacatgcaaggccagcgaccacatcaacaactggctggcctggtatcagcagaagcctggacaggcccctaagctgctgatctacggcgctaccacactggaaacaggcgtgcccagcagattttctggcagcggctctggcaccgactacaccctgacaatatccagcctccagcctgaggacttcgccacctactactgtcagcagagctggaacaccccttggacattcggccagggcaccaagctggaaatcaagagactcgaggggaaaccaattcccaaccctcttctgggactggattcaaccggcagcggcgaggacctgaagaacgtgttcccacctgaggtggccgtgttcgagcctagcgaggccgagatcagccacacccagaaagccaccctcgtgtgcctggctaccggcttctaccccgaccatgtggaactgtcttggtgggtcaacggcaaagaggtgcacagcggcgtgtctaccgacccccagccactgaaagaacagcccgccctgaacgacagccggtactgcctgagcagcagactgagagtgtccgccaccttctggcagaacccccggaaccacttcagatgccaggtgcagttctacggcctgagcgagaacgacgagtggacccaggacagagccaagcccgtgacccagatcgtgtctgccgaagcctggggcagagccgattgcggatcccagagcttcggcctgctggaccccaagctgtgctacctgctggatggcatcctgttcatctacggcgtgatcctgaccgccctgttcctgagagtgaagttcagcagaagcgccgacgcccctgcctaccagcagggacagaaccaactgtacaacgagctgaacctgggcagacgggaagagtacgacgtgctggacaagcggagaggcagggaccctgagatgggcggaaagccccagcggagaaagaacccccaggaaggactgtataacgaactccagaaagacaagatggccgaagcctacagcgagatcggcatgaagggcgagcggagaagaggcaagggccacgatggcctgtaccagggcctgagcaccgccaccaaggacacctatgacgccctgcacatgcaggccctgcctccaagaagggccaagcgatctggatctggagcaacaaacttctcactactcaaacaagcaggtgacgtggaggagaatcccgggcctactagtatggactggatttggcgcatccttttccttgtcggcgctgctaccggcgcccattccgggcccgaagtgcagctggttgaatctggcggaggactggttcaggctggcggatctctgagactgtcttgtgccgccagcggcagaacctttagcatgggctggtttagacaggcccctggcaaagagagagagttcgtcgccgccatcacatactctggcggcagcccttactacgccgactctgtgaagggcagattcaccatcagccgggacaacgccaagaacaccgtgtacctccagatgaacagcctgaagcctgaggacaccgccgtgtactactgcgccgccaatccaacatacggcagcgactggaacgccgagaattggggccagggaacccaagtgacagtgtctagcggatccggcggcggaggatctggcggaggcggatctgggggcggaggctctttcgaacaagttcagcttcaacagcctggcgctgagctggtcaaacctggcgcttctgtgaagatgagctgcaaagccagcggctacgccttcagcagctactggatcaactggatgaagcagaaacccggccagggactcgaatggatcggccaaatctatcccggcgacggcgacaccaactacaacggcaagttcaagggcagagccacactgaccgccgatacctctagcagcacagcctacatgcagctgagcagcctgaccagcgaagatagcgccgtgtacttctgtgcccggtccatcacaacagtcgtgggctgcgctatggactattggggccagggaacaagcgtgaccgtgtctagtacgcgtgagcagaaactgatctcggaagaggatctggggagcggcatccagaaccctgatcctgccgtgtaccagctgcgggatagcaagagcagcgacaagagcgtgtgtctgttcaccgacttcgacagccagaccaacgtgtcccagagcaaggactccgacgtgtacatcaccgataagaccgtgctggacatgcggagcatggacttcaagagcaactccgccgtggcctggtccaacaagtccgatttcgcctgcgccaacgccttcaacaacagcattatccccgaggacacattcttcccaagccccgagagcagctgcggtacccagagttttgggttgttggaccctaaattgtgctatctgttggacggaatcctgttcatttacggagtgatcctgaccgcattgttcctgaagagaggccggaagaagctgctgtacatcttcaagcagcctttcatgcggcccgtgcagaccacccaggaagaggacggctgctcctgccggttccccgaggaagaagaaggcggctgcgagctgcgggttaagttttccagatccgcagacgcacccgcttaccaacaagggcagaaccaactctacaatgaacttaatttggggcggagggaagagtacgacgttctggacaaaaggaggggacgagatcccgagatgggcggaaagcctcagcgaaggaagaatccgcaagaggggctttataacgaactccagaaagataaaatggcagaagcctatagtgagattgggatgaagggagaaaggaggaggggtaaaggtcacgatgggttgtaccaaggattgagcacagccactaaagatacctatgatgcgctccacatgcaggccctgccgccaaga

SEQ ID NO: 6305 - DNA, 3618 bp, Artificial Sequence
  Synthetic Polynucloetide
atggccttaccagtgaccgccttgctcctgccgctggccttgctgctccacgccgccaggccggaagtgcaggttttggagtctggcggaggactggttcagcctggcggatctctgagactgtcttgtgccgccagcggcttcaccttcagcaactttgccatgagctgggtccgacaggcccctggcaaaggacttgaatgggtgtccacaatcagcggcagcgccggcacaacagattacgccgattctgtgaagggcagattcaccatcagccgggacaacagcaagaaaaccctgtacctccagatgaacagcctgcgcgtggaagataccgccgtgtactactgtgccgatggcagaggccccttcttcgattatcgcggccagggcacactggtcaccgtttcttctggtaccggcggaggcggatctggcggcggaggtagcggtggcggaggatctgaattcgacatccagatgacacagagccctagcagcctgtctgccagcgtgggagacagagtgaccatcacatgcaaggccagcgaccacatcaacaactggctggcctggtatcagcagaagcctggacaggcccctaagctgctgatctacggcgctaccacactggaaacaggcgtgcccagcagattttctggcagcggctctggcaccgactacaccctgacaatatccagcctccagcctgaggacttcgccacctactactgtcagcagagctggaacaccccttggacattcggccagggcaccaagctggaaatcaagagactcgaggggaaaccaattcccaaccctcttctgggactggattcaaccggcagcggcgaggacctgaagaacgtgttcccacctgaggtggccgtgttcgagcctagcgaggccgagatcagccacacccagaaagccaccctcgtgtgcctggctaccggcttctaccccgaccatgtggaactgtcttggtgggtcaacggcaaagaggtgcacagcggcgtgtctaccgacccccagccactgaaagaacagcccgccctgaacgacagccggtactgcctgagcagcagactgagagtgtccgccaccttctggcagaacccccggaaccacttcagatgccaggtgcagttctacggcctgagcgagaacgacgagtggacccaggacagagccaagcccgtgacccagatcgtgtctgccgaagcctggggcagagccgattgcggatcccagagcttcggcctgctggaccccaagctgtgctacctgctggatggcatcctgttcatctacggcgtgatcctgaccgccctgttcctgaaacggggcagaaagaaactcctgtatatattcaaacaaccatttatgagaccagtacaaactactcaagaggaagatggctgtagctgccgatttccagaagaagaagaaggaggatgtgaactgagagtgaagttcagcagaagcgccgacgcccctgcctaccagcagggacagaaccaactgtacaacgagctgaacctgggcagacgggaagagtacgacgtgctggacaagcggagaggcagggaccctgagatgggcggaaagccccagcggagaaagaacccccaggaaggactgtataacgaactccagaaagacaagatggccgaagcctacagcgagatcggcatgaagggcgagcggagaagaggcaagggccacgatggcctgtaccagggcctgagcaccgccaccaaggacacctatgacgccctgcacatgcaggccctgcctccaagaagggccaagcgatctggatctggagcaacaaacttctcactactcaaacaagcaggtgacgtggaggagaatcccgggcctactagtatggactggatttggcgcatccttttccttgtcggcgctgctaccggcgcccattccgggcccgaagtgcagctggttgaatctggcggaggactggttcaggctggcggatctctgagactgtcttgtgccgccagcggcagaacctttagcatgggctggtttagacaggcccctggcaaagagagagagttcgtcgccgccatcacatactctggcggcagcccttactacgccgactctgtgaagggcagattcaccatcagccgggacaacgccaagaacaccgtgtacctccagatgaacagcctgaagcctgaggacaccgccgtgtactactgcgccgccaatccaacatacggcagcgactggaacgccgagaattggggccagggaacccaagtgacagtgtctagcggatccggcggcggaggatctggcggaggcggatctgggggcggaggctctttcgaacaagttcagcttcaacagcctggcgctgagctggtcaaacctggcgcttctgtgaagatgagctgcaaagccagcggctacgccttcagcagctactggatcaactggatgaagcagaaacccggccagggactcgaatggatcggccaaatctatcccggcgacggcgacaccaactacaacggcaagttcaagggcagagccacactgaccgccgatacctctagcagcacagcctacatgcagctgagcagcctgaccagcgaagatagcgccgtgtacttctgtgcccggtccatcacaacagtcgtgggctgcgctatggactattggggccagggaacaagcgtgaccgtgtctagtacgcgtgagcagaaactgatctcggaagaggatctggggagcggcatccagaaccctgatcctgccgtgtaccagctgcgggatagcaagagcagcgacaagagcgtgtgtctgttcaccgacttcgacagccagaccaacgtgtcccagagcaaggactccgacgtgtacatcaccgataagaccgtgctggacatgcggagcatggacttcaagagcaactccgccgtggcctggtccaacaagtccgatttcgcctgcgccaacgccttcaacaacagcattatccccgaggacacattcttcccaagccccgagagcagctgcggtacccagagttttgggttgttggaccctaaattgtgctatctgttggacggaatcctgttcatttacggagtgatcctgaccgcattgttcctgaagagaggccggaagaagctgctgtacatcttcaagcagcctttcatgcggcccgtgcagaccacccaggaagaggacggctgctcctgccggttccccgaggaagaagaaggcggctgcgagctgcgggttaagttttccagatccgcagacgcacccgcttaccaacaagggcagaaccaactctacaatgaacttaatttggggcggagggaagagtacgacgttctggacaaaaggaggggacgagatcccgagatgggcggaaagcctcagcgaaggaagaatccgcaagaggggctttataacgaactccagaaagataaaatggcagaagcctatagtgagattgggatgaagggagaaaggaggaggggtaaaggtcacgatgggttgtaccaaggattgagcacagccactaaagatacctatgatgcgctccacatgcaggccctgccgccaaga

SEQ ID NO: 6306 - DNA, 3291 bp, Artificial Sequence
  Synthetic Polynucloetide
atggccttaccagtgaccgccttgctcctgccgctggccttgctgctccacgccgccaggccggaagtgcaggttttggagtctggcggaggactggttcagcctggcggatctctgagactgtcttgtgccgccagcggcttcaccttcagcaactttgccatgagctgggtccgacaggcccctggcaaaggacttgaatgggtgtccacaatcagcggcagcgccggcacaacagattacgccgattctgtgaagggcagattcaccatcagccgggacaacagcaagaaaaccctgtacctccagatgaacagcctgcgcgtggaagataccgccgtgtactactgtgccgatggcagaggccccttcttcgattatcgcggccagggcacactggtcaccgtttcttctggtaccggcggaggcggatctggcggcggaggtagcggtggcggaggatctgaattcgacatccagatgacacagagccctagcagcctgtctgccagcgtgggagacagagtgaccatcacatgcaaggccagcgaccacatcaacaactggctggcctggtatcagcagaagcctggacaggcccctaagctgctgatctacggcgctaccacactggaaacaggcgtgcccagcagattttctggcagcggctctggcaccgactacaccctgacaatatccagcctccagcctgaggacttcgccacctactactgtcagcagagctggaacaccccttggacattcggccagggcaccaagctggaaatcaagagactcgagcagagcttcggcctgctggaccccaagctgtgctacctgctggatggcatcctgttcatctacggcgtgatcctgaccgccctgttcctgagagtgaagttcagcagaagcgccgacgcccctgcctaccagcagggacagaaccaactgtacaacgagctgaacctgggcagacgggaagagtacgacgtgctggacaagcggagaggcagggaccctgagatgggcggaaagccccagcggagaaagaacccccaggaaggactgtataacgaactccagaaagacaagatggccgaagcctacagcgagatcggcatgaagggcgagcggagaagaggcaagggccacgatggcctgtaccagggcctgagcaccgccaccaaggacacctatgacgccctgcacatgcaggccctgcctccaagaagggccaagcgatctggatctggagcaacaaacttctcactactcaaacaagcaggtgacgtggaggagaatcccgggcctactagtatggactggatttggcgcatccttttccttgtcggcgctgctaccggcgcccattccgggcccgaagtgcagctggttgaatctggcggaggactggttcaggctggcggatctctgagactgtcttgtgccgccagcggcagaacctttagcatgggctggtttagacaggcccctggcaaagagagagagttcgtcgccgccatcacatactctggcggcagcccttactacgccgactctgtgaagggcagattcaccatcagccgggacaacgccaagaacaccgtgtacctccagatgaacagcctgaagcctgaggacaccgccgtgtactactgcgccgccaatccaacatacggcagcgactggaacgccgagaattggggccagggaacccaagtgacagtgtctagcggatccggcggcggaggatctggcggaggcggatctgggggcggaggctctttcgaacaagttcagcttcaacagcctggcgctgagctggtcaaacctggcgcttctgtgaagatgagctgcaaagccagcggctacgccttcagcagctactggatcaactggatgaagcagaaacccggccagggactcgaatggatcggccaaatctatcccggcgacggcgacaccaactacaacggcaagttcaagggcagagccacactgaccgccgatacctctagcagcacagcctacatgcagctgagcagcctgaccagcgaagatagcgccgtgtacttctgtgcccggtccatcacaacagtcgtgggctgcgctatggactattggggccagggaacaagcgtgaccgtgtctagtacgcgtcagagttttgggttgttggaccctaaattgtgctatctgttggacggaatcctgttcatttacggagtgatcctgaccgcattgttcctgcgggttaagttttccagatccgcagacgcacccgcttaccaacaagggcagaaccaactctacaatgaacttaatttggggcggagggaagagtacgacgttctggacaaaaggaggggacgagatcccgagatgggcggaaagcctcagcgaaggaagaatccgcaagaggggctttataacgaactccagaaagataaaatggcagaagcctatagtgagattgggatgaagggagaaaggaggaggggtaaaggtcacgatgggttgtaccaaggattgagcacagccactaaagatacctatgatgcgctccacatgcaggccctgccgccaagacgcgccaagagaagcggatctggcgtgaagcagaccctgaatttcgacctgctgaagctggctggcgacgtggaatccaacccaggcccttctagaggccatatgaccgagtacaagcccacggtgcgcctcgccacccgcgacgacgtccccagggccgtacgcaccctcgccgccgcgttcgccgactaccccgccacgcgccacaccgtcgatccggaccgccacatcgagcgggtcaccgagctgcaagaactcttcctcacgcgcgtcgggctcgacatcggcaaggtgtgggtcgcggacgacggcgccgcggtggcggtctggaccacgccggagagcgtcgaagcgggggcggtgttcgccgagatcggcccgcgcatggccgagttgagcggttcccggctggccgcgcagcaacagatggaaggcctcctggcgccgcaccggcccaaggagcccgcgtggttcctggccaccgtcggcgtctcgcccgaccaccagggcaagggtctgggcagcgccgtcgtgctccccggagtggaggcggccgagcgcgccggggtgcccgccttcctggagacctccgcgccccgcaacctccccttctacgagcggctcggcttcaccgtcaccgccgacgtcgaggtgcccgaaggaccgcgcacctggtgcatgacccgcaagcccggtgcctga

SEQ ID NO: 6307 - DNA, 2763 bp, Artificial Sequence
  Synthetic Polynucloetide
atggccttaccagtgaccgccttgctcctgccgctggccttgctgctccacgccgccaggccggaagtgcaggttttggagtctggcggaggactggttcagcctggcggatctctgagactgtcttgtgccgccagcggcttcaccttcagcaactttgccatgagctgggtccgacaggcccctggcaaaggacttgaatgggtgtccacaatcagcggcagcgccggcacaacagattacgccgattctgtgaagggcagattcaccatcagccgggacaacagcaagaaaaccctgtacctccagatgaacagcctgcgcgtggaagataccgccgtgtactactgtgccgatggcagaggccccttcttcgattatcgcggccagggcacactggtcaccgtttcttctggtaccggcggaggcggatctggcggcggaggtagcggtggcggaggatctgaattcgacatccagatgacacagagccctagcagcctgtctgccagcgtgggagacagagtgaccatcacatgcaaggccagcgaccacatcaacaactggctggcctggtatcagcagaagcctggacaggcccctaagctgctgatctacggcgctaccacactggaaacaggcgtgcccagcagattttctggcagcggctctggcaccgactacaccctgacaatatccagcctccagcctgaggacttcgccacctactactgtcagcagagctggaacaccccttggacattcggccagggcaccaagctggaaatcaagagactcgagggacagcctaaggccaatcctaccgtgacactgttccctccaagcagcgaagaactccaggccaacaaggccacacttgtgtgcctgatctccgacttctaccctggggctgtgacagtggcttggaaggccgatggatctcctgtgaaagccggcgtggaaaccaccaagccatccaagcagagcaacaacaaatacgccgccagctcctacctgagcctgacacctgagcagtggaagtcccacagatcctacagctgccaagtgacccacgaaggcagcaccgtggaaaagacagtggcccctacagagtgcagccccatcaagaccgatgtgattacaatggaccccaaggacaactgctccaaggacgccaacgataccctgctgctccagctgaccaacaccagcgcctactacatgtacttgttgctgctgctgaagtccgtggtgtacttcgccatcatcacatgctgcctgctgcggagaaccgccttctgctgcaacggcgagaagtctagggccaagcgatctggatctggagcaacaaacttctcactactcaaacaagcaggtgacgtggaggagaatcccgggcctactagtatggactggatttggcgcatccttttccttgtcggcgctgctaccggcgcccattccgggcccgaagtgcagctggttgaatctggcggaggactggttcaggctggcggatctctgagactgtcttgtgccgccagcggcagaacctttagcatgggctggtttagacaggcccctggcaaagagagagagttcgtcgccgccatcacatactctggcggcagcccttactacgccgactctgtgaagggcagattcaccatcagccgggacaacgccaagaacaccgtgtacctccagatgaacagcctgaagcctgaggacaccgccgtgtactactgcgccgccaatccaacatacggcagcgactggaacgccgagaattggggccagggaacccaagtgacagtgtctagcggatccggcggcggaggatctggcggaggcggatctgggggcggaggctctttcgaacaagttcagcttcaacagcctggcgctgagctggtcaaacctggcgcttctgtgaagatgagctgcaaagccagcggctacgccttcagcagctactggatcaactggatgaagcagaaacccggccagggactcgaatggatcggccaaatctatcccggcgacggcgacaccaactacaacggcaagttcaagggcagagccacactgaccgccgatacctctagcagcacagcctacatgcagctgagcagcctgaccagcgaagatagcgccgtgtacttctgtgcccggtccatcacaacagtcgtgggctgcgctatggactattggggccagggaacaagcgtgaccgtgtctagtacgcgtgcctctacaaagggaccctccgtgtttcctctggctcccagcagcaagtctacaagcggaggaacagccgctctgggctgcctggtcaaggattactttcccgagcctgtgaccgtgtcctggaatagcggagcactgacaagcggcgtgcacacctttccagccgtgctgcaaagcagcggcctgtactctctgagcagcgtggtcacagtgcctagctctagcctgggcacccagacctacatctgcaatgtgaaccacaagcctagcaacaccaaggtggacaagagagtggaacccaagagctgtgaagtgaaaaccgactccaccgaccacgtgaagcccaaagagacagagaacaccaagcagcccagcaagagctgccacaagcccaaggccatcgtgcacaccgagaaagtgaacatgatgagcctgaccgtgctgggcctgcggatgctgttcgccaaaaccgtggccgtgaacttcctgctgaccgccaagctgttcttcctc

SEQ ID NO: 6308 - DNA, 2697 bp, Artificial Sequence
  Synthetic Polynucloetide
atggccttaccagtgaccgccttgctcctgccgctggccttgctgctccacgccgccaggccggaagtgcaggttttggagtctggcggaggactggttcagcctggcggatctctgagactgtcttgtgccgccagcggcttcaccttcagcaactttgccatgagctgggtccgacaggcccctggcaaaggacttgaatgggtgtccacaatcagcggcagcgccggcacaacagattacgccgattctgtgaagggcagattcaccatcagccgggacaacagcaagaaaaccctgtacctccagatgaacagcctgcgcgtggaagataccgccgtgtactactgtgccgatggcagaggccccttcttcgattatcgcggccagggcacactggtcaccgtttcttctggtaccggcggaggcggatctggcggcggaggtagcggtggcggaggatctgaattcgacatccagatgacacagagccctagcagcctgtctgccagcgtgggagacagagtgaccatcacatgcaaggccagcgaccacatcaacaactggctggcctggtatcagcagaagcctggacaggcccctaagctgctgatctacggcgctaccacactggaaacaggcgtgcccagcagattttctggcagcggctctggcaccgactacaccctgacaatatccagcctccagcctgaggacttcgccacctactactgtcagcagagctggaacaccccttggacattcggccagggcaccaagctggaaatcaagagactcgagggacagcctaaggccaatcctaccgtgacactgttccctccaagcagcgaagaactccaggccaacaaggccacacttgtgtgcctgatctccgacttctaccctggggctgtgacagtggcttggaaggccgatggatctcctgtgaaagccggcgtggaaaccaccaagccatccaagcagagcaacaacaaatacgccgccagctcctacctgagcctgacacctgagcagtggaagtcccacagatcctacagctgccaagtgacccacgaaggcagcaccgtggaaaagacagtggcccctacagagtgcagcggcagagccgattgcggcatcaccagcgccagctaccaccagggcgtgctgagcgccaccatcctgtacgagatcctgctgggcaaggccaccctgtacgccgtgctggtgtctgccctggtgctgatggctatggtcaagcggaaggacagccggggaagggccaagcgatctggatctggagcaacaaacttctcactactcaaacaagcaggtgacgtggaggagaatcccgggcctactagtatggactggatttggcgcatccttttccttgtcggcgctgctaccggcgcccattccgggcccgaagtgcagctggttgaatctggcggaggactggttcaggctggcggatctctgagactgtcttgtgccgccagcggcagaacctttagcatgggctggtttagacaggcccctggcaaagagagagagttcgtcgccgccatcacatactctggcggcagcccttactacgccgactctgtgaagggcagattcaccatcagccgggacaacgccaagaacaccgtgtacctccagatgaacagcctgaagcctgaggacaccgccgtgtactactgcgccgccaatccaacatacggcagcgactggaacgccgagaattggggccagggaacccaagtgacagtgtctagcggatccggcggcggaggatctggcggaggcggatctgggggcggaggctctttcgaacaagttcagcttcaacagcctggcgctgagctggtcaaacctggcgcttctgtgaagatgagctgcaaagccagcggctacgccttcagcagctactggatcaactggatgaagcagaaacccggccagggactcgaatggatcggccaaatctatcccggcgacggcgacaccaactacaacggcaagttcaagggcagagccacactgaccgccgatacctctagcagcacagcctacatgcagctgagcagcctgaccagcgaagatagcgccgtgtacttctgtgcccggtccatcacaacagtcgtgggctgcgctatggactattggggccagggaacaagcgtgaccgtgtctagtacgcgtgcctctacaaagggaccctccgtgtttcctctggctcccagcagcaagtctacaagcggaggaacagccgctctgggctgcctggtcaaggattactttcccgagcctgtgaccgtgtcctggaatagcggagcactgacaagcggcgtgcacacctttccagccgtgctgcaaagcagcggcctgtactctctgagcagcgtggtcacagtgcctagctctagcctgggcacccagacctacatctgcaatgtgaaccacaagcctagcaacaccaaggtggacaagagagtggaacccaagagctgtatccccgaggacacattcttcccaagcagcgacgtgccctgcgacgtgaagctggtggaaaagagcttcgagacagacaccaacctgaacttccagaacctgagcgtgatcggcttcagaatcctgctgctgaaagtggccggctttaacctgctgatgaccctgcggctgtggtccagc

SEQ ID NO: 6309 - DNA, 2697 bp, Artificial Sequence
  Synthetic Polynucloetide
atggccttaccagtgaccgccttgctcctgccgctggccttgctgctccacgccgccaggccggaagtgcaggttttggagtctggcggaggactggttcagcctggcggatctctgagactgtcttgtgccgccagcggcttcaccttcagcaactttgccatgagctgggtccgacaggcccctggcaaaggacttgaatgggtgtccacaatcagcggcagcgccggcacaacagattacgccgattctgtgaagggcagattcaccatcagccgggacaacagcaagaaaaccctgtacctccagatgaacagcctgcgcgtggaagataccgccgtgtactactgtgccgatggcagaggccccttcttcgattatcgcggccagggcacactggtcaccgtttcttctggtaccggcggaggcggatctggcggcggaggtagcggtggcggaggatctgaattcgacatccagatgacacagagccctagcagcctgtctgccagcgtgggagacagagtgaccatcacatgcaaggccagcgaccacatcaacaactggctggcctggtatcagcagaagcctggacaggcccctaagctgctgatctacggcgctaccacactggaaacaggcgtgcccagcagattttctggcagcggctctggcaccgactacaccctgacaatatccagcctccagcctgaggacttcgccacctactactgtcagcagagctggaacaccccttggacattcggccagggcaccaagctggaaatcaagagactcgagggacagcctaaggccaatcctaccgtgacactgttccctccaagcagcgaagaactccaggccaacaaggccacacttgtgtgcctgatctccgacttctaccctggggctgtgacagtggcttggaaggccgatggatctcctgtgaaagccggcgtggaaaccaccaagccatccaagcagagcaacaacaaatacgccgccagctcctacctgagcctgacacctgagcagtggaagtcccacagatcctacagctgccaagtgacccacgaaggcagcaccgtggaaaagacagtggcccctacagagtgcagcggcagagccgattgcggctttaccagcgagagctaccagcagggcgtgctgagcgccaccatcctgtacgagatcctgctgggcaaggccaccctgtacgccgtgctggtgtctgccctggtgctgatggctatggtcaagcggaaggacagccggggaagggccaagcgatctggatctggagcaacaaacttctcactactcaaacaagcaggtgacgtggaggagaatcccgggcctactagtatggactggatttggcgcatccttttccttgtcggcgctgctaccggcgcccattccgggcccgaagtgcagctggttgaatctggcggaggactggttcaggctggcggatctctgagactgtcttgtgccgccagcggcagaacctttagcatgggctggtttagacaggcccctggcaaagagagagagttcgtcgccgccatcacatactctggcggcagcccttactacgccgactctgtgaagggcagattcaccatcagccgggacaacgccaagaacaccgtgtacctccagatgaacagcctgaagcctgaggacaccgccgtgtactactgcgccgccaatccaacatacggcagcgactggaacgccgagaattggggccagggaacccaagtgacagtgtctagcggatccggcggcggaggatctggcggaggcggatctgggggcggaggctctttcgaacaagttcagcttcaacagcctggcgctgagctggtcaaacctggcgcttctgtgaagatgagctgcaaagccagcggctacgccttcagcagctactggatcaactggatgaagcagaaacccggccagggactcgaatggatcggccaaatctatcccggcgacggcgacaccaactacaacggcaagttcaagggcagagccacactgaccgccgatacctctagcagcacagcctacatgcagctgagcagcctgaccagcgaagatagcgccgtgtacttctgtgcccggtccatcacaacagtcgtgggctgcgctatggactattggggccagggaacaagcgtgaccgtgtctagtacgcgtgcctctacaaagggaccctccgtgtttcctctggctcccagcagcaagtctacaagcggaggaacagccgctctgggctgcctggtcaaggattactttcccgagcctgtgaccgtgtcctggaatagcggagcactgacaagcggcgtgcacacctttccagccgtgctgcaaagcagcggcctgtactctctgagcagcgtggtcacagtgcctagctctagcctgggcacccagacctacatctgcaatgtgaaccacaagcctagcaacaccaaggtggacaagagagtggaacccaagagctgtatccccgaggacacattcttcccaagccccgagagcagctgcgacgtgaagctggtggaaaagagcttcgagacagacaccaacctgaacttccagaacctgagcgtgatcggcttcagaatcctgctgctgaaagtggccggctttaacctgctgatgaccctgcggctgtggtccagc

SEQ ID NO: 6310 - DNA, 2286 bp, Artificial Sequence
  Synthetic Polynucloetide
atggccttaccagtgaccgccttgctcctgccgctggccttgctgctccacgccgccaggccggaggttcagctgcttgagtctggcggaggactggttcaacctggcggaagcctgagactgtcttgtgccgccagcggcttcacctttagcagctacgccatgagctgggtccgacaggctcctggcaaaggactggaatgggtgtccagcatcagcggcagcggcgactacatctactacgccgatagcgtgaagggcagattcaccatcagccgggacatcagcaagaacaccctgtacctccagatgaacagcctgagagccgaggacaccgccgtgtactactgtgccaaagaaggcaccggcgctaacagcagcctggccgattatagaggccagggcacactggtcaccgtgtctagtggcggaggaagcggcggaggatctgaagtgcaggttttggagtctggcggaggactggttcagcctggcggatctctgagactgtcttgtgccgccagcggcttcaccttcagcaactttgccatgagctgggtccgacaggcccctggcaaaggacttgaatgggtgtccacaatcagcggcagcgccggcacaacagattacgccgattctgtgaagggcagattcaccatcagccgggacaacagcaagaaaaccctgtacctccagatgaacagcctgcgcgtggaagataccgccgtgtactactgtgccgatggcagaggccccttcttcgattatcgcggccagggcacactggtcaccgtttcttctggtaccggcggaggcggatctggcggcggaggtagcggtggcggaggatctgaattcgacatccagatgacacagagccctagcagcctgtctgccagcgtgggagacagagtgaccatcacatgcaaggccagcgaccacatcaacaactggctggcctggtatcagcagaagcctggacaggcccctaagctgctgatctacggcgctaccacactggaaacaggcgtgcccagcagattttctggcagcggctctggcaccgactacaccctgacaatatccagcctccagcctgaggacttcgccacctactactgtcagcagagctggaacaccccttggacattcggccagggcaccaagctggaaatcaagagaggcggaggcggaagtggaggcggaggatctggcggcggaggctctcaagttcagcttcaacagcctggcgctgagctggtcaaacctggcgcttctgtgaagatgagctgcaaagccagcggctacgccttcagcagctactggatcaactggatgaagcagaaacccggccagggactcgaatggatcggccaaatctatcccggcgacggcgacaccaactacaacggcaagttcaagggcagagccacactgaccgccgatacctctagcagcacagcctacatgcagctgagcagcctgaccagcgaagatagcgccgtgtacttctgtgcccggtccatcacaacagtcgtgggctgcgctatggactattggggccagggaacaagcgtgaccgtgtctagtacgcgtgagcagaaactgatctcggaagaggatctgaaaattgaagttatgtatcctcctccttacctagacaatgagaagagcaatggaaccattatccatgtgaaagggaaacacctttgtccaagtcccctatttcccggaccttctaagcccttttgggtgctggtggtggttgggggagtcctggcttgctatagcttgctagtaacagtggcctttattattttctgggtgaggagtaagaggagcaggctcctgcacagtgactacatgaacatgactccacgccgccccggacccacccgcaagcattaccagccctatgccccaccacgcgacttcgcagcctatcgctccagagtgaagttcagcaggagcgcagacgcccccgcgtaccagcagggccagaaccagctctataacgagctcaatctaggacgaagagaggagtacgatgttttggacaagagacgtggccgggaccctgagatggggggaaagccgagaaggaagaaccctcaggaaggcctgtacaatgaactgcagaaagataagatggcggaggcctacagtgagattgggatgaaaggcgagcgccggaggggcaaggggcacgatggcctttaccagggtctcagtacagccaccaaggacacctacgacgcccttcacatgcaggccctgccccctcgc

SEQ ID NO: 6311 - DNA, 2307 bp, Artificial Sequence
  Synthetic Polynucloetide
atggccttaccagtgaccgccttgctcctgccgctggccttgctgctccacgccgccaggccggaggttcagctgcttgagtctggcggaggactggttcaacctggcggaagcctgagactgtcttgtgccgccagcggcttcacctttagcagctacgccatgagctgggtccgacaggctcctggcaaaggactggaatgggtgtccagcatcagcggcagcggcgactacatctactacgccgatagcgtgaagggcagattcaccatcagccgggacatcagcaagaacaccctgtacctccagatgaacagcctgagagccgaggacaccgccgtgtactactgtgccaaagaaggcaccggcgctaacagcagcctggccgattatagaggccagggcacactggtcaccgtgtctagtggcggaggaagcggcggaggatctgaagtgcaggttttggagtctggcggaggactggttcagcctggcggatctctgagactgtcttgtgccgccagcggcttcaccttcagcaactttgccatgagctgggtccgacaggcccctggcaaaggacttgaatgggtgtccacaatcagcggcagcgccggcacaacagattacgccgattctgtgaagggcagattcaccatcagccgggacaacagcaagaaaaccctgtacctccagatgaacagcctgcgcgtggaagataccgccgtgtactactgtgccgatggcagaggccccttcttcgattatcgcggccagggcacactggtcaccgtttcttctggtaccggcggaggcggatctggcggcggaggtagcggtggcggaggatctgaattcgacatccagatgacacagagccctagcagcctgtctgccagcgtgggagacagagtgaccatcacatgcaaggccagcgaccacatcaacaactggctggcctggtatcagcagaagcctggacaggcccctaagctgctgatctacggcgctaccacactggaaacaggcgtgcccagcagattttctggcagcggctctggcaccgactacaccctgacaatatccagcctccagcctgaggacttcgccacctactactgtcagcagagctggaacaccccttggacattcggccagggcaccaagctggaaatcaagagaggcggaggcggaagtggaggcggaggatctggcggcggaggctctcaagttcagcttcaacagcctggcgctgagctggtcaaacctggcgcttctgtgaagatgagctgcaaagccagcggctacgccttcagcagctactggatcaactggatgaagcagaaacccggccagggactcgaatggatcggccaaatctatcccggcgacggcgacaccaactacaacggcaagttcaagggcagagccacactgaccgccgatacctctagcagcacagcctacatgcagctgagcagcctgaccagcgaagatagcgccgtgtacttctgtgcccggtccatcacaacagtcgtgggctgcgctatggactattggggccagggaacaagcgtgaccgtgtctagtacgcgtgagcagaaactgatctcggaagaggatctggcgaagcccaccacgacgccagcgccgcgaccaccaacaccggcgcccaccatcgcgtcgcagcccctgtccctgcgcccagaggcgtgccggccagcggcggggggcgcagtgcacacgagggggctggacttcgcctgtgacatctacatctgggcgcccttggccgggacttgtggggtccttctcctgtcactggttatcaccctttactgcaaacggggcagaaagaaactcctgtatatattcaaacaaccatttatgagaccagtacaaactactcaagaggaagatggctgtagctgccgatttccagaagaagaagaaggaggatgtgaactgagagtgaagttcagcaggagcgcagacgcccccgcgtaccagcagggccagaaccagctctataacgagctgaatctaggacgaagagaggagtacgatgttttggacaagagacgtggccgggaccctgagatggggggaaagccgagaaggaagaaccctcaggaaggcctgtacaatgaactgcagaaagataagatggcggaggcctacagtgagattgggatgaaaggcgagcgccggaggggcaaggggcacgatggcctttaccagggtctcagtacagccaccaaggacacctacgacgcccttcacatgcaggccctgccccctcgctga

SEQ ID NO: 6312 - DNA, 3546 bp, Artificial Sequence
  Synthetic Polynucloetide
atggccttaccagtgaccgccttgctcctgccgctggccttgctgctccacgccgccaggccggaggttcagctgcttgagtctggcggaggactggttcaacctggcggaagcctgagactgtcttgtgccgccagcggcttcacctttagcagctacgccatgagctgggtccgacaggctcctggcaaaggactggaatgggtgtccagcatcagcggcagcggcgactacatctactacgccgatagcgtgaagggcagattcaccatcagccgggacatcagcaagaacaccctgtacctccagatgaacagcctgagagccgaggacaccgccgtgtactactgtgccaaagaaggcaccggcgctaacagcagcctggccgattatagaggccagggcacactggtcaccgtgtctagtggcggaggaagcggcggaggatctgaagtgcaggttttggagtctggcggaggactggttcagcctggcggatctctgagactgtcttgtgccgccagcggcttcaccttcagcaactttgccatgagctgggtccgacaggcccctggcaaaggacttgaatgggtgtccacaatcagcggcagcgccggcacaacagattacgccgattctgtgaagggcagattcaccatcagccgggacaacagcaagaaaaccctgtacctccagatgaacagcctgcgcgtggaagataccgccgtgtactactgtgccgatggcagaggccccttcttcgattatcgcggccagggcacactggtcaccgtttcttctggtaccggcggaggcggatctggcggcggaggtagcggtggcggaggatctgaattcgacatccagatgacacagagccctagcagcctgtctgccagcgtgggagacagagtgaccatcacatgcaaggccagcgaccacatcaacaactggctggcctggtatcagcagaagcctggacaggcccctaagctgctgatctacggcgctaccacactggaaacaggcgtgcccagcagattttctggcagcggctctggcaccgactacaccctgacaatatccagcctccagcctgaggacttcgccacctactactgtcagcagagctggaacaccccttggacattcggccagggcaccaagctggaaatcaagagaggcggaggcggaagtggaggcggaggatctggcggcggaggctctcaagttcagcttcaacagcctggcgctgagctggtcaaacctggcgcttctgtgaagatgagctgcaaagccagcggctacgccttcagcagctactggatcaactggatgaagcagaaacccggccagggactcgaatggatcggccaaatctatcccggcgacggcgacaccaactacaacggcaagttcaagggcagagccacactgaccgccgatacctctagcagcacagcctacatgcagctgagcagcctgaccagcgaagatagcgccgtgtacttctgtgcccggtccatcacaacagtcgtgggctgcgctatggactattggggccagggaacaagcgtgaccgtgtctagtacgcgtgagcagaaactgatctcggaagaggatctggcgaagcccaccacgacgccagcgccgcgaccaccaacaccggcgcccaccatcgcgtcgcagcccctgtccctgcgcccagaggcgtgccggccagcggcggggggcgcagtgcacacgagggggctggacttcgcctgtgacatctacatctgggcgcccttggccgggacttgtggggtccttctcctgtcactggttatcaccctttactgcgggcgcgccagagtgaagttcagcaggagcgcagacgcccccgcgtaccagcagggccagaaccagctctataacgagctgaatctaggacgaagagaggagtacgatgttttggacaagagacgtggccgggaccctgagatggggggaaagccgagaaggaagaaccctcaggaaggcctgtacaatgaactgcagaaagataagatggcggaggcctacagtgagattgggatgaaaggcgagcgccggaggggcaaggggcacgatggcctttaccagggtctcagtacagccaccaaggacacctacgacgcccttcacatgcaggccctgccccctcgctctagaggatctggagcaacaaacttctcactactcaaacaagcaggtgacgtggaggagaatcccgggcctgggatccacatggccacttacgaggttctctgtgaggtggcgcggaaactgggcacggatgacagggaagtggtattgttcctcctaaacgtgttcatacctcaacccacactggcccaattaattggagctcttagagctttaaaggaggagggcaggttaacgtttcccctgttagcggaatgtctgtttcgtgcaggtcgcagagacctcttgcgcgacctgcttcacttagacccgcgttttttagagcgccacctagcgggcacaatgagttatttcagcccttatcagctcactgttctccacgtagacggggagctgtgtgcgagggatattaggtctttgatatttttaagcaaggacactatagggtctcgcagcacaccacagacattcttacactgggtgtactgtatggaaaacttagacctactgggtcccactgacgtggatgccctaatgtcaatgcttagatctttgtcaagagtagacctacagcgccaagtgcaaaccctaatgggccttcacctttccggcccatcacactcccaacactatcgccatacaccactcgagaccgatttctacgactacaaggacgacgatgacaagactagtggctccggcgagggcagaggaagtctactaacctgcggagatgtggaagaaaatcctggcccacatatgaccgagtacaagcccacggtgcgcctcgccacccgcgacgacgtccccagggccgtacgcaccctcgccgccgcgttcgccgactaccccgccacgcgccacaccgtcgatccggaccgccacatcgagcgggtcaccgagctgcaagaactcttcctcacgcgcgtcgggctcgacatcggcaaggtgtgggtcgcggacgacggcgccgcggtggcggtctggaccacgccggagagcgtcgaagcgggggcggtgttcgccgagatcggcccgcgcatggccgagttgagcggttcccggctggccgcgcagcaacagatggaaggcctcctggcgccgcaccggcccaaggagcccgcgtggttcctggccaccgtcggcgtctcgcccgaccaccagggcaagggtctgggcagcgccgtcgtgctccccggagtggaggcggccgagcgcgccggggtgcccgccttcctggagacctccgcgccccgcaacctccccttctacgagcggctcggcttcaccgtcaccgccgacgtcgaggtgcccgaaggaccgcgcacctggtgcatgacccgcaagcccggtgcctga

SEQ ID NO: 6313 - DNA, 3366 bp, Artificial Sequence
  Synthetic Polynucloetide
atggccttaccagtgaccgccttgctcctgccgctggccttgctgctccacgccgccaggccggaggttcagctgcttgagtctggcggaggactggttcaacctggcggaagcctgagactgtcttgtgccgccagcggcttcacctttagcagctacgccatgagctgggtccgacaggctcctggcaaaggactggaatgggtgtccagcatcagcggcagcggcgactacatctactacgccgatagcgtgaagggcagattcaccatcagccgggacatcagcaagaacaccctgtacctccagatgaacagcctgagagccgaggacaccgccgtgtactactgtgccaaagaaggcaccggcgctaacagcagcctggccgattatagaggccagggcacactggtcaccgtgtctagtggcggaggaagcggcggaggatctgaagtgcaggttttggagtctggcggaggactggttcagcctggcggatctctgagactgtcttgtgccgccagcggcttcaccttcagcaactttgccatgagctgggtccgacaggcccctggcaaaggacttgaatgggtgtccacaatcagcggcagcgccggcacaacagattacgccgattctgtgaagggcagattcaccatcagccgggacaacagcaagaaaaccctgtacctccagatgaacagcctgcgcgtggaagataccgccgtgtactactgtgccgatggcagaggccccttcttcgattatcgcggccagggcacactggtcaccgtttcttctggtaccggcggaggcggatctggcggcggaggtagcggtggcggaggatctgaattcgacatccagatgacacagagccctagcagcctgtctgccagcgtgggagacagagtgaccatcacatgcaaggccagcgaccacatcaacaactggctggcctggtatcagcagaagcctggacaggcccctaagctgctgatctacggcgctaccacactggaaacaggcgtgcccagcagattttctggcagcggctctggcaccgactacaccctgacaatatccagcctccagcctgaggacttcgccacctactactgtcagcagagctggaacaccccttggacattcggccagggcaccaagctggaaatcaagagactcgagatccagaaccctgatcctgccgtgtaccagctgcgggatagcaagagcagcgacaagagcgtgtgtctgttcaccgacttcgacagccagaccaacgtgtcccagagcaaggactccgacgtgtacatcaccgataagtgcgtgctggacatgcggagcatggacttcaagagcaactccgccgtggcctggtccaacaagtccgatttcgcctgcgccaacgccttcaacaacagcattatccccgaggacacattcttcccaagcagcgacgtgccctgcgacgtgaagctggtggaaaagagcttcgagacagacaccaacctgaacttccagaacctgagcgtgatcggcttcagaatcctgctgctgaaagtggccggctttaacctgctgatgaccctgcggctgtggtccagccgcgccaagagaagcggatctggcgtgaagcagaccctgaatttcgacctgctgaagctggctggcgacgtggaatccaacccaggccctactagtatggactggatttggcgcatccttttccttgtcggcgctgctaccggcgcgcattccttcgaacaagttcagcttcaacagcctggcgctgagctggtcaaacctggcgcttctgtgaagatgagctgcaaagccagcggctacgccttcagcagctactggatcaactggatgaagcagaaacccggccagggactcgaatggatcggccaaatctatcccggcgacggcgacaccaactacaacggcaagttcaagggcagagccacactgaccgccgatacctctagcagcacagcctacatgcagctgagcagcctgaccagcgaagatagcgccgtgtacttctgtgcccggtccatcacaacagtcgtgggctgcgctatggactattggggccagggaacaagcgtgaccgtgtctagtacgcgtgaggacctgaagaacgtgttcccacctgaggtggccgtgttcgagcctagcaaggccgagatcgcccacacccagaaagccaccctcgtgtgcctggctaccggcttctaccccgaccatgtggaactgtcttggtgggtcaacggcaaagaggtgcacagcggcgtgtgtaccgacccccagccactgaaagaacagcccgccctgaacgacagccggtactgcctgagcagcagactgagagtgtccgccaccttctggcagaacccccggaaccacttcagatgccaggtgcagttctacggcctgagcgagaacgacgagtggacccaggacagagccaagcccgtgacccagatcgtgtctgccgaagcctggggcagagccgattgcggcatcaccagcgccagctaccaccagggcgtgctgagcgccaccatcctgtacgagatcctgctgggcaaggccaccctgtacgccgtgctggtgtctgccctggtgctgatggctatggtcaagcggaaggacagccggggaagggccaagcgatctggatctggagcaacaaacttctcactactcaaacaagcaggtgacgtggaggagaatcccgggccttctagaggccatatgaccgagtacaagcccacggtgcgcctcgccacccgcgacgacgtccccagggccgtacgcaccctcgccgccgcgttcgccgactaccccgccacgcgccacaccgtcgatccggaccgccacatcgagcgggtcaccgagctgcaagaactcttcctcacgcgcgtcgggctcgacatcggcaaggtgtgggtcgcggacgacggcgccgcggtggcggtctggaccacgccggagagcgtcgaagcgggggcggtgttcgccgagatcggcccgcgcatggccgagttgagcggttcccggctggccgcgcagcaacagatggaaggcctcctggcgccgcaccggcccaaggagcccgcgtggttcctggccaccgtcggcgtctcgcccgaccaccagggcaagggtctgggcagcgccgtcgtgctccccggagtggaggcggccgagcgcgccggggtgcccgccttcctggagacctccgcgccccgcaacctccccttctacgagcggctcggcttcaccgtcaccgccgacgtcgaggtgcccgaaggaccgcgcacctggtgcatgacccgcaagcccggtgcctga

SEQ ID NO: 6314 - DNA, 3363 bp, Artificial Sequence
  Synthetic Polynucloetide
atggccttaccagtgaccgccttgctcctgccgctggccttgctgctccacgccgccaggccggaggttcagctgcttgagtctggcggaggactggttcaacctggcggaagcctgagactgtcttgtgccgccagcggcttcacctttagcagctacgccatgagctgggtccgacaggctcctggcaaaggactggaatgggtgtccagcatcagcggcagcggcgactacatctactacgccgatagcgtgaagggcagattcaccatcagccgggacatcagcaagaacaccctgtacctccagatgaacagcctgagagccgaggacaccgccgtgtactactgtgccaaagaaggcaccggcgctaacagcagcctggccgattatagaggccagggcacactggtcaccgtgtctagtggcggaggaagcggcggaggatctgaagtgcaggttttggagtctggcggaggactggttcagcctggcggatctctgagactgtcttgtgccgccagcggcttcaccttcagcaactttgccatgagctgggtccgacaggcccctggcaaaggacttgaatgggtgtccacaatcagcggcagcgccggcacaacagattacgccgattctgtgaagggcagattcaccatcagccgggacaacagcaagaaaaccctgtacctccagatgaacagcctgcgcgtggaagataccgccgtgtactactgtgccgatggcagaggccccttcttcgattatcgcggccagggcacactggtcaccgtttcttctggtaccggcggaggcggatctggcggcggaggtagcggtggcggaggatctgaattcgacatccagatgacacagagccctagcagcctgtctgccagcgtgggagacagagtgaccatcacatgcaaggccagcgaccacatcaacaactggctggcctggtatcagcagaagcctggacaggcccctaagctgctgatctacggcgctaccacactggaaacaggcgtgcccagcagattttctggcagcggctctggcaccgactacaccctgacaatatccagcctccagcctgaggacttcgccacctactactgtcagcagagctggaacaccccttggacattcggccagggcaccaagctggaaatcaagagactcgaggacctgaagaacgtgttcccacctgaggtggccgtgttcgagcctagcaaggccgagatcgcccacacccagaaagccaccctcgtgtgcctggctaccggcttctaccccgaccatgtggaactgtcttggtgggtcaacggcaaagaggtgcacagcggcgtgtgtaccgacccccagccactgaaagaacagcccgccctgaacgacagccggtactgcctgagcagcagactgagagtgtccgccaccttctggcagaacccccggaaccacttcagatgccaggtgcagttctacggcctgagcgagaacgacgagtggacccaggacagagccaagcccgtgacccagatcgtgtctgccgaagcctggggcagagccgattgcggcatcaccagcgccagctaccaccagggcgtgctgagcgccaccatcctgtacgagatcctgctgggcaaggccaccctgtacgccgtgctggtgtctgccctggtgctgatggctatggtcaagcggaaggacagccggggaagggccaagcgatctggatctggagcaacaaacttctcactactcaaacaagcaggtgacgtggaggagaatcccgggcctactagtatggactggatttggcgcatccttttccttgtcggcgctgctaccggcgcgcattccttcgaacaagttcagcttcaacagcctggcgctgagctggtcaaacctggcgcttctgtgaagatgagctgcaaagccagcggctacgccttcagcagctactggatcaactggatgaagcagaaacccggccagggactcgaatggatcggccaaatctatcccggcgacggcgacaccaactacaacggcaagttcaagggcagagccacactgaccgccgatacctctagcagcacagcctacatgcagctgagcagcctgaccagcgaagatagcgccgtgtacttctgtgcccggtccatcacaacagtcgtgggctgcgctatggactattggggccagggaacaagcgtgaccgtgtctagtacgcgtatccagaaccctgatcctgccgtgtaccagctgcgggatagcaagagcagcgacaagagcgtgtgtctgttcaccgacttcgacagccagaccaacgtgtcccagagcaaggactccgacgtgtacatcaccgataagtgcgtgctggacatgcggagcatggacttcaagagcaactccgccgtggcctggtccaacaagtccgatttcgcctgcgccaacgccttcaacaacagcattatccccgaggacacattcttcccaagcagcgacgtgccctgcgacgtgaagctggtggaaaagagcttcgagacagacaccaacctgaacttccagaacctgagcgtgatcggcttcagaatcctgctgctgaaagtggccggctttaacctgctgatgaccctgcggctgtggtccagccgcgccaagagaagcggatctggcgtgaagcagaccctgaatttcgacctgctgaagctggctggcgacgtggaatccaacccaggcccttctagaggccatatgaccgagtacaagcccacggtgcgcctcgccacccgcgacgacgtccccagggccgtacgcaccctcgccgccgcgttcgccgactaccccgccacgcgccacaccgtcgatccggaccgccacatcgagcgggtcaccgagctgcaagaactcttcctcacgcgcgtcgggctcgacatcggcaaggtgtgggtcgcggacgacggcgccgcggtggcggtctggaccacgccggagagcgtcgaagcgggggcggtgttcgccgagatcggcccgcgcatggccgagttgagcggttcccggctggccgcgcagcaacagatggaaggcctcctggcgccgcaccggcccaaggagcccgcgtggttcctggccaccgtcggcgtctcgcccgaccaccagggcaagggtctgggcagcgccgtcgtgctccccggagtggaggcggccgagcgcgccggggtgcccgccttcctggagacctccgcgccccgcaacctccccttctacgagcggctcggcttcaccgtcaccgccgacgtcgaggtgcccgaaggaccgcgcacctggtgcatgacccgcaagcccggtgcctga

SEQ ID NO: 6315 - DNA, 2661 bp, Artificial Sequence
  Synthetic Polynucloetide
atggccttaccagtgaccgccttgctcctgccgctggccttgctgctccacgccgccaggccggaggttcagctgcttgagtctggcggaggactggttcaacctggcggaagcctgagactgtcttgtgccgccagcggcttcacctttagcagctacgccatgagctgggtccgacaggctcctggcaaaggactggaatgggtgtccagcatcagcggcagcggcgactacatctactacgccgatagcgtgaagggcagattcaccatcagccgggacatcagcaagaacaccctgtacctccagatgaacagcctgagagccgaggacaccgccgtgtactactgtgccaaagaaggcaccggcgctaacagcagcctggccgattatagaggccagggcacactggtcaccgtgtctagtggcggaggaagcggcggaggatctgaagtgcaggttttggagtctggcggaggactggttcagcctggcggatctctgagactgtcttgtgccgccagcggcttcaccttcagcaactttgccatgagctgggtccgacaggcccctggcaaaggacttgaatgggtgtccacaatcagcggcagcgccggcacaacagattacgccgattctgtgaagggcagattcaccatcagccgggacaacagcaagaaaaccctgtacctccagatgaacagcctgcgcgtggaagataccgccgtgtactactgtgccgatggcagaggccccttcttcgattatcgcggccagggcacactggtcaccgtttcttctggtaccggcggaggcggatctggcggcggaggtagcggtggcggaggatctgaattcgacatccagatgacacagagccctagcagcctgtctgccagcgtgggagacagagtgaccatcacatgcaaggccagcgaccacatcaacaactggctggcctggtatcagcagaagcctggacaggcccctaagctgctgatctacggcgctaccacactggaaacaggcgtgcccagcagattttctggcagcggctctggcaccgactacaccctgacaatatccagcctccagcctgaggacttcgccacctactactgtcagcagagctggaacaccccttggacattcggccagggcaccaagctggaaatcaagagactcgaggacctgaagaacgtgttcccacctgaggtggccgtgttcgagcctagcgaggccgagatcagccacacccagaaagccaccctcgtgtgcctggctaccggcttctaccccgaccatgtggaactgtcttggtgggtcaacggcaaagaggtgcacagcggcgtgtgtaccgacccccagccactgaaagaacagcccgccctgaacgacagccggtactgcctgagcagcagactgagagtgtccgccaccttctggcagaacccccggaaccacttcagatgccaggtgcagttctacggcctgagcgagaacgacgagtggacccaggacagagccaagcccgtgacccagatcgtgtctgccgaagcctggggcagagccgattgcggctttaccagcgagagctaccagcagggcgtgctgagcgccaccatcctgtacgagatcctgctgggcaaggccaccctgtacgccgtgctggtgtctgccctggtgctgatggctatggtcaagcggaaggacagccggggaagggccaagcgatctggatctggagcaacaaacttctcactactcaaacaagcaggtgacgtggaggagaatcccgggcctactagtatggactggatttggcgcatccttttccttgtcggcgctgctaccggcgcgcattccttcgaacaagttcagcttcaacagcctggcgctgagctggtcaaacctggcgcttctgtgaagatgagctgcaaagccagcggctacgccttcagcagctactggatcaactggatgaagcagaaacccggccagggactcgaatggatcggccaaatctatcccggcgacggcgacaccaactacaacggcaagttcaagggcagagccacactgaccgccgatacctctagcagcacagcctacatgcagctgagcagcctgaccagcgaagatagcgccgtgtacttctgtgcccggtccatcacaacagtcgtgggctgcgctatggactattggggccagggaacaagcgtgaccgtgtctagtacgcgtatccagaaccctgatcctgccgtgtaccagctgcgggatagcaagagcagcgacaagagcgtgtgtctgttcaccgacttcgacagccagaccaacgtgtcccagagcaaggactccgacgtgtacatcaccgataagtgcgtgctggacatgcggagcatggacttcaagagcaactccgccgtggcctggtccaacaagtccgatttcgcctgcgccaacgccttcaacaacagcattatccccgaggacacattcttcccaagccccgagagcagctgcgacgtgaagctggtggaaaagagcttcgagacagacaccaacctgaacttccagaacctgagcgtgatcggcttcagaatcctgctgctgaaagtggccggctttaacctgctgatgaccctgcggctgtggtccagc

SEQ ID NO: 6316 - DNA, 3336 bp, Artificial Sequence
  Synthetic Polynucloetide
atggccttaccagtgaccgccttgctcctgccgctggccttgctgctccacgccgccaggccggaggttcagctgcttgagtctggcggaggactggttcaacctggcggaagcctgagactgtcttgtgccgccagcggcttcacctttagcagctacgccatgagctgggtccgacaggctcctggcaaaggactggaatgggtgtccagcatcagcggcagcggcgactacatctactacgccgatagcgtgaagggcagattcaccatcagccgggacatcagcaagaacaccctgtacctccagatgaacagcctgagagccgaggacaccgccgtgtactactgtgccaaagaaggcaccggcgctaacagcagcctggccgattatagaggccagggcacactggtcaccgtgtctagtggcggaggaagcggcggaggatctgaagtgcaggttttggagtctggcggaggactggttcagcctggcggatctctgagactgtcttgtgccgccagcggcttcaccttcagcaactttgccatgagctgggtccgacaggcccctggcaaaggacttgaatgggtgtccacaatcagcggcagcgccggcacaacagattacgccgattctgtgaagggcagattcaccatcagccgggacaacagcaagaaaaccctgtacctccagatgaacagcctgcgcgtggaagataccgccgtgtactactgtgccgatggcagaggccccttcttcgattatcgcggccagggcacactggtcaccgtttcttctggtaccggcggaggcggatctggcggcggaggtagcggtggcggaggatctgaattcgacatccagatgacacagagccctagcagcctgtctgccagcgtgggagacagagtgaccatcacatgcaaggccagcgaccacatcaacaactggctggcctggtatcagcagaagcctggacaggcccctaagctgctgatctacggcgctaccacactggaaacaggcgtgcccagcagattttctggcagcggctctggcaccgactacaccctgacaatatccagcctccagcctgaggacttcgccacctactactgtcagcagagctggaacaccccttggacattcggccagggcaccaagctggaaatcaagagactcgaggacctgaagaacgtgttcccacctgaggtggccgtgttcgagcctagcgaggccgagatcagccacacccagaaagccaccctcgtgtgcctggctaccggcttctaccccgaccatgtggaactgtcttggtgggtcaacggcaaagaggtgcacagcggcgtgtgtaccgacccccagccactgaaagaacagcccgccctgaacgacagccggtactgcctgagcagcagactgagagtgtccgccaccttctggcagaacccccggaaccacttcagatgccaggtgcagttctacggcctgagcgagaacgacgagtggacccaggacagagccaagcccgtgacccagatcgtgtctgccgaagcctggggcagagccgattgcggctttaccagcgagagctaccagcagggcgtgctgagcgccaccatcctgtacgagatcctgctgggcaaggccaccctgtacgccgtgctggtgtctgccctggtgctgatggctatggtcaagcggaaggacagccggggaagggccaagcgatctggatctggagcaacaaacttctcactactcaaacaagcaggtgacgtggaggagaatcccgggcctactagtatggactggatttggcgcatccttttccttgtcggcgctgctaccggcgcgcattccttcgaacaagttcagcttcaacagcctggcgctgagctggtcaaacctggcgcttctgtgaagatgagctgcaaagccagcggctacgccttcagcagctactggatcaactggatgaagcagaaacccggccagggactcgaatggatcggccaaatctatcccggcgacggcgacaccaactacaacggcaagttcaagggcagagccacactgaccgccgatacctctagcagcacagcctacatgcagctgagcagcctgaccagcgaagatagcgccgtgtacttctgtgcccggtccatcacaacagtcgtgggctgcgctatggactattggggccagggaacaagcgtgaccgtgtctagtacgcgtatccagaaccctgatcctgccgtgtaccagctgcgggatagcaagagcagcgacaagagcgtgtgtctgttcaccgacttcgacagccagaccaacgtgtcccagagcaaggactccgacgtgtacatcaccgataagtgcgtgctggacatgcggagcatggacttcaagagcaactccgccgtggcctggtccaacaagtccgatttcgcctgcgccaacgccttcaacaacagcattatccccgaggacacattcttcccaagccccgagagcagctgcgacgtgaagctggtggaaaagagcttcgagacagacaccaacctgaacttccagaacctgagcgtgatcggcttcagaatcctgctgctgaaagtggccggctttaacctgctgatgaccctgcggctgtggtccagccgcgccaagagaagcggatctggcgtgaagcagaccctgaatttcgacctgctgaagctggctggcgacgtggaatccaacccaggcccttctagaggcgggatccacaccatggctacctacgaggtgctgtgcgaggtggcaagaaagctgggcaccgacgacagagaagtggtgctgttcctgctgaacgtgttcatccctcagcctacactggcccagctgatcggtgcactgagagccctgaaagaggaaggccggctgacctttcctctgctggccgaatgcctgttcagagccggaagaagggatctgctgcgggacctgctgcatctggaccccagatttctggaaagacacctggccggcaccatgagctacttcagcccttaccagctgaccgtgctgcacgttgacggcgaactgtgcgccagagatattcggagcctgatcttcctgagcaaggacaccatcggcagccggtctacccctcagacatttctgcactgggtgtactgcatggaaaacctggacctgctcggccccacagatgtggatgccctgatgtccatgctgagaagcctgagcagagtggacctccagagacaggtgcagacactgatgggactgcacctgagcggacctagccacagccagcactacagacacacccct

SEQ ID NO: 6317 - DNA, 2673 bp, Artificial Sequence
  Synthetic Polynucloetide
atggccttaccagtgaccgccttgctcctgccgctggccttgctgctccacgccgccaggccggaggttcagctgcttgagtctggcggaggactggttcaacctggcggaagcctgagactgtcttgtgccgccagcggcttcacctttagcagctacgccatgagctgggtccgacaggctcctggcaaaggactggaatgggtgtccagcatcagcggcagcggcgactacatctactacgccgatagcgtgaagggcagattcaccatcagccgggacatcagcaagaacaccctgtacctccagatgaacagcctgagagccgaggacaccgccgtgtactactgtgccaaagaaggcaccggcgctaacagcagcctggccgattatagaggccagggcacactggtcaccgtgtctagtggcggaggaagcggcggaggatctgaagtgcaggttttggagtctggcggaggactggttcagcctggcggatctctgagactgtcttgtgccgccagcggcttcaccttcagcaactttgccatgagctgggtccgacaggcccctggcaaaggacttgaatgggtgtccacaatcagcggcagcgccggcacaacagattacgccgattctgtgaagggcagattcaccatcagccgggacaacagcaagaaaaccctgtacctccagatgaacagcctgcgcgtggaagataccgccgtgtactactgtgccgatggcagaggccccttcttcgattatcgcggccagggcacactggtcaccgtttcttctggtaccggcggaggcggatctggcggcggaggtagcggtggcggaggatctgaattcgacatccagatgacacagagccctagcagcctgtctgccagcgtgggagacagagtgaccatcacatgcaaggccagcgaccacatcaacaactggctggcctggtatcagcagaagcctggacaggcccctaagctgctgatctacggcgctaccacactggaaacaggcgtgcccagcagattttctggcagcggctctggcaccgactacaccctgacaatatccagcctccagcctgaggacttcgccacctactactgtcagcagagctggaacaccccttggacattcggccagggcaccaagctggaaatcaagagactcgagatccagaaccctgatcctgccgtgtaccagctgcgggatagcaagagcagcgacaagagcgtgtgtctgttcaccgacttcgacagccagaccaacgtgtcccagagcaaggactccgacgtgtacatcaccgataagtgcgtgctggacatgcggagcatggacttcaagagcaactccgccgtggcctggtccaacaagtccgatttcgcctgcgccaacgccttcaacaacagcattatccccgaggacacattcttcccaagccccgagagcagctgcgacgtgaagctggtggaaaagagcttcgagacagacaccaacctgaacttccagaacctgagcgtgatcggcttcagaatcctgctgctgaaagtggccggctttaacctgctgatgaccctgcggctgtggtccagccgcgccaagagaagcggatctggcgtgaagcagaccctgaatttcgacctgctgaagctggctggcgacgtggaatccaacccaggccctactagtatggactggatttggcgcatccttttccttgtcggcgctgctaccggcgcgcattccttcgaacaagttcagcttcaacagcctggcgctgagctggtcaaacctggcgcttctgtgaagatgagctgcaaagccagcggctacgccttcagcagctactggatcaactggatgaagcagaaacccggccagggactcgaatggatcggccaaatctatcccggcgacggcgacaccaactacaacggcaagttcaagggcagagccacactgaccgccgatacctctagcagcacagcctacatgcagctgagcagcctgaccagcgaagatagcgccgtgtacttctgtgcccggtccatcacaacagtcgtgggctgcgctatggactattggggccagggaacaagcgtgaccgtgtctagtacgcgtgaggacctgaagaacgtgttcccacctgaggtggccgtgttcgagcctagcgaggccgagatcagccacacccagaaagccaccctcgtgtgcctggctaccggcttctaccccgaccatgtggaactgtcttggtgggtcaacggcaaagaggtgcacagcggcgtgtgtaccgacccccagccactgaaagaacagcccgccctgaacgacagccggtactgcctgagcagcagactgagagtgtccgccaccttctggcagaacccccggaaccacttcagatgccaggtgcagttctacggcctgagcgagaacgacgagtggacccaggacagagccaagcccgtgacccagatcgtgtctgccgaagcctggggcagagccgattgcggctttaccagcgagagctaccagcagggcgtgctgagcgccaccatcctgtacgagatcctgctgggcaaggccaccctgtacgccgtgctggtgtctgccctggtgctgatggctatggtcaagcggaaggacagccgggga

SEQ ID NO: 6318 - DNA, 3339 bp, Artificial Sequence
  Synthetic Polynucloetide
atggccttaccagtgaccgccttgctcctgccgctggccttgctgctccacgccgccaggccggaggttcagctgcttgagtctggcggaggactggttcaacctggcggaagcctgagactgtcttgtgccgccagcggcttcacctttagcagctacgccatgagctgggtccgacaggctcctggcaaaggactggaatgggtgtccagcatcagcggcagcggcgactacatctactacgccgatagcgtgaagggcagattcaccatcagccgggacatcagcaagaacaccctgtacctccagatgaacagcctgagagccgaggacaccgccgtgtactactgtgccaaagaaggcaccggcgctaacagcagcctggccgattatagaggccagggcacactggtcaccgtgtctagtggcggaggaagcggcggaggatctgaagtgcaggttttggagtctggcggaggactggttcagcctggcggatctctgagactgtcttgtgccgccagcggcttcaccttcagcaactttgccatgagctgggtccgacaggcccctggcaaaggacttgaatgggtgtccacaatcagcggcagcgccggcacaacagattacgccgattctgtgaagggcagattcaccatcagccgggacaacagcaagaaaaccctgtacctccagatgaacagcctgcgcgtggaagataccgccgtgtactactgtgccgatggcagaggccccttcttcgattatcgcggccagggcacactggtcaccgtttcttctggtaccggcggaggcggatctggcggcggaggtagcggtggcggaggatctgaattcgacatccagatgacacagagccctagcagcctgtctgccagcgtgggagacagagtgaccatcacatgcaaggccagcgaccacatcaacaactggctggcctggtatcagcagaagcctggacaggcccctaagctgctgatctacggcgctaccacactggaaacaggcgtgcccagcagattttctggcagcggctctggcaccgactacaccctgacaatatccagcctccagcctgaggacttcgccacctactactgtcagcagagctggaacaccccttggacattcggccagggcaccaagctggaaatcaagagactcgagatccagaaccctgatcctgccgtgtaccagctgcgggatagcaagagcagcgacaagagcgtgtgtctgttcaccgacttcgacagccagaccaacgtgtcccagagcaaggactccgacgtgtacatcaccgataagtgcgtgctggacatgcggagcatggacttcaagagcaactccgccgtggcctggtccaacaagtccgatttcgcctgcgccaacgccttcaacaacagcattatccccgaggacacattcttcccaagccccgagagcagctgcgacgtgaagctggtggaaaagagcttcgagacagacaccaacctgaacttccagaacctgagcgtgatcggcttcagaatcctgctgctgaaagtggccggctttaacctgctgatgaccctgcggctgtggtccagccgcgccaagagaagcggatctggcgtgaagcagaccctgaatttcgacctgctgaagctggctggcgacgtggaatccaacccaggccctactagtatggactggatttggcgcatccttttccttgtcggcgctgctaccggcgcgcattccttcgaacaagttcagcttcaacagcctggcgctgagctggtcaaacctggcgcttctgtgaagatgagctgcaaagccagcggctacgccttcagcagctactggatcaactggatgaagcagaaacccggccagggactcgaatggatcggccaaatctatcccggcgacggcgacaccaactacaacggcaagttcaagggcagagccacactgaccgccgatacctctagcagcacagcctacatgcagctgagcagcctgaccagcgaagatagcgccgtgtacttctgtgcccggtccatcacaacagtcgtgggctgcgctatggactattggggccagggaacaagcgtgaccgtgtctagtacgcgtgaggacctgaagaacgtgttcccacctgaggtggccgtgttcgagcctagcgaggccgagatcagccacacccagaaagccaccctcgtgtgcctggctaccggcttctaccccgaccatgtggaactgtcttggtgggtcaacggcaaagaggtgcacagcggcgtgtgtaccgacccccagccactgaaagaacagcccgccctgaacgacagccggtactgcctgagcagcagactgagagtgtccgccaccttctggcagaacccccggaaccacttcagatgccaggtgcagttctacggcctgagcgagaacgacgagtggacccaggacagagccaagcccgtgacccagatcgtgtctgccgaagcctggggcagagccgattgcggctttaccagcgagagctaccagcagggcgtgctgagcgccaccatcctgtacgagatcctgctgggcaaggccaccctgtacgccgtgctggtgtctgccctggtgctgatggctatggtcaagcggaaggacagccggggaagggccaagcgatctggatctggagcaacaaacttctcactactcaaacaagcaggtgacgtggaggagaatcccgggccttctagaggcgggatccacaccatggctacctacgaggtgctgtgcgaggtggcaagaaagctgggcaccgacgacagagaagtggtgctgttcctgctgaacgtgttcatccctcagcctacactggcccagctgatcggtgcactgagagccctgaaagaggaaggccggctgacctttcctctgctggccgaatgcctgttcagagccggaagaagggatctgctgcgggacctgctgcatctggaccccagatttctggaaagacacctggccggcaccatgagctacttcagcccttaccagctgaccgtgctgcacgttgacggcgaactgtgcgccagagatattcggagcctgatcttcctgagcaaggacaccatcggcagccggtctacccctcagacatttctgcactgggtgtactgcatggaaaacctggacctgctcggccccacagatgtggatgccctgatgtccatgctgagaagcctgagcagagtggacctccagagacaggtgcagacactgatgggactgcacctgagcggacctagccacagccagcactacagacacacccct

SEQ ID NO: 6319 - DNA, 3498 bp, Artificial Sequence
  Synthetic Polynucloetide
atggccttaccagtgaccgccttgctcctgccgctggccttgctgctccacgccgccaggccgctcgaggggaaaccaattcccaaccctcttctgggactggattcaaccggcagcggcgaggacctgaagaacgtgttcccacctgaggtggccgtgttcgagcctagcaaggccgagatcgcccacacccagaaagccaccctcgtgtgcctggctaccggcttctaccccgaccatgtggaactgtcttggtgggtcaacggcaaagaggtgcacagcggcgtgtgtaccgacccccagccactgaaagaacagcccgccctgaacgacagccggtactgcctgagcagcagactgagagtgtccgccaccttctggcagaacccccggaaccacttcagatgccaggtgcagttctacggcctgagcgagaacgacgagtggacccaggacagagccaagcccgtgacccagatcgtgtctgccgaagcctggggcagagccgattgcggcatcaccagcgccagctaccaccagggcgtgctgagcgccaccatcctgtacgagatcctgctgggcaaggccaccctgtacgccgtgctggtgtctgccctggtgctgatggctatggtcaagcggaaggacagccggggaagggccaagcgatctggatctggagcaacaaacttctcactactcaaacaagcaggtgacgtggaggagaatcccgggcctactagcatggccttaccagtgaccgccttgctcctgccgctggccttgctgctccacgccgccaggccggaggttcagctgcttgagtctggcggaggactggttcaacctggcggaagcctgagactgtcttgtgccgccagcggcttcacctttagcagctacgccatgagctgggtccgacaggctcctggcaaaggactggaatgggtgtccagcatcagcggcagcggcgactacatctactacgccgatagcgtgaagggcagattcaccatcagccgggacatcagcaagaacaccctgtacctccagatgaacagcctgagagccgaggacaccgccgtgtactactgtgccaaagaaggcaccggcgctaacagcagcctggccgattatagaggccagggcacactggtcaccgtgtctagtggcggaggaagcggcggaggatctgaagtgcaggttttggagtctggcggaggactggttcagcctggcggatctctgagactgtcttgtgccgccagcggcttcaccttcagcaactttgccatgagctgggtccgacaggcccctggcaaaggacttgaatgggtgtccacaatcagcggcagcgccggcacaacagattacgccgattctgtgaagggcagattcaccatcagccgggacaacagcaagaaaaccctgtacctccagatgaacagcctgcgcgtggaagataccgccgtgtactactgtgccgatggcagaggccccttcttcgattatcgcggccagggcacactggtcaccgtttcttctggtaccggcggaggcggatctggcggcggaggtagcggtggcggaggatctgaattcgacatccagatgacacagagccctagcagcctgtctgccagcgtgggagacagagtgaccatcacatgcaaggccagcgaccacatcaacaactggctggcctggtatcagcagaagcctggacaggcccctaagctgctgatctacggcgctaccacactggaaacaggcgtgcccagcagattttctggcagcggctctggcaccgactacaccctgacaatatccagcctccagcctgaggacttcgccacctactactgtcagcagagctggaacaccccttggacattcggccagggcaccaagctggaaatcaagagaggcggaggcggaagtggaggcggaggatctggcggcggaggctctcaagttcagcttcaacagcctggcgctgagctggtcaaacctggcgcttctgtgaagatgagctgcaaagccagcggctacgccttcagcagctactggatcaactggatgaagcagaaacccggccagggactcgaatggatcggccaaatctatcccggcgacggcgacaccaactacaacggcaagttcaagggcagagccacactgaccgccgatacctctagcagcacagcctacatgcagctgagcagcctgaccagcgaagatagcgccgtgtacttctgtgcccggtccatcacaacagtcgtgggctgcgctatggactattggggccagggaacaagcgtgaccgtgtctagtacgcgtgagcagaaactgatctcggaagaggatgggagcggcatccagaaccctgatcctgccgtgtaccagctgcgggatagcaagagcagcgacaagagcgtgtgtctgttcaccgacttcgacagccagaccaacgtgtcccagagcaaggactccgacgtgtacatcaccgataagtgcgtgctggacatgcggagcatggacttcaagagcaactccgccgtggcctggtccaacaagtccgatttcgcctgcgccaacgccttcaacaacagcattatccccgaggacacattcttcccaagcagcgacgtgccctgcgacgtgaagctggtggaaaagagcttcgagacagacaccaacctgaacttccagaacctgagcgtgatcggcttcagaatcctgctgctgaaagtggccggctttaacctgctgatgaccctgcggctgtggtccagccgcgccaagagaagcggatctggcgtgaagcagaccctgaatttcgacctgctgaagctggctggcgacgtggaatccaacccaggcccttctagaggccatatgaccgagtacaagcccacggtgcgcctcgccacccgcgacgacgtccccagggccgtacgcaccctcgccgccgcgttcgccgactaccccgccacgcgccacaccgtcgatccggaccgccacatcgagcgggtcaccgagctgcaagaactcttcctcacgcgcgtcgggctcgacatcggcaaggtgtgggtcgcggacgacggcgccgcggtggcggtctggaccacgccggagagcgtcgaagcgggggcggtgttcgccgagatcggcccgcgcatggccgagttgagcggttcccggctggccgcgcagcaacagatggaaggcctcctggcgccgcaccggcccaaggagcccgcgtggttcctggccaccgtcggcgtctcgcccgaccaccagggcaagggtctgggcagcgccgtcgtgctccccggagtggaggcggccgagcgcgccggggtgcccgccttcctggagacctccgcgccccgcaacctccccttctacgagcggctcggcttcaccgtcaccgccgacgtcgaggtgcccgaaggaccgcgcacctggtgcatgacccgcaagcccggtgcctga

SEQ ID NO: 6320 - DNA, 3501 bp, Artificial Sequence
  Synthetic Polynucloetide
atggccttaccagtgaccgccttgctcctgccgctggccttgctgctccacgccgccaggccgctcgagcagaaactgatctcggaagaggatctgggctccggcgatcgccctgatcctgccgtgtaccagctgcgggatagcaagagcagcgacaagagcgtgtgtctgttcaccgacttcgacagccagaccaacgtgtcccagagcaaggactccgacgtgtacatcaccgataagtgcgtgctggacatgcggagcatggacttcaagagcaactccgccgtggcctggtccaacaagtccgatttcgcctgcgccaacgccttcaacaacagcattatccccgaggacacattcttcccaagccccgagagcagctgcgacgtgaagctggtggaaaagagcttcgagacagacaccaacctgaacttccagaacctgagcgtgatcggcttcagaatcctgctgctgaaagtggccggctttaacctgctgatgaccctgcggctgtggtccagctctagtcgcgccaagagaagcggatctggcgtgaagcagaccctgaatttcgacctgctgaagctggctggcgacgtggaatccaacccaggccccactagcatggccttaccagtgaccgccttgctcctgccgctggccttgctgctccacgccgccaggccggaggttcagctgcttgagtctggcggaggactggttcaacctggcggaagcctgagactgtcttgtgccgccagcggcttcacctttagcagctacgccatgagctgggtccgacaggctcctggcaaaggactggaatgggtgtccagcatcagcggcagcggcgactacatctactacgccgatagcgtgaagggcagattcaccatcagccgggacatcagcaagaacaccctgtacctccagatgaacagcctgagagccgaggacaccgccgtgtactactgtgccaaagaaggcaccggcgctaacagcagcctggccgattatagaggccagggcacactggtcaccgtgtctagtggcggaggaagcggcggaggatctgaagtgcaggttttggagtctggcggaggactggttcagcctggcggatctctgagactgtcttgtgccgccagcggcttcaccttcagcaactttgccatgagctgggtccgacaggcccctggcaaaggacttgaatgggtgtccacaatcagcggcagcgccggcacaacagattacgccgattctgtgaagggcagattcaccatcagccgggacaacagcaagaaaaccctgtacctccagatgaacagcctgcgcgtggaagataccgccgtgtactactgtgccgatggcagaggccccttcttcgattatcgcggccagggcacactggtcaccgtttcttctggtaccggcggaggcggatctggcggcggaggtagcggtggcggaggatctgaattcgacatccagatgacacagagccctagcagcctgtctgccagcgtgggagacagagtgaccatcacatgcaaggccagcgaccacatcaacaactggctggcctggtatcagcagaagcctggacaggcccctaagctgctgatctacggcgctaccacactggaaacaggcgtgcccagcagattttctggcagcggctctggcaccgactacaccctgacaatatccagcctccagcctgaggacttcgccacctactactgtcagcagagctggaacaccccttggacattcggccagggcaccaagctggaaatcaagagaggcggaggcggaagtggaggcggaggatctggcggcggaggctctcaagttcagcttcaacagcctggcgctgagctggtcaaacctggcgcttctgtgaagatgagctgcaaagccagcggctacgccttcagcagctactggatcaactggatgaagcagaaacccggccagggactcgaatggatcggccaaatctatcccggcgacggcgacaccaactacaacggcaagttcaagggcagagccacactgaccgccgatacctctagcagcacagcctacatgcagctgagcagcctgaccagcgaagatagcgccgtgtacttctgtgcccggtccatcacaacagtcgtgggctgcgctatggactattggggccagggaacaagcgtgaccgtgtctagtacgcgtgggaaaccaattcccaaccctcttctgggactggattcaaccggcagcggcgaggacctgaagaacgtgttcccacctgaggtggccgtgttcgagcctagcgaggccgagatcagccacacccagaaagccaccctcgtgtgcctggctaccggcttctaccccgaccatgtggaactgtcttggtgggtcaacggcaaagaggtgcacagcggcgtgtgtaccgacccccagccactgaaagaacagcccgccctgaacgacagccggtactgcctgagcagcagactgagagtgtccgccaccttctggcagaacccccggaaccacttcagatgccaggtgcagttctacggcctgagcgagaacgacgagtggacccaggacagagccaagcccgtgacccagatcgtgtctgccgaagcctggggcagagccgattgcggctttaccagcgagagctaccagcagggcgtgctgagcgccaccatcctgtacgagatcctgctgggcaaggccaccctgtacgccgtgctggtgtctgccctggtgctgatggctatggtcaagcggaaggacagccggggaagggccaagcgatctggatctggagcaacaaacttctcactactcaaacaagcaggtgacgtggaggagaatcccgggccttctagaggccatatgaccgagtacaagcccacggtgcgcctcgccacccgcgacgacgtccccagggccgtacgcaccctcgccgccgcgttcgccgactaccccgccacgcgccacaccgtcgatccggaccgccacatcgagcgggtcaccgagctgcaagaactcttcctcacgcgcgtcgggctcgacatcggcaaggtgtgggtcgcggacgacggcgccgcggtggcggtctggaccacgccggagagcgtcgaagcgggggcggtgttcgccgagatcggcccgcgcatggccgagttgagcggttcccggctggccgcgcagcaacagatggaaggcctcctggcgccgcaccggcccaaggagcccgcgtggttcctggccaccgtcggcgtctcgcccgaccaccagggcaagggtctgggcagcgccgtcgtgctccccggagtggaggcggccgagcgcgccggggtgcccgccttcctggagacctccgcgccccgcaacctccccttctacgagcggctcggcttcaccgtcaccgccgacgtcgaggtgcccgaaggaccgcgcacctggtgcatgacccgcaagcccggtgcctga

SEQ ID NO: 6321 - DNA, 3363 bp, Artificial Sequence
  Synthetic Polynucloetide
atggccttaccagtgaccgccttgctcctgccgctggccttgctgctccacgccgccaggccggaggttcagctgcttgagtctggcggaggactggttcaacctggcggaagcctgagactgtcttgtgccgccagcggcttcacctttagcagctacgccatgagctgggtccgacaggctcctggcaaaggactggaatgggtgtccagcatcagcggcagcggcgactacatctactacgccgatagcgtgaagggcagattcaccatcagccgggacatcagcaagaacaccctgtacctccagatgaacagcctgagagccgaggacaccgccgtgtactactgtgccaaagaaggcaccggcgctaacagcagcctggccgattatagaggccagggcacactggtcaccgtgtctagtggcggaggaagcggcggaggatctgaagtgcaggttttggagtctggcggaggactggttcagcctggcggatctctgagactgtcttgtgccgccagcggcttcaccttcagcaactttgccatgagctgggtccgacaggcccctggcaaaggacttgaatgggtgtccacaatcagcggcagcgccggcacaacagattacgccgattctgtgaagggcagattcaccatcagccgggacaacagcaagaaaaccctgtacctccagatgaacagcctgcgcgtggaagataccgccgtgtactactgtgccgatggcagaggccccttcttcgattatcgcggccagggcacactggtcaccgtttcttctggtaccggcggaggcggatctggcggcggaggtagcggtggcggaggatctgaattcgacatccagatgacacagagccctagcagcctgtctgccagcgtgggagacagagtgaccatcacatgcaaggccagcgaccacatcaacaactggctggcctggtatcagcagaagcctggacaggcccctaagctgctgatctacggcgctaccacactggaaacaggcgtgcccagcagattttctggcagcggctctggcaccgactacaccctgacaatatccagcctccagcctgaggacttcgccacctactactgtcagcagagctggaacaccccttggacattcggccagggcaccaagctggaaatcaagagactcgaggacctgaagaacgtgttcccacctgaggtggccgtgttcgagcctagcgaggccgagatcagccacacccagaaagccaccctcgtgtgcctggctaccggcttctaccccgaccatgtggaactgtcttggtgggtcaacggcaaagaggtgcacagcggcgtgtctaccgacccccagccactgaaagaacagcccgccctgaacgacagccggtactgcctgagcagcagactgagagtgtccgccaccttctggcagaacccccggaaccacttcagatgccaggtgcagttctacggcctgagcgagaacgacgagtggacccaggacagagccaagcccgtgacccagatcgtgtctgccgaagcctggggcagagccgattgcggctttaccagcgagagctaccagcagggcgtgctgagcgccaccatcctgtacgagatcctgctgggcaaggccaccctgtacgccgtgctggtgtctgccctggtgctgatggctatggtcaagcggaaggacagccggggaagggccaagcgatctggatctggagcaacaaacttctcactactcaaacaagcaggtgacgtggaggagaatcccgggcctactagtatggactggatttggcgcatccttttccttgtcggcgctgctaccggcgcgcattccttcgaacaagttcagcttcaacagcctggcgctgagctggtcaaacctggcgcttctgtgaagatgagctgcaaagccagcggctacgccttcagcagctactggatcaactggatgaagcagaaacccggccagggactcgaatggatcggccaaatctatcccggcgacggcgacaccaactacaacggcaagttcaagggcagagccacactgaccgccgatacctctagcagcacagcctacatgcagctgagcagcctgaccagcgaagatagcgccgtgtacttctgtgcccggtccatcacaacagtcgtgggctgcgctatggactattggggccagggaacaagcgtgaccgtgtctagtacgcgtatccagaaccctgatcctgccgtgtaccagctgcgggatagcaagagcagcgacaagagcgtgtgtctgttcaccgacttcgacagccagaccaacgtgtcccagagcaaggactccgacgtgtacatcaccgataagaccgtgctggacatgcggagcatggacttcaagagcaactccgccgtggcctggtccaacaagtccgatttcgcctgcgccaacgccttcaacaacagcattatccccgaggacacattcttcccaagccccgagagcagctgcgacgtgaagctggtggaaaagagcttcgagacagacaccaacctgaacttccagaacctgagcgtgatcggcttcagaatcctgctgctgaaagtggccggctttaacctgctgatgaccctgcggctgtggtccagccgcgccaagagaagcggatctggcgtgaagcagaccctgaatttcgacctgctgaagctggctggcgacgtggaatccaacccaggcccttctagaggccatatgaccgagtacaagcccacggtgcgcctcgccacccgcgacgacgtccccagggccgtacgcaccctcgccgccgcgttcgccgactaccccgccacgcgccacaccgtcgatccggaccgccacatcgagcgggtcaccgagctgcaagaactcttcctcacgcgcgtcgggctcgacatcggcaaggtgtgggtcgcggacgacggcgccgcggtggcggtctggaccacgccggagagcgtcgaagcgggggcggtgttcgccgagatcggcccgcgcatggccgagttgagcggttcccggctggccgcgcagcaacagatggaaggcctcctggcgccgcaccggcccaaggagcccgcgtggttcctggccaccgtcggcgtctcgcccgaccaccagggcaagggtctgggcagcgccgtcgtgctccccggagtggaggcggccgagcgcgccggggtgcccgccttcctggagacctccgcgccccgcaacctccccttctacgagcggctcggcttcaccgtcaccgccgacgtcgaggtgcccgaaggaccgcgcacctggtgcatgacccgcaagcccggtgcctga

SEQ ID NO: 6322 - DNA, 3609 bp, Artificial Sequence
  Synthetic Polynucloetide
atggccttaccagtgaccgccttgctcctgccgctggccttgctgctccacgccgccaggccggaggttcagctgcttgagtctggcggaggactggttcaacctggcggaagcctgagactgtcttgtgccgccagcggcttcacctttagcagctacgccatgagctgggtccgacaggctcctggcaaaggactggaatgggtgtccagcatcagcggcagcggcgactacatctactacgccgatagcgtgaagggcagattcaccatcagccgggacatcagcaagaacaccctgtacctccagatgaacagcctgagagccgaggacaccgccgtgtactactgtgccaaagaaggcaccggcgctaacagcagcctggccgattatagaggccagggcacactggtcaccgtgtctagtggcggaggaagcggcggaggatctgaagtgcaggttttggagtctggcggaggactggttcagcctggcggatctctgagactgtcttgtgccgccagcggcttcaccttcagcaactttgccatgagctgggtccgacaggcccctggcaaaggacttgaatgggtgtccacaatcagcggcagcgccggcacaacagattacgccgattctgtgaagggcagattcaccatcagccgggacaacagcaagaaaaccctgtacctccagatgaacagcctgcgcgtggaagataccgccgtgtactactgtgccgatggcagaggccccttcttcgattatcgcggccagggcacactggtcaccgtttcttctggtaccggcggaggcggatctggcggcggaggtagcggtggcggaggatctgaattcgacatccagatgacacagagccctagcagcctgtctgccagcgtgggagacagagtgaccatcacatgcaaggccagcgaccacatcaacaactggctggcctggtatcagcagaagcctggacaggcccctaagctgctgatctacggcgctaccacactggaaacaggcgtgcccagcagattttctggcagcggctctggcaccgactacaccctgacaatatccagcctccagcctgaggacttcgccacctactactgtcagcagagctggaacaccccttggacattcggccagggcaccaagctggaaatcaagagactcgaggacctgaagaacgtgttcccacctgaggtggccgtgttcgagcctagcgaggccgagatcagccacacccagaaagccaccctcgtgtgcctggctaccggcttctaccccgaccatgtggaactgtcttggtgggtcaacggcaaagaggtgcacagcggcgtgtctaccgacccccagccactgaaagaacagcccgccctgaacgacagccggtactgcctgagcagcagactgagagtgtccgccaccttctggcagaacccccggaaccacttcagatgccaggtgcagttctacggcctgagcgagaacgacgagtggacccaggacagagccaagcccgtgacccagatcgtgtctgccgaagcctggggcagagccgattgcggctttaccagcgagagctaccagcagggcgtgctgagcgccaccatcctgtacgagatcctgctgggcaaggccaccctgtacgccgtgctggtgtctgccctggtgctgatggctatggtcaagcggaaggacagccggggaagggccaagcgatctggatctggagcaacaaacttctcactactcaaacaagcaggtgacgtggaggagaatcccgggcctactagtatggactggatttggcgcatccttttccttgtcggcgctgctaccggcgcgcattccttcgaacaagttcagcttcaacagcctggcgctgagctggtcaaacctggcgcttctgtgaagatgagctgcaaagccagcggctacgccttcagcagctactggatcaactggatgaagcagaaacccggccagggactcgaatggatcggccaaatctatcccggcgacggcgacaccaactacaacggcaagttcaagggcagagccacactgaccgccgatacctctagcagcacagcctacatgcagctgagcagcctgaccagcgaagatagcgccgtgtacttctgtgcccggtccatcacaacagtcgtgggctgcgctatggactattggggccagggaacaagcgtgaccgtgtctagtacgcgtgagcagaaactgatctcggaagaggatgggagcggcaccccattcccttctctggcccctcccatcatgctgctggtggacggcaagcagcagatggtggtcgtgtgcctggtgctggatgtggccccacctggactggacagccccatctggtttagcgccggcaatggctctgccctggacgcctttacctacggcccaagccctgccaccgatggcacctggacaaatctggcccacctgagcctgcccagcgaggaactggcttcttgggagcctctcgtgtgccacacaggacctggcgctgagggacacagcagatccacccagcctatgcacctgtctggcgaggccagcaccgccagaacctgtcctcaggaacctctgagaggcacccctggcggagcactgtggctgggagtgctgagactgctgctgttcaagctgctgctgtttgacctgctgctgacctgctcctgtctgtgcgatcctgccggccctctgccttctcctgccaccaccacaagactgagagccctgggcagccacagactgcaccctgccacagagacaggcggcagagaggccacaagcagccctagaccccagcccagagacagaagatggggcgataccccccctggcagaaagcctggatctccagtccgcgccaagagaagcggatctggcgtgaagcagaccctgaatttcgacctgctgaagctggctggcgacgtggaatccaacccaggcccttctagaggccatatgaccgagtacaagcccacggtgcgcctcgccacccgcgacgacgtccccagggccgtacgcaccctcgccgccgcgttcgccgactaccccgccacgcgccacaccgtcgatccggaccgccacatcgagcgggtcaccgagctgcaagaactcttcctcacgcgcgtcgggctcgacatcggcaaggtgtgggtcgcggacgacggcgccgcggtggcggtctggaccacgccggagagcgtcgaagcgggggcggtgttcgccgagatcggcccgcgcatggccgagttgagcggttcccggctggccgcgcagcaacagatggaaggcctcctggcgccgcaccggcccaaggagcccgcgtggttcctggccaccgtcggcgtctcgcccgaccaccagggcaagggtctgggcagcgccgtcgtgctccccggagtggaggcggccgagcgcgccggggtgcccgccttcctggagacctccgcgccccgcaacctccccttctacgagcggctcggcttcaccgtcaccgccgacgtcgaggtgcccgaaggaccgcgcacctggtgcatgacccgcaagcccggtgcctga

SEQ ID NO: 6323 - DNA, 3663 bp, Artificial Sequence
  Synthetic Polynucloetide
atggccttaccagtgaccgccttgctcctgccgctggccttgctgctccacgccgccaggccgctcgaggacctgaagaacgtgttcccacctgaggtggccgtgttcgagcctagcgaggccgagatcagccacacccagaaagccaccctcgtgtgcctggctaccggcttctaccccgaccatgtggaactgtcttggtgggtcaacggcaaagaggtgcacagcggcgtgtctaccgacccccagccactgaaagaacagcccgccctgaacgacagccggtactgcctgagcagcagactgagagtgtccgccaccttctggcagaacccccggaaccacttcagatgccaggtgcagttctacggcctgagcgagaacgacgagtggacccaggacagagccaagcccgtgacccagatcgtgtctgccgaagcctggggcagagccgattgcggctttaccagcgagagctaccagcagggcgtgctgagcgccaccatcctgtacgagatcctgctgggcaaggccaccctgtacgccgtgctggtgtctgccctggtgctgatggctatggtcaagcggaaggacagccggggaagggccaagcgatctggatctggagcaacaaacttctcactactcaaacaagcaggtgacgtggaggagaatcccgggcctactagcatggccttaccagtgaccgccttgctcctgccgctggccttgctgctccacgccgccaggccggaggttcagctgcttgagtctggcggaggactggttcaacctggcggaagcctgagactgtcttgtgccgccagcggcttcacctttagcagctacgccatgagctgggtccgacaggctcctggcaaaggactggaatgggtgtccagcatcagcggcagcggcgactacatctactacgccgatagcgtgaagggcagattcaccatcagccgggacatcagcaagaacaccctgtacctccagatgaacagcctgagagccgaggacaccgccgtgtactactgtgccaaagaaggcaccggcgctaacagcagcctggccgattatagaggccagggcacactggtcaccgtgtctagtggcggaggaagcggcggaggatctgaagtgcaggttttggagtctggcggaggactggttcagcctggcggatctctgagactgtcttgtgccgccagcggcttcaccttcagcaactttgccatgagctgggtccgacaggcccctggcaaaggacttgaatgggtgtccacaatcagcggcagcgccggcacaacagattacgccgattctgtgaagggcagattcaccatcagccgggacaacagcaagaaaaccctgtacctccagatgaacagcctgcgcgtggaagataccgccgtgtactactgtgccgatggcagaggccccttcttcgattatcgcggccagggcacactggtcaccgtttcttctggtaccggcggaggcggatctggcggcggaggtagcggtggcggaggatctgaattcgacatccagatgacacagagccctagcagcctgtctgccagcgtgggagacagagtgaccatcacatgcaaggccagcgaccacatcaacaactggctggcctggtatcagcagaagcctggacaggcccctaagctgctgatctacggcgctaccacactggaaacaggcgtgcccagcagattttctggcagcggctctggcaccgactacaccctgacaatatccagcctccagcctgaggacttcgccacctactactgtcagcagagctggaacaccccttggacattcggccagggcaccaagctggaaatcaagagaggcggaggcggaagtggaggcggaggatctggcggcggaggctctcaagttcagcttcaacagcctggcgctgagctggtcaaacctggcgcttctgtgaagatgagctgcaaagccagcggctacgccttcagcagctactggatcaactggatgaagcagaaacccggccagggactcgaatggatcggccaaatctatcccggcgacggcgacaccaactacaacggcaagttcaagggcagagccacactgaccgccgatacctctagcagcacagcctacatgcagctgagcagcctgaccagcgaagatagcgccgtgtacttctgtgcccggtccatcacaacagtcgtgggctgcgctatggactattggggccagggaacaagcgtgaccgtgtctagtacgcgtgagcagaaactgatctcggaagaggatctggggagcggcaccccattcccttctctggcccctcccatcatgctgctggtggacggcaagcagcagatggtggtcgtgtgcctggtgctggatgtggccccacctggactggacagccccatctggtttagcgccggcaatggctctgccctggacgcctttacctacggcccaagccctgccaccgatggcacctggacaaatctggcccacctgagcctgcccagcgaggaactggcttcttgggagcctctcgtgtgccacacaggacctggcgctgagggacacagcagatccacccagcctatgcacctgtctggcgaggccagcaccgccagaacctgtcctcaggaacctctgagaggcacccctggcggagcactgtggctgggagtgctgagactgctgctgttcaagctgctgctgtttgacctgctgctgacctgctcctgtctgtgcgatcctgccggccctctgccttctcctgccaccaccacaagactgagagccctgggcagccacagactgcaccctgccacagagacaggcggcagagaggccacaagcagccctagaccccagcccagagacagaagatggggcgataccccccctggcagaaagcctggatctccagtccgcgccaagagaagcggatctggcgtgaagcagaccctgaatttcgacctgctgaagctggctggcgacgtggaatccaacccaggcccttctagatctagaggccatatgaccgagtacaagcccacggtgcgcctcgccacccgcgacgacgtccccagggccgtacgcaccctcgccgccgcgttcgccgactaccccgccacgcgccacaccgtcgatccggaccgccacatcgagcgggtcaccgagctgcaagaactcttcctcacgcgcgtcgggctcgacatcggcaaggtgtgggtcgcggacgacggcgccgcggtggcggtctggaccacgccggagagcgtcgaagcgggggcggtgttcgccgagatcggcccgcgcatggccgagttgagcggttcccggctggccgcgcagcaacagatggaaggcctcctggcgccgcaccggcccaaggagcccgcgtggttcctggccaccgtcggcgtctcgcccgaccaccagggcaagggtctgggcagcgccgtcgtgctccccggagtggaggcggccgagcgcgccggggtgcccgccttcctggagacctccgcgccccgcaacctccccttctacgagcggctcggcttcaccgtcaccgccgacgtcgaggtgcccgaaggaccgcgcacctggtgcatgacccgcaagcccggtgcctga

SEQ ID NO: 6324 - DNA, 3474 bp, Artificial Sequence
  Synthetic Polynucloetide
atggccttaccagtgaccgccttgctcctgccgctggccttgctgctccacgccgccaggccggaggttcagctgcttgagtctggcggaggactggttcaacctggcggaagcctgagactgtcttgtgccgccagcggcttcacctttagcagctacgccatgagctgggtccgacaggctcctggcaaaggactggaatgggtgtccagcatcagcggcagcggcgactacatctactacgccgatagcgtgaagggcagattcaccatcagccgggacatcagcaagaacaccctgtacctccagatgaacagcctgagagccgaggacaccgccgtgtactactgtgccaaagaaggcaccggcgctaacagcagcctggccgattatagaggccagggcacactggtcaccgtgtctagtggcggaggaagcggcggaggatctgaagtgcaggttttggagtctggcggaggactggttcagcctggcggatctctgagactgtcttgtgccgccagcggcttcaccttcagcaactttgccatgagctgggtccgacaggcccctggcaaaggacttgaatgggtgtccacaatcagcggcagcgccggcacaacagattacgccgattctgtgaagggcagattcaccatcagccgggacaacagcaagaaaaccctgtacctccagatgaacagcctgcgcgtggaagataccgccgtgtactactgtgccgatggcagaggccccttcttcgattatcgcggccagggcacactggtcaccgtttcttctggtaccggcggaggcggatctggcggcggaggtagcggtggcggaggatctgaattcgacatccagatgacacagagccctagcagcctgtctgccagcgtgggagacagagtgaccatcacatgcaaggccagcgaccacatcaacaactggctggcctggtatcagcagaagcctggacaggcccctaagctgctgatctacggcgctaccacactggaaacaggcgtgcccagcagattttctggcagcggctctggcaccgactacaccctgacaatatccagcctccagcctgaggacttcgccacctactactgtcagcagagctggaacaccccttggacattcggccagggcaccaagctggaaatcaagagactcgaggggaaaccaattcccaaccctcttctgggactggattcaaccggcagcggcgacaagcagctggacgccgacgtgtcccccaagcctaccatcttcctgccctctatcgccgagacaaagctccagaaggccggcacctacctgtgcctgctggaaaagttcttcccagatgtgattaagatccactggcaggaaaagaagtccaacaccatcctgggcagccaggaaggcaacaccatgaagaccaacgacacctacatgaagttcagctggctgaccgtgcccgagaagtccctggacaaagaacacagatgcatcgtgcggcacgaaaacaacaagaacggcgtggaccaggaaatcatcttcccacccatcaagaccgatgtgattacaatggaccccaaggacaactgctccaaggacgccaacgataccctgctgctccagctgaccaacaccagcgcctactacatgtacttgttgctgctgctgaagtccgtggtgtacttcgccatcatcacatgctgcctgctgcggagaaccgccttctgctgcaacggcgagaagtctagggccaagcgatctggatctggagcaacaaacttctcactactcaaacaagcaggtgacgtggaggagaatcccgggcctactagtatggactggatttggcgcatccttttccttgtcggcgctgctaccggcgcgcattccttcgaacaagttcagcttcaacagcctggcgctgagctggtcaaacctggcgcttctgtgaagatgagctgcaaagccagcggctacgccttcagcagctactggatcaactggatgaagcagaaacccggccagggactcgaatggatcggccaaatctatcccggcgacggcgacaccaactacaacggcaagttcaagggcagagccacactgaccgccgatacctctagcagcacagcctacatgcagctgagcagcctgaccagcgaagatagcgccgtgtacttctgtgcccggtccatcacaacagtcgtgggctgcgctatggactattggggccagggaacaagcgtgaccgtgtctagtacgcgtgagcagaaactgatctcggaagaggatgggagcggcagccagcctcacaccaagcccagcgtgttcgtgatgaagaacggcaccaacgtggcctgcctcgtgaaagagttctaccccaaggacatcaggatcaacctggtgtccagcaagaagatcaccgagttcgaccccgccatcgtgatctcccccagcggcaagtacaacgccgtgaagctggggaagtacgaggacagcaacagcgtgacctgctccgtgcagcacgacaacaagaccgtgcacagcaccgactttgaagtgaaaaccgactccaccgaccacgtgaagcccaaagagacagagaacaccaagcagcccagcaagagctgccacaagcccaaggccatcgtgcacaccgagaaagtgaacatgatgagcctgaccgtgctgggcctgcggatgctgttcgccaaaaccgtggccgtgaacttcctgctgaccgccaagctgttcttcctccgcgccaagagaagcggatctggcgtgaagcagaccctgaatttcgacctgctgaagctggctggcgacgtggaatccaacccaggcccttctagaggccatatgaccgagtacaagcccacggtgcgcctcgccacccgcgacgacgtccccagggccgtacgcaccctcgccgccgcgttcgccgactaccccgccacgcgccacaccgtcgatccggaccgccacatcgagcgggtcaccgagctgcaagaactcttcctcacgcgcgtcgggctcgacatcggcaaggtgtgggtcgcggacgacggcgccgcggtggcggtctggaccacgccggagagcgtcgaagcgggggcggtgttcgccgagatcggcccgcgcatggccgagttgagcggttcccggctggccgcgcagcaacagatggaaggcctcctggcgccgcaccggcccaaggagcccgcgtggttcctggccaccgtcggcgtctcgcccgaccaccagggcaagggtctgggcagcgccgtcgtgctccccggagtggaggcggccgagcgcgccggggtgcccgccttcctggagacctccgcgccccgcaacctccccttctacgagcggctcggcttcaccgtcaccgccgacgtcgaggtgcccgaaggaccgcgcacctggtgcatgacccgcaagcccggtgcctga

SEQ ID NO: 6325 - DNA, 2685 bp, Artificial Sequence
  Synthetic Polynucloetide
atggccttaccagtgaccgccttgctcctgccgctggccttgctgctccacgccgccaggccggaggttcagctgcttgagtctggcggaggactggttcaacctggcggaagcctgagactgtcttgtgccgccagcggcttcacctttagcagctacgccatgagctgggtccgacaggctcctggcaaaggactggaatgggtgtccagcatcagcggcagcggcgactacatctactacgccgatagcgtgaagggcagattcaccatcagccgggacatcagcaagaacaccctgtacctccagatgaacagcctgagagccgaggacaccgccgtgtactactgtgccaaagaaggcaccggcgctaacagcagcctggccgattatagaggccagggcacactggtcaccgtgtctagtggcggaggaagcggcggaggatctgaagtgcaggttttggagtctggcggaggactggttcagcctggcggatctctgagactgtcttgtgccgccagcggcttcaccttcagcaactttgccatgagctgggtccgacaggcccctggcaaaggacttgaatgggtgtccacaatcagcggcagcgccggcacaacagattacgccgattctgtgaagggcagattcaccatcagccgggacaacagcaagaaaaccctgtacctccagatgaacagcctgcgcgtggaagataccgccgtgtactactgtgccgatggcagaggccccttcttcgattatcgcggccagggcacactggtcaccgtttcttctggtaccggcggaggcggatctggcggcggaggtagcggtggcggaggatctgaattcgacatccagatgacacagagccctagcagcctgtctgccagcgtgggagacagagtgaccatcacatgcaaggccagcgaccacatcaacaactggctggcctggtatcagcagaagcctggacaggcccctaagctgctgatctacggcgctaccacactggaaacaggcgtgcccagcagattttctggcagcggctctggcaccgactacaccctgacaatatccagcctccagcctgaggacttcgccacctactactgtcagcagagctggaacaccccttggacattcggccagggcaccaagctggaaatcaagagactcgagagccagcctcacaccaagcccagcgtgttcgtgatgaagaacggcaccaacgtggcctgcctcgtgaaagagttctaccccaaggacatcaggatcaacctggtgtccagcaagaagatcaccgagttcgaccccgccatcgtgatctcccccagcggcaagtacaacgccgtgaagctggggaagtacgaggacagcaacagcgtgacctgctccgtgcagcacgacaacaagaccgtgcacagcaccgactttgaagtgaaaaccgactccaccgaccacgtgaagcccaaagagacagagaacaccaagcagcccagcaagagctgccacaagcccaaggccatcgtgcacaccgagaaagtgaacatgatgagcctgaccgtgctgggcctgcggatgctgttcgccaaaaccgtggccgtgaacttcctgctgaccgccaagctgttcttcctcagggccaagcgatctggatctggagcaacaaacttctcactactcaaacaagcaggtgacgtggaggagaatcccgggcctactagtatggactggatttggcgcatccttttccttgtcggcgctgctaccggcgcgcattccttcgaacaagttcagcttcaacagcctggcgctgagctggtcaaacctggcgcttctgtgaagatgagctgcaaagccagcggctacgccttcagcagctactggatcaactggatgaagcagaaacccggccagggactcgaatggatcggccaaatctatcccggcgacggcgacaccaactacaacggcaagttcaagggcagagccacactgaccgccgatacctctagcagcacagcctacatgcagctgagcagcctgaccagcgaagatagcgccgtgtacttctgtgcccggtccatcacaacagtcgtgggctgcgctatggactattggggccagggaacaagcgtgaccgtgtctagtacgcgtgacaagcagctggacgccgacgtgtcccccaagcctaccatcttcctgccctctatcgccgagacaaagctccagaaggccggcacctacctgtgcctgctggaaaagttcttcccagatgtgattaagatccactggcaggaaaagaagtccaacaccatcctgggcagccaggaaggcaacaccatgaagaccaacgacacctacatgaagttcagctggctgaccgtgcccgagaagtccctggacaaagaacacagatgcatcgtgcggcacgaaaacaacaagaacggcgtggaccaggaaatcatcttcccacccatcaagaccgatgtgattacaatggaccccaaggacaactgctccaaggacgccaacgataccctgctgctccagctgaccaacaccagcgcctactacatgtacttgttgctgctgctgaagtccgtggtgtacttcgccatcatcacatgctgcctgctgcggagaaccgccttctgctgcaacggcgagaagtct

SEQ ID NO: 6326 - DNA, 3519 bp, Artificial Sequence
  Synthetic Polynucloetide
atggccttaccagtgaccgccttgctcctgccgctggccttgctgctccacgccgccaggccgctcgaggggaaaccaattcccaaccctcttctgggactggattcaaccggcagcggcgacaagcagctggacgccgacgtgtcccccaagcctaccatcttcctgccctctatcgccgagacaaagctccagaaggccggcacctacctgtgcctgctggaaaagttcttcccagatgtgattaagatccactggcaggaaaagaagtccaacaccatcctgggcagccaggaaggcaacaccatgaagaccaacgacacctacatgaagttcagctggctgaccgtgcccgagaagtccctggacaaagaacacagatgcatcgtgcggcacgaaaacaacaagaacggcgtggaccaggaaatcatcttcccacccatcaagaccgatgtgattacaatggaccccaaggacaactgctccaaggacgccaacgataccctgctgctccagctgaccaacaccagcgcctactacatgtacttgttgctgctgctgaagtccgtggtgtacttcgccatcatcacatgctgcctgctgcggagaaccgccttctgctgcaacggcgagaagtctagggccaagcgatctggatctggagcaacaaacttctcactactcaaacaagcaggtgacgtggaggagaatcccgggcctactagcatggccttaccagtgaccgccttgctcctgccgctggccttgctgctccacgccgccaggccggaggttcagctgcttgagtctggcggaggactggttcaacctggcggaagcctgagactgtcttgtgccgccagcggcttcacctttagcagctacgccatgagctgggtccgacaggctcctggcaaaggactggaatgggtgtccagcatcagcggcagcggcgactacatctactacgccgatagcgtgaagggcagattcaccatcagccgggacatcagcaagaacaccctgtacctccagatgaacagcctgagagccgaggacaccgccgtgtactactgtgccaaagaaggcaccggcgctaacagcagcctggccgattatagaggccagggcacactggtcaccgtgtctagtggcggaggaagcggcggaggatctgaagtgcaggttttggagtctggcggaggactggttcagcctggcggatctctgagactgtcttgtgccgccagcggcttcaccttcagcaactttgccatgagctgggtccgacaggcccctggcaaaggacttgaatgggtgtccacaatcagcggcagcgccggcacaacagattacgccgattctgtgaagggcagattcaccatcagccgggacaacagcaagaaaaccctgtacctccagatgaacagcctgcgcgtggaagataccgccgtgtactactgtgccgatggcagaggccccttcttcgattatcgcggccagggcacactggtcaccgtttcttctggtaccggcggaggcggatctggcggcggaggtagcggtggcggaggatctgaattcgacatccagatgacacagagccctagcagcctgtctgccagcgtgggagacagagtgaccatcacatgcaaggccagcgaccacatcaacaactggctggcctggtatcagcagaagcctggacaggcccctaagctgctgatctacggcgctaccacactggaaacaggcgtgcccagcagattttctggcagcggctctggcaccgactacaccctgacaatatccagcctccagcctgaggacttcgccacctactactgtcagcagagctggaacaccccttggacattcggccagggcaccaagctggaaatcaagagaggcggaggcggaagtggaggcggaggatctggcggcggaggctctcaagttcagcttcaacagcctggcgctgagctggtcaaacctggcgcttctgtgaagatgagctgcaaagccagcggctacgccttcagcagctactggatcaactggatgaagcagaaacccggccagggactcgaatggatcggccaaatctatcccggcgacggcgacaccaactacaacggcaagttcaagggcagagccacactgaccgccgatacctctagcagcacagcctacatgcagctgagcagcctgaccagcgaagatagcgccgtgtacttctgtgcccggtccatcacaacagtcgtgggctgcgctatggactattggggccagggaacaagcgtgaccgtgtctagtacgcgtgagcagaaactgatctcggaagaggatgggagcggcagccagcctcacaccaagcccagcgtgttcgtgatgaagaacggcaccaacgtggcctgcctcgtgaaagagttctaccccaaggacatcaggatcaacctggtgtccagcaagaagatcaccgagttcgaccccgccatcgtgatctcccccagcggcaagtacaacgccgtgaagctggggaagtacgaggacagcaacagcgtgacctgctccgtgcagcacgacaacaagaccgtgcacagcaccgactttgaagtgaaaaccgactccaccgaccacgtgaagcccaaagagacagagaacaccaagcagcccagcaagagctgccacaagcccaaggccatcgtgcacaccgagaaagtgaacatgatgagcctgaccgtgctgggcctgcggatgctgttcgccaaaaccgtggccgtgaacttcctgctgaccgccaagctgttcttcctccgcgccaagagaagcggatctggcgtgaagcagaccctgaatttcgacctgctgaagctggctggcgacgtggaatccaacccaggcccttctagaggccatatgaccgagtacaagcccacggtgcgcctcgccacccgcgacgacgtccccagggccgtacgcaccctcgccgccgcgttcgccgactaccccgccacgcgccacaccgtcgatccggaccgccacatcgagcgggtcaccgagctgcaagaactcttcctcacgcgcgtcgggctcgacatcggcaaggtgtgggtcgcggacgacggcgccgcggtggcggtctggaccacgccggagagcgtcgaagcgggggcggtgttcgccgagatcggcccgcgcatggccgagttgagcggttcccggctggccgcgcagcaacagatggaaggcctcctggcgccgcaccggcccaaggagcccgcgtggttcctggccaccgtcggcgtctcgcccgaccaccagggcaagggtctgggcagcgccgtcgtgctccccggagtggaggcggccgagcgcgccggggtgcccgccttcctggagacctccgcgccccgcaacctccccttctacgagcggctcggcttcaccgtcaccgccgacgtcgaggtgcccgaaggaccgcgcacctggtgcatgacccgcaagcccggtgcctga

SEQ ID NO: 6327 - DNA, 3894 bp, Artificial Sequence
  Synthetic Polynucloetide
atggccttaccagtgaccgccttgctcctgccgctggccttgctgctccacgccgccaggccggaggttcagctgcttgagtctggcggaggactggttcaacctggcggaagcctgagactgtcttgtgccgccagcggcttcacctttagcagctacgccatgagctgggtccgacaggctcctggcaaaggactggaatgggtgtccagcatcagcggcagcggcgactacatctactacgccgatagcgtgaagggcagattcaccatcagccgggacatcagcaagaacaccctgtacctccagatgaacagcctgagagccgaggacaccgccgtgtactactgtgccaaagaaggcaccggcgctaacagcagcctggccgattatagaggccagggcacactggtcaccgtgtctagtggcggaggaagcggcggaggatctgaagtgcaggttttggagtctggcggaggactggttcagcctggcggatctctgagactgtcttgtgccgccagcggcttcaccttcagcaactttgccatgagctgggtccgacaggcccctggcaaaggacttgaatgggtgtccacaatcagcggcagcgccggcacaacagattacgccgattctgtgaagggcagattcaccatcagccgggacaacagcaagaaaaccctgtacctccagatgaacagcctgcgcgtggaagataccgccgtgtactactgtgccgatggcagaggccccttcttcgattatcgcggccagggcacactggtcaccgtttcttctggtaccggcggaggcggatctggcggcggaggtagcggtggcggaggatctgaattcgacatccagatgacacagagccctagcagcctgtctgccagcgtgggagacagagtgaccatcacatgcaaggccagcgaccacatcaacaactggctggcctggtatcagcagaagcctggacaggcccctaagctgctgatctacggcgctaccacactggaaacaggcgtgcccagcagattttctggcagcggctctggcaccgactacaccctgacaatatccagcctccagcctgaggacttcgccacctactactgtcagcagagctggaacaccccttggacattcggccagggcaccaagctggaaatcaagagaggacagcctaaggccaatcctaccgtgacactgttccctccaagcagcgaagaactccaggccaacaaggccacacttgtgtgcctgatctccgacttctaccctggggctgtgacagtggcttggaaggccgatggatctcctgtgaaagccggcgtggaaaccaccaagccatccaagcagagcaacaacaaatacgccgccagctcctacctgagcctgacacctgagcagtggaagtcccacagatcctacagctgccaagtgacccacgaaggcagcaccgtggaaaagacagtggcccctacagagtgcagcggatcccagagcttcggcctgctggaccccaagctgtgctacctgctggatggcatcctgttcatctacggcgtgatcctgaccgccctgttcctgagagtgaagttcagcagaagcgccgacgcccctgcctaccagcagggacagaaccaactgtacaacgagctgaacctgggcagacgggaagagtacgacgtgctggacaagcggagaggcagggaccctgagatgggcggaaagccccagcggagaaagaacccccaggaaggactgtataacgaactccagaaagacaagatggccgaagcctacagcgagatcggcatgaagggcgagcggagaagaggcaagggccacgatggcctgtaccagggcctgagcaccgccaccaaggacacctatgacgccctgcacatgcaggccctgcctccaagaagggccaagcgatctggatctggagcaacaaacttctcactactcaaacaagcaggtgacgtggaggagaatcccgggcctactagtatggactggatttggcgcatccttttccttgtcggcgctgctaccggcgcgcattccttcgaacaagttcagcttcaacagcctggcgctgagctggtcaaacctggcgcttctgtgaagatgagctgcaaagccagcggctacgccttcagcagctactggatcaactggatgaagcagaaacccggccagggactcgaatggatcggccaaatctatcccggcgacggcgacaccaactacaacggcaagttcaagggcagagccacactgaccgccgatacctctagcagcacagcctacatgcagctgagcagcctgaccagcgaagatagcgccgtgtacttctgtgcccggtccatcacaacagtcgtgggctgcgctatggactattggggccagggaacaagcgtgaccgtgtctagtgcctctacaaagggaccctccgtgtttcctctggctcccagcagcaagtctacaagcggaggaacagccgctctgggctgcctggtcaaggattactttcccgagcctgtgaccgtgtcctggaatagcggagcactgacaagcggcgtgcacacctttccagccgtgctgcaaagcagcggcctgtactctctgagcagcgtggtcacagtgcctagctctagcctgggcacccagacctacatctgcaatgtgaaccacaagcctagcaacaccaaggtggacaagagagtggaacccaagagctgtggtacccagagttttgggttgttggaccctaaattgtgctatctgttggacggaatcctgttcatttacggagtgatcctgaccgcattgttcctgcgggttaagttttccagatccgcagacgcacccgcttaccaacaagggcagaaccaactctacaatgaacttaatttggggcggagggaagagtacgacgttctggacaaaaggaggggacgagatcccgagatgggcggaaagcctcagcgaaggaagaatccgcaagaggggctttataacgaactccagaaagataaaatggcagaagcctatagtgagattgggatgaagggagaaaggaggaggggtaaaggtcacgatgggttgtaccaaggattgagcacagccactaaagatacctatgatgcgctccacatgcaggccctgccgccaagacgcgccaagagaagcggatctggcgtgaagcagaccctgaatttcgacctgctgaagctggctggcgacgtggaatccaacccaggcccttctagaggccatatgaccgagtacaagcccacggtgcgcctcgccacccgcgacgacgtccccagggccgtacgcaccctcgccgccgcgttcgccgactaccccgccacgcgccacaccgtcgatccggaccgccacatcgagcgggtcaccgagctgcaagaactcttcctcacgcgcgtcgggctcgacatcggcaaggtgtgggtcgcggacgacggcgccgcggtggcggtctggaccacgccggagagcgtcgaagcgggggcggtgttcgccgagatcggcccgcgcatggccgagttgagcggttcccggctggccgcgcagcaacagatggaaggcctcctggcgccgcaccggcccaaggagcccgcgtggttcctggccaccgtcggcgtctcgcccgaccaccagggcaagggtctgggcagcgccgtcgtgctccccggagtggaggcggccgagcgcgccggggtgcccgccttcctggagacctccgcgccccgcaacctccccttctacgagcggctcggcttcaccgtcaccgccgacgtcgaggtgcccgaaggaccgcgcacctggtgcatgacccgcaagcccggtgcctga

SEQ ID NO: 6328 - DNA, 3249 bp, Artificial Sequence
  Synthetic Polynucloetide
atggccttaccagtgaccgccttgctcctgccgctggccttgctgctccacgccgccaggccggaggttcagctgcttgagtctggcggaggactggttcaacctggcggaagcctgagactgtcttgtgccgccagcggcttcacctttagcagctacgccatgagctgggtccgacaggctcctggcaaaggactggaatgggtgtccagcatcagcggcagcggcgactacatctactacgccgatagcgtgaagggcagattcaccatcagccgggacatcagcaagaacaccctgtacctccagatgaacagcctgagagccgaggacaccgccgtgtactactgtgccaaagaaggcaccggcgctaacagcagcctggccgattatagaggccagggcacactggtcaccgtgtctagtggcggaggaagcggcggaggatctgaagtgcaggttttggagtctggcggaggactggttcagcctggcggatctctgagactgtcttgtgccgccagcggcttcaccttcagcaactttgccatgagctgggtccgacaggcccctggcaaaggacttgaatgggtgtccacaatcagcggcagcgccggcacaacagattacgccgattctgtgaagggcagattcaccatcagccgggacaacagcaagaaaaccctgtacctccagatgaacagcctgcgcgtggaagataccgccgtgtactactgtgccgatggcagaggccccttcttcgattatcgcggccagggcacactggtcaccgtttcttctggtaccggcggaggcggatctggcggcggaggtagcggtggcggaggatctgaattcgacatccagatgacacagagccctagcagcctgtctgccagcgtgggagacagagtgaccatcacatgcaaggccagcgaccacatcaacaactggctggcctggtatcagcagaagcctggacaggcccctaagctgctgatctacggcgctaccacactggaaacaggcgtgcccagcagattttctggcagcggctctggcaccgactacaccctgacaatatccagcctccagcctgaggacttcgccacctactactgtcagcagagctggaacaccccttggacattcggccagggcaccaagctggaaatcaagagactcgaggacctgaagaacgtgttcccacctgaggtggccgtgttcgagcctagcgaggccgagatcagccacacccagaaagccaccctcgtgtgcctggctaccggcttctaccccgaccatgtggaactgtcttggtgggtcaacggcaaagaggtgcacagcggcgtgtctaccgacccccagccactgaaagaacagcccgccctgaacgacagccggtactgcctgagcagcagactgagagtgtccgccaccttctggcagaacccccggaaccacttcagatgccaggtgcagttctacggcctgagcgagaacgacgagtggacccaggacagagccaagcccgtgacccagatcgtgtctgccgaagcctggggcagagccgattgcggatcccagagcttcggcctgctggaccccaagctgtgctacctgctggatggcatcctgttcatctacggcgtgatcctgaccgccctgttcctgagagtgaagttcagcagaagcgccgacgcccctgcctaccagcagggacagaaccaactgtacaacgagctgaacctgggcagacgggaagagtacgacgtgctggacaagcggagaggcagggaccctgagatgggcggaaagccccagcggagaaagaacccccaggaaggactgtataacgaactccagaaagacaagatggccgaagcctacagcgagatcggcatgaagggcgagcggagaagaggcaagggccacgatggcctgtaccagggcctgagcaccgccaccaaggacacctatgacgccctgcacatgcaggccctgcctccaagaagggccaagcgatctggatctggagcaacaaacttctcactactcaaacaagcaggtgacgtggaggagaatcccgggcctactagtatggactggatttggcgcatccttttccttgtcggcgctgctaccggcgcgcattccttcgaacaagttcagcttcaacagcctggcgctgagctggtcaaacctggcgcttctgtgaagatgagctgcaaagccagcggctacgccttcagcagctactggatcaactggatgaagcagaaacccggccagggactcgaatggatcggccaaatctatcccggcgacggcgacaccaactacaacggcaagttcaagggcagagccacactgaccgccgatacctctagcagcacagcctacatgcagctgagcagcctgaccagcgaagatagcgccgtgtacttctgtgcccggtccatcacaacagtcgtgggctgcgctatggactattggggccagggaacaagcgtgaccgtgtctagtacgcgtatccagaaccctgatcctgccgtgtaccagctgcgggatagcaagagcagcgacaagagcgtgtgtctgttcaccgacttcgacagccagaccaacgtgtcccagagcaaggactccgacgtgtacatcaccgataagaccgtgctggacatgcggagcatggacttcaagagcaactccgccgtggcctggtccaacaagtccgatttcgcctgcgccaacgccttcaacaacagcattatccccgaggacacattcttcccaagccccgagagcagctgcggtacccagagttttgggttgttggaccctaaattgtgctatctgttggacggaatcctgttcatttacggagtgatcctgaccgcattgttcctgcgggttaagttttccagatccgcagacgcacccgcttaccaacaagggcagaaccaactctacaatgaacttaatttggggcggagggaagagtacgacgttctggacaaaaggaggggacgagatcccgagatgggcggaaagcctcagcgaaggaagaatccgcaagaggggctttataacgaactccagaaagataaaatggcagaagcctatagtgagattgggatgaagggagaaaggaggaggggtaaaggtcacgatgggttgtaccaaggattgagcacagccactaaagatacctatgatgcgctccacatgcaggccctgccgccaaga

SEQ ID NO: 6329 - DNA, 3249 bp, Artificial Sequence
  Synthetic Polynucloetide
atggccttaccagtgaccgccttgctcctgccgctggccttgctgctccacgccgccaggccggaggttcagctgcttgagtctggcggaggactggttcaacctggcggaagcctgagactgtcttgtgccgccagcggcttcacctttagcagctacgccatgagctgggtccgacaggctcctggcaaaggactggaatgggtgtccagcatcagcggcagcggcgactacatctactacgccgatagcgtgaagggcagattcaccatcagccgggacatcagcaagaacaccctgtacctccagatgaacagcctgagagccgaggacaccgccgtgtactactgtgccaaagaaggcaccggcgctaacagcagcctggccgattatagaggccagggcacactggtcaccgtgtctagtggcggaggaagcggcggaggatctgaagtgcaggttttggagtctggcggaggactggttcagcctggcggatctctgagactgtcttgtgccgccagcggcttcaccttcagcaactttgccatgagctgggtccgacaggcccctggcaaaggacttgaatgggtgtccacaatcagcggcagcgccggcacaacagattacgccgattctgtgaagggcagattcaccatcagccgggacaacagcaagaaaaccctgtacctccagatgaacagcctgcgcgtggaagataccgccgtgtactactgtgccgatggcagaggccccttcttcgattatcgcggccagggcacactggtcaccgtttcttctggtaccggcggaggcggatctggcggcggaggtagcggtggcggaggatctgaattcgacatccagatgacacagagccctagcagcctgtctgccagcgtgggagacagagtgaccatcacatgcaaggccagcgaccacatcaacaactggctggcctggtatcagcagaagcctggacaggcccctaagctgctgatctacggcgctaccacactggaaacaggcgtgcccagcagattttctggcagcggctctggcaccgactacaccctgacaatatccagcctccagcctgaggacttcgccacctactactgtcagcagagctggaacaccccttggacattcggccagggcaccaagctggaaatcaagagactcgaggacctgaagaacgtgttcccacctgaggtggccgtgttcgagcctagcaaggccgagatcgcccacacccagaaagccaccctcgtgtgcctggctaccggcttctaccccgaccatgtggaactgtcttggtgggtcaacggcaaagaggtgcacagcggcgtgtgtaccgacccccagccactgaaagaacagcccgccctgaacgacagccggtactgcctgagcagcagactgagagtgtccgccaccttctggcagaacccccggaaccacttcagatgccaggtgcagttctacggcctgagcgagaacgacgagtggacccaggacagagccaagcccgtgacccagatcgtgtctgccgaagcctggggcagagccgattgcggatcccagagcttcggcctgctggaccccaagctgtgctacctgctggatggcatcctgttcatctacggcgtgatcctgaccgccctgttcctgagagtgaagttcagcagaagcgccgacgcccctgcctaccagcagggacagaaccaactgtacaacgagctgaacctgggcagacgggaagagtacgacgtgctggacaagcggagaggcagggaccctgagatgggcggaaagccccagcggagaaagaacccccaggaaggactgtataacgaactccagaaagacaagatggccgaagcctacagcgagatcggcatgaagggcgagcggagaagaggcaagggccacgatggcctgtaccagggcctgagcaccgccaccaaggacacctatgacgccctgcacatgcaggccctgcctccaagaagggccaagcgatctggatctggagcaacaaacttctcactactcaaacaagcaggtgacgtggaggagaatcccgggcctactagtatggactggatttggcgcatccttttccttgtcggcgctgctaccggcgcgcattccttcgaacaagttcagcttcaacagcctggcgctgagctggtcaaacctggcgcttctgtgaagatgagctgcaaagccagcggctacgccttcagcagctactggatcaactggatgaagcagaaacccggccagggactcgaatggatcggccaaatctatcccggcgacggcgacaccaactacaacggcaagttcaagggcagagccacactgaccgccgatacctctagcagcacagcctacatgcagctgagcagcctgaccagcgaagatagcgccgtgtacttctgtgcccggtccatcacaacagtcgtgggctgcgctatggactattggggccagggaacaagcgtgaccgtgtctagtacgcgtatccagaaccctgatcctgccgtgtaccagctgcgggatagcaagagcagcgacaagagcgtgtgtctgttcaccgacttcgacagccagaccaacgtgtcccagagcaaggactccgacgtgtacatcaccgataagtgcgtgctggacatgcggagcatggacttcaagagcaactccgccgtggcctggtccaacaagtccgatttcgcctgcgccaacgccttcaacaacagcattatccccgaggacacattcttcccaagcagcgacgtgccctgcggtacccagagttttgggttgttggaccctaaattgtgctatctgttggacggaatcctgttcatttacggagtgatcctgaccgcattgttcctgcgggttaagttttccagatccgcagacgcacccgcttaccaacaagggcagaaccaactctacaatgaacttaatttggggcggagggaagagtacgacgttctggacaaaaggaggggacgagatcccgagatgggcggaaagcctcagcgaaggaagaatccgcaagaggggctttataacgaactccagaaagataaaatggcagaagcctatagtgagattgggatgaagggagaaaggaggaggggtaaaggtcacgatgggttgtaccaaggattgagcacagccactaaagatacctatgatgcgctccacatgcaggccctgccgccaaga

SEQ ID NO: 6330 - DNA, 3462 bp, Artificial Sequence
  Synthetic Polynucloetide
atggccttaccagtgaccgccttgctcctgccgctggccttgctgctccacgccgccaggccggaggttcagctgcttgagtctggcggaggactggttcaacctggcggaagcctgagactgtcttgtgccgccagcggcttcacctttagcagctacgccatgagctgggtccgacaggctcctggcaaaggactggaatgggtgtccagcatcagcggcagcggcgactacatctactacgccgatagcgtgaagggcagattcaccatcagccgggacatcagcaagaacaccctgtacctccagatgaacagcctgagagccgaggacaccgccgtgtactactgtgccaaagaaggcaccggcgctaacagcagcctggccgattatagaggccagggcacactggtcaccgtgtctagtggcggaggaagcggcggaggatctgaagtgcaggttttggagtctggcggaggactggttcagcctggcggatctctgagactgtcttgtgccgccagcggcttcaccttcagcaactttgccatgagctgggtccgacaggcccctggcaaaggacttgaatgggtgtccacaatcagcggcagcgccggcacaacagattacgccgattctgtgaagggcagattcaccatcagccgggacaacagcaagaaaaccctgtacctccagatgaacagcctgcgcgtggaagataccgccgtgtactactgtgccgatggcagaggccccttcttcgattatcgcggccagggcacactggtcaccgtttcttctggtaccggcggaggcggatctggcggcggaggtagcggtggcggaggatctgaattcgacatccagatgacacagagccctagcagcctgtctgccagcgtgggagacagagtgaccatcacatgcaaggccagcgaccacatcaacaactggctggcctggtatcagcagaagcctggacaggcccctaagctgctgatctacggcgctaccacactggaaacaggcgtgcccagcagattttctggcagcggctctggcaccgactacaccctgacaatatccagcctccagcctgaggacttcgccacctactactgtcagcagagctggaacaccccttggacattcggccagggcaccaagctggaaatcaagagactcgaggggaaaccaattcccaaccctcttctgggactggattcaaccggcagcggcgaggacctgaagaacgtgttcccacctgaggtggccgtgttcgagcctagcgaggccgagatcagccacacccagaaagccaccctcgtgtgcctggctaccggcttctaccccgaccatgtggaactgtcttggtgggtcaacggcaaagaggtgcacagcggcgtgtctaccgacccccagccactgaaagaacagcccgccctgaacgacagccggtactgcctgagcagcagactgagagtgtccgccaccttctggcagaacccccggaaccacttcagatgccaggtgcagttctacggcctgagcgagaacgacgagtggacccaggacagagccaagcccgtgacccagatcgtgtctgccgaagcctggggcagagccgattgcggatcccagagcttcggcctgctggaccccaagctgtgctacctgctggatggcatcctgttcatctacggcgtgatcctgaccgccctgttcctgagagtgaagttcagcagaagcgccgacgcccctgcctaccagcagggacagaaccaactgtacaacgagctgaacctgggcagacgggaagagtacgacgtgctggacaagcggagaggcagggaccctgagatgggcggaaagccccagcggagaaagaacccccaggaaggactgtataacgaactccagaaagacaagatggccgaagcctacagcgagatcggcatgaagggcgagcggagaagaggcaagggccacgatggcctgtaccagggcctgagcaccgccaccaaggacacctatgacgccctgcacatgcaggccctgcctccaagaagggccaagcgatctggatctggagcaacaaacttctcactactcaaacaagcaggtgacgtggaggagaatcccgggcctactagtatggactggatttggcgcatccttttccttgtcggcgctgctaccggcgcgcattccttcgaacaagttcagcttcaacagcctggcgctgagctggtcaaacctggcgcttctgtgaagatgagctgcaaagccagcggctacgccttcagcagctactggatcaactggatgaagcagaaacccggccagggactcgaatggatcggccaaatctatcccggcgacggcgacaccaactacaacggcaagttcaagggcagagccacactgaccgccgatacctctagcagcacagcctacatgcagctgagcagcctgaccagcgaagatagcgccgtgtacttctgtgcccggtccatcacaacagtcgtgggctgcgctatggactattggggccagggaacaagcgtgaccgtgtctagtacgcgtgagcagaaactgatctcggaagaggatgggagcggcatccagaaccctgatcctgccgtgtaccagctgcgggatagcaagagcagcgacaagagcgtgtgtctgttcaccgacttcgacagccagaccaacgtgtcccagagcaaggactccgacgtgtacatcaccgataagaccgtgctggacatgcggagcatggacttcaagagcaactccgccgtggcctggtccaacaagtccgatttcgcctgcgccaacgccttcaacaacagcattatccccgaggacacattcttcccaagccccgagagcagctgcggtacccagagttttgggttgttggaccctaaattgtgctatctgttggacggaatcctgttcatttacggagtgatcctgaccgcattgttcctgaggagcaagcggtcacggctgctccacagcgattacatgaatatgacaccacgaagaccgggtcctactcgcaaacactaccaaccctacgcacctccccgcgactttgcagcgtaccgatctcgggttaagttttccagatccgcagacgcacccgcttaccaacaagggcagaaccaactctacaatgaacttaatttggggcggagggaagagtacgacgttctggacaaaaggaggggacgagatcccgagatgggcggaaagcctcagcgaaggaagaatccgcaagaggggctttataacgaactccagaaagataaaatggcagaagcctatagtgagattgggatgaagggagaaaggaggaggggtaaaggtcacgatgggttgtaccaaggattgagcacagccactaaagatacctatgatgcgctccacatgcaggccctgccgccaaga

SEQ ID NO: 6331 - DNA, 3585 bp, Artificial Sequence
  Synthetic Polynucloetide
atggccttaccagtgaccgccttgctcctgccgctggccttgctgctccacgccgccaggccggaggttcagctgcttgagtctggcggaggactggttcaacctggcggaagcctgagactgtcttgtgccgccagcggcttcacctttagcagctacgccatgagctgggtccgacaggctcctggcaaaggactggaatgggtgtccagcatcagcggcagcggcgactacatctactacgccgatagcgtgaagggcagattcaccatcagccgggacatcagcaagaacaccctgtacctccagatgaacagcctgagagccgaggacaccgccgtgtactactgtgccaaagaaggcaccggcgctaacagcagcctggccgattatagaggccagggcacactggtcaccgtgtctagtggcggaggaagcggcggaggatctgaagtgcaggttttggagtctggcggaggactggttcagcctggcggatctctgagactgtcttgtgccgccagcggcttcaccttcagcaactttgccatgagctgggtccgacaggcccctggcaaaggacttgaatgggtgtccacaatcagcggcagcgccggcacaacagattacgccgattctgtgaagggcagattcaccatcagccgggacaacagcaagaaaaccctgtacctccagatgaacagcctgcgcgtggaagataccgccgtgtactactgtgccgatggcagaggccccttcttcgattatcgcggccagggcacactggtcaccgtttcttctggtaccggcggaggcggatctggcggcggaggtagcggtggcggaggatctgaattcgacatccagatgacacagagccctagcagcctgtctgccagcgtgggagacagagtgaccatcacatgcaaggccagcgaccacatcaacaactggctggcctggtatcagcagaagcctggacaggcccctaagctgctgatctacggcgctaccacactggaaacaggcgtgcccagcagattttctggcagcggctctggcaccgactacaccctgacaatatccagcctccagcctgaggacttcgccacctactactgtcagcagagctggaacaccccttggacattcggccagggcaccaagctggaaatcaagagactcgaggggaaaccaattcccaaccctcttctgggactggattcaaccggcagcggcgaggacctgaagaacgtgttcccacctgaggtggccgtgttcgagcctagcgaggccgagatcagccacacccagaaagccaccctcgtgtgcctggctaccggcttctaccccgaccatgtggaactgtcttggtgggtcaacggcaaagaggtgcacagcggcgtgtctaccgacccccagccactgaaagaacagcccgccctgaacgacagccggtactgcctgagcagcagactgagagtgtccgccaccttctggcagaacccccggaaccacttcagatgccaggtgcagttctacggcctgagcgagaacgacgagtggacccaggacagagccaagcccgtgacccagatcgtgtctgccgaagcctggggcagagccgattgcggatcccagagcttcggcctgctggaccccaagctgtgctacctgctggatggcatcctgttcatctacggcgtgatcctgaccgccctgttcctgaggagtaagaggagcaggctcctgcacagtgactacatgaacatgactccacgccgccccggacccacccgcaagcattaccagccctatgccccaccacgcgacttcgcagcctatcgctccagagtgaagttcagcagaagcgccgacgcccctgcctaccagcagggacagaaccaactgtacaacgagctgaacctgggcagacgggaagagtacgacgtgctggacaagcggagaggcagggaccctgagatgggcggaaagccccagcggagaaagaacccccaggaaggactgtataacgaactccagaaagacaagatggccgaagcctacagcgagatcggcatgaagggcgagcggagaagaggcaagggccacgatggcctgtaccagggcctgagcaccgccaccaaggacacctatgacgccctgcacatgcaggccctgcctccaagaagggccaagcgatctggatctggagcaacaaacttctcactactcaaacaagcaggtgacgtggaggagaatcccgggcctactagtatggactggatttggcgcatccttttccttgtcggcgctgctaccggcgcgcattccttcgaacaagttcagcttcaacagcctggcgctgagctggtcaaacctggcgcttctgtgaagatgagctgcaaagccagcggctacgccttcagcagctactggatcaactggatgaagcagaaacccggccagggactcgaatggatcggccaaatctatcccggcgacggcgacaccaactacaacggcaagttcaagggcagagccacactgaccgccgatacctctagcagcacagcctacatgcagctgagcagcctgaccagcgaagatagcgccgtgtacttctgtgcccggtccatcacaacagtcgtgggctgcgctatggactattggggccagggaacaagcgtgaccgtgtctagtacgcgtgagcagaaactgatctcggaagaggatgggagcggcatccagaaccctgatcctgccgtgtaccagctgcgggatagcaagagcagcgacaagagcgtgtgtctgttcaccgacttcgacagccagaccaacgtgtcccagagcaaggactccgacgtgtacatcaccgataagaccgtgctggacatgcggagcatggacttcaagagcaactccgccgtggcctggtccaacaagtccgatttcgcctgcgccaacgccttcaacaacagcattatccccgaggacacattcttcccaagccccgagagcagctgcggtacccagagttttgggttgttggaccctaaattgtgctatctgttggacggaatcctgttcatttacggagtgatcctgaccgcattgttcctgaggagcaagcggtcacggctgctccacagcgattacatgaatatgacaccacgaagaccgggtcctactcgcaaacactaccaaccctacgcacctccccgcgactttgcagcgtaccgatctcgggttaagttttccagatccgcagacgcacccgcttaccaacaagggcagaaccaactctacaatgaacttaatttggggcggagggaagagtacgacgttctggacaaaaggaggggacgagatcccgagatgggcggaaagcctcagcgaaggaagaatccgcaagaggggctttataacgaactccagaaagataaaatggcagaagcctatagtgagattgggatgaagggagaaaggaggaggggtaaaggtcacgatgggttgtaccaaggattgagcacagccactaaagatacctatgatgcgctccacatgcaggccctgccgccaaga

SEQ ID NO: 6332 - DNA, 3468 bp, Artificial Sequence
  Synthetic Polynucloetide
atggccttaccagtgaccgccttgctcctgccgctggccttgctgctccacgccgccaggccggaggttcagctgcttgagtctggcggaggactggttcaacctggcggaagcctgagactgtcttgtgccgccagcggcttcacctttagcagctacgccatgagctgggtccgacaggctcctggcaaaggactggaatgggtgtccagcatcagcggcagcggcgactacatctactacgccgatagcgtgaagggcagattcaccatcagccgggacatcagcaagaacaccctgtacctccagatgaacagcctgagagccgaggacaccgccgtgtactactgtgccaaagaaggcaccggcgctaacagcagcctggccgattatagaggccagggcacactggtcaccgtgtctagtggcggaggaagcggcggaggatctgaagtgcaggttttggagtctggcggaggactggttcagcctggcggatctctgagactgtcttgtgccgccagcggcttcaccttcagcaactttgccatgagctgggtccgacaggcccctggcaaaggacttgaatgggtgtccacaatcagcggcagcgccggcacaacagattacgccgattctgtgaagggcagattcaccatcagccgggacaacagcaagaaaaccctgtacctccagatgaacagcctgcgcgtggaagataccgccgtgtactactgtgccgatggcagaggccccttcttcgattatcgcggccagggcacactggtcaccgtttcttctggtaccggcggaggcggatctggcggcggaggtagcggtggcggaggatctgaattcgacatccagatgacacagagccctagcagcctgtctgccagcgtgggagacagagtgaccatcacatgcaaggccagcgaccacatcaacaactggctggcctggtatcagcagaagcctggacaggcccctaagctgctgatctacggcgctaccacactggaaacaggcgtgcccagcagattttctggcagcggctctggcaccgactacaccctgacaatatccagcctccagcctgaggacttcgccacctactactgtcagcagagctggaacaccccttggacattcggccagggcaccaagctggaaatcaagagactcgaggggaaaccaattcccaaccctcttctgggactggattcaaccggcagcggcgaggacctgaagaacgtgttcccacctgaggtggccgtgttcgagcctagcgaggccgagatcagccacacccagaaagccaccctcgtgtgcctggctaccggcttctaccccgaccatgtggaactgtcttggtgggtcaacggcaaagaggtgcacagcggcgtgtctaccgacccccagccactgaaagaacagcccgccctgaacgacagccggtactgcctgagcagcagactgagagtgtccgccaccttctggcagaacccccggaaccacttcagatgccaggtgcagttctacggcctgagcgagaacgacgagtggacccaggacagagccaagcccgtgacccagatcgtgtctgccgaagcctggggcagagccgattgcggatcccagagcttcggcctgctggaccccaagctgtgctacctgctggatggcatcctgttcatctacggcgtgatcctgaccgccctgttcctgagagtgaagttcagcagaagcgccgacgcccctgcctaccagcagggacagaaccaactgtacaacgagctgaacctgggcagacgggaagagtacgacgtgctggacaagcggagaggcagggaccctgagatgggcggaaagccccagcggagaaagaacccccaggaaggactgtataacgaactccagaaagacaagatggccgaagcctacagcgagatcggcatgaagggcgagcggagaagaggcaagggccacgatggcctgtaccagggcctgagcaccgccaccaaggacacctatgacgccctgcacatgcaggccctgcctccaagaagggccaagcgatctggatctggagcaacaaacttctcactactcaaacaagcaggtgacgtggaggagaatcccgggcctactagtatggactggatttggcgcatccttttccttgtcggcgctgctaccggcgcgcattccttcgaacaagttcagcttcaacagcctggcgctgagctggtcaaacctggcgcttctgtgaagatgagctgcaaagccagcggctacgccttcagcagctactggatcaactggatgaagcagaaacccggccagggactcgaatggatcggccaaatctatcccggcgacggcgacaccaactacaacggcaagttcaagggcagagccacactgaccgccgatacctctagcagcacagcctacatgcagctgagcagcctgaccagcgaagatagcgccgtgtacttctgtgcccggtccatcacaacagtcgtgggctgcgctatggactattggggccagggaacaagcgtgaccgtgtctagtacgcgtgagcagaaactgatctcggaagaggatctggggagcggcatccagaaccctgatcctgccgtgtaccagctgcgggatagcaagagcagcgacaagagcgtgtgtctgttcaccgacttcgacagccagaccaacgtgtcccagagcaaggactccgacgtgtacatcaccgataagaccgtgctggacatgcggagcatggacttcaagagcaactccgccgtggcctggtccaacaagtccgatttcgcctgcgccaacgccttcaacaacagcattatccccgaggacacattcttcccaagccccgagagcagctgcggtacccagagttttgggttgttggaccctaaattgtgctatctgttggacggaatcctgttcatttacggagtgatcctgaccgcattgttcctgaagagaggccggaagaagctgctgtacatcttcaagcagcctttcatgcggcccgtgcagaccacccaggaagaggacggctgctcctgccggttccccgaggaagaagaaggcggctgcgagctgcgggttaagttttccagatccgcagacgcacccgcttaccaacaagggcagaaccaactctacaatgaacttaatttggggcggagggaagagtacgacgttctggacaaaaggaggggacgagatcccgagatgggcggaaagcctcagcgaaggaagaatccgcaagaggggctttataacgaactccagaaagataaaatggcagaagcctatagtgagattgggatgaagggagaaaggaggaggggtaaaggtcacgatgggttgtaccaaggattgagcacagccactaaagatacctatgatgcgctccacatgcaggccctgccgccaaga

SEQ ID NO: 6333 - DNA, 3594 bp, Artificial Sequence
  Synthetic Polynucloetide
atggccttaccagtgaccgccttgctcctgccgctggccttgctgctccacgccgccaggccggaggttcagctgcttgagtctggcggaggactggttcaacctggcggaagcctgagactgtcttgtgccgccagcggcttcacctttagcagctacgccatgagctgggtccgacaggctcctggcaaaggactggaatgggtgtccagcatcagcggcagcggcgactacatctactacgccgatagcgtgaagggcagattcaccatcagccgggacatcagcaagaacaccctgtacctccagatgaacagcctgagagccgaggacaccgccgtgtactactgtgccaaagaaggcaccggcgctaacagcagcctggccgattatagaggccagggcacactggtcaccgtgtctagtggcggaggaagcggcggaggatctgaagtgcaggttttggagtctggcggaggactggttcagcctggcggatctctgagactgtcttgtgccgccagcggcttcaccttcagcaactttgccatgagctgggtccgacaggcccctggcaaaggacttgaatgggtgtccacaatcagcggcagcgccggcacaacagattacgccgattctgtgaagggcagattcaccatcagccgggacaacagcaagaaaaccctgtacctccagatgaacagcctgcgcgtggaagataccgccgtgtactactgtgccgatggcagaggccccttcttcgattatcgcggccagggcacactggtcaccgtttcttctggtaccggcggaggcggatctggcggcggaggtagcggtggcggaggatctgaattcgacatccagatgacacagagccctagcagcctgtctgccagcgtgggagacagagtgaccatcacatgcaaggccagcgaccacatcaacaactggctggcctggtatcagcagaagcctggacaggcccctaagctgctgatctacggcgctaccacactggaaacaggcgtgcccagcagattttctggcagcggctctggcaccgactacaccctgacaatatccagcctccagcctgaggacttcgccacctactactgtcagcagagctggaacaccccttggacattcggccagggcaccaagctggaaatcaagagactcgaggggaaaccaattcccaaccctcttctgggactggattcaaccggcagcggcgaggacctgaagaacgtgttcccacctgaggtggccgtgttcgagcctagcgaggccgagatcagccacacccagaaagccaccctcgtgtgcctggctaccggcttctaccccgaccatgtggaactgtcttggtgggtcaacggcaaagaggtgcacagcggcgtgtctaccgacccccagccactgaaagaacagcccgccctgaacgacagccggtactgcctgagcagcagactgagagtgtccgccaccttctggcagaacccccggaaccacttcagatgccaggtgcagttctacggcctgagcgagaacgacgagtggacccaggacagagccaagcccgtgacccagatcgtgtctgccgaagcctggggcagagccgattgcggatcccagagcttcggcctgctggaccccaagctgtgctacctgctggatggcatcctgttcatctacggcgtgatcctgaccgccctgttcctgaaacggggcagaaagaaactcctgtatatattcaaacaaccatttatgagaccagtacaaactactcaagaggaagatggctgtagctgccgatttccagaagaagaagaaggaggatgtgaactgagagtgaagttcagcagaagcgccgacgcccctgcctaccagcagggacagaaccaactgtacaacgagctgaacctgggcagacgggaagagtacgacgtgctggacaagcggagaggcagggaccctgagatgggcggaaagccccagcggagaaagaacccccaggaaggactgtataacgaactccagaaagacaagatggccgaagcctacagcgagatcggcatgaagggcgagcggagaagaggcaagggccacgatggcctgtaccagggcctgagcaccgccaccaaggacacctatgacgccctgcacatgcaggccctgcctccaagaagggccaagcgatctggatctggagcaacaaacttctcactactcaaacaagcaggtgacgtggaggagaatcccgggcctactagtatggactggatttggcgcatccttttccttgtcggcgctgctaccggcgcgcattccttcgaacaagttcagcttcaacagcctggcgctgagctggtcaaacctggcgcttctgtgaagatgagctgcaaagccagcggctacgccttcagcagctactggatcaactggatgaagcagaaacccggccagggactcgaatggatcggccaaatctatcccggcgacggcgacaccaactacaacggcaagttcaagggcagagccacactgaccgccgatacctctagcagcacagcctacatgcagctgagcagcctgaccagcgaagatagcgccgtgtacttctgtgcccggtccatcacaacagtcgtgggctgcgctatggactattggggccagggaacaagcgtgaccgtgtctagtacgcgtgagcagaaactgatctcggaagaggatctggggagcggcatccagaaccctgatcctgccgtgtaccagctgcgggatagcaagagcagcgacaagagcgtgtgtctgttcaccgacttcgacagccagaccaacgtgtcccagagcaaggactccgacgtgtacatcaccgataagaccgtgctggacatgcggagcatggacttcaagagcaactccgccgtggcctggtccaacaagtccgatttcgcctgcgccaacgccttcaacaacagcattatccccgaggacacattcttcccaagccccgagagcagctgcggtacccagagttttgggttgttggaccctaaattgtgctatctgttggacggaatcctgttcatttacggagtgatcctgaccgcattgttcctgaagagaggccggaagaagctgctgtacatcttcaagcagcctttcatgcggcccgtgcagaccacccaggaagaggacggctgctcctgccggttccccgaggaagaagaaggcggctgcgagctgcgggttaagttttccagatccgcagacgcacccgcttaccaacaagggcagaaccaactctacaatgaacttaatttggggcggagggaagagtacgacgttctggacaaaaggaggggacgagatcccgagatgggcggaaagcctcagcgaaggaagaatccgcaagaggggctttataacgaactccagaaagataaaatggcagaagcctatagtgagattgggatgaagggagaaaggaggaggggtaaaggtcacgatgggttgtaccaaggattgagcacagccactaaagatacctatgatgcgctccacatgcaggccctgccgccaaga

SEQ ID NO: 6334 - DNA, 3267 bp, Artificial Sequence
  Synthetic Polynucloetide
atggccttaccagtgaccgccttgctcctgccgctggccttgctgctccacgccgccaggccggaggttcagctgcttgagtctggcggaggactggttcaacctggcggaagcctgagactgtcttgtgccgccagcggcttcacctttagcagctacgccatgagctgggtccgacaggctcctggcaaaggactggaatgggtgtccagcatcagcggcagcggcgactacatctactacgccgatagcgtgaagggcagattcaccatcagccgggacatcagcaagaacaccctgtacctccagatgaacagcctgagagccgaggacaccgccgtgtactactgtgccaaagaaggcaccggcgctaacagcagcctggccgattatagaggccagggcacactggtcaccgtgtctagtggcggaggaagcggcggaggatctgaagtgcaggttttggagtctggcggaggactggttcagcctggcggatctctgagactgtcttgtgccgccagcggcttcaccttcagcaactttgccatgagctgggtccgacaggcccctggcaaaggacttgaatgggtgtccacaatcagcggcagcgccggcacaacagattacgccgattctgtgaagggcagattcaccatcagccgggacaacagcaagaaaaccctgtacctccagatgaacagcctgcgcgtggaagataccgccgtgtactactgtgccgatggcagaggccccttcttcgattatcgcggccagggcacactggtcaccgtttcttctggtaccggcggaggcggatctggcggcggaggtagcggtggcggaggatctgaattcgacatccagatgacacagagccctagcagcctgtctgccagcgtgggagacagagtgaccatcacatgcaaggccagcgaccacatcaacaactggctggcctggtatcagcagaagcctggacaggcccctaagctgctgatctacggcgctaccacactggaaacaggcgtgcccagcagattttctggcagcggctctggcaccgactacaccctgacaatatccagcctccagcctgaggacttcgccacctactactgtcagcagagctggaacaccccttggacattcggccagggcaccaagctggaaatcaagagactcgagcagagcttcggcctgctggaccccaagctgtgctacctgctggatggcatcctgttcatctacggcgtgatcctgaccgccctgttcctgagagtgaagttcagcagaagcgccgacgcccctgcctaccagcagggacagaaccaactgtacaacgagctgaacctgggcagacgggaagagtacgacgtgctggacaagcggagaggcagggaccctgagatgggcggaaagccccagcggagaaagaacccccaggaaggactgtataacgaactccagaaagacaagatggccgaagcctacagcgagatcggcatgaagggcgagcggagaagaggcaagggccacgatggcctgtaccagggcctgagcaccgccaccaaggacacctatgacgccctgcacatgcaggccctgcctccaagaagggccaagcgatctggatctggagcaacaaacttctcactactcaaacaagcaggtgacgtggaggagaatcccgggcctactagtatggactggatttggcgcatccttttccttgtcggcgctgctaccggcgcgcattccttcgaacaagttcagcttcaacagcctggcgctgagctggtcaaacctggcgcttctgtgaagatgagctgcaaagccagcggctacgccttcagcagctactggatcaactggatgaagcagaaacccggccagggactcgaatggatcggccaaatctatcccggcgacggcgacaccaactacaacggcaagttcaagggcagagccacactgaccgccgatacctctagcagcacagcctacatgcagctgagcagcctgaccagcgaagatagcgccgtgtacttctgtgcccggtccatcacaacagtcgtgggctgcgctatggactattggggccagggaacaagcgtgaccgtgtctagtacgcgtcagagttttgggttgttggaccctaaattgtgctatctgttggacggaatcctgttcatttacggagtgatcctgaccgcattgttcctgcgggttaagttttccagatccgcagacgcacccgcttaccaacaagggcagaaccaactctacaatgaacttaatttggggcggagggaagagtacgacgttctggacaaaaggaggggacgagatcccgagatgggcggaaagcctcagcgaaggaagaatccgcaagaggggctttataacgaactccagaaagataaaatggcagaagcctatagtgagattgggatgaagggagaaaggaggaggggtaaaggtcacgatgggttgtaccaaggattgagcacagccactaaagatacctatgatgcgctccacatgcaggccctgccgccaagacgcgccaagagaagcggatctggcgtgaagcagaccctgaatttcgacctgctgaagctggctggcgacgtggaatccaacccaggcccttctagaggccatatgaccgagtacaagcccacggtgcgcctcgccacccgcgacgacgtccccagggccgtacgcaccctcgccgccgcgttcgccgactaccccgccacgcgccacaccgtcgatccggaccgccacatcgagcgggtcaccgagctgcaagaactcttcctcacgcgcgtcgggctcgacatcggcaaggtgtgggtcgcggacgacggcgccgcggtggcggtctggaccacgccggagagcgtcgaagcgggggcggtgttcgccgagatcggcccgcgcatggccgagttgagcggttcccggctggccgcgcagcaacagatggaaggcctcctggcgccgcaccggcccaaggagcccgcgtggttcctggccaccgtcggcgtctcgcccgaccaccagggcaagggtctgggcagcgccgtcgtgctccccggagtggaggcggccgagcgcgccggggtgcccgccttcctggagacctccgcgccccgcaacctccccttctacgagcggctcggcttcaccgtcaccgccgacgtcgaggtgcccgaaggaccgcgcacctggtgcatgacccgcaagcccggtgcctga

SEQ ID NO: 6335 - DNA, 2739 bp, Artificial Sequence
  Synthetic Polynucloetide
atggccttaccagtgaccgccttgctcctgccgctggccttgctgctccacgccgccaggccggaggttcagctgcttgagtctggcggaggactggttcaacctggcggaagcctgagactgtcttgtgccgccagcggcttcacctttagcagctacgccatgagctgggtccgacaggctcctggcaaaggactggaatgggtgtccagcatcagcggcagcggcgactacatctactacgccgatagcgtgaagggcagattcaccatcagccgggacatcagcaagaacaccctgtacctccagatgaacagcctgagagccgaggacaccgccgtgtactactgtgccaaagaaggcaccggcgctaacagcagcctggccgattatagaggccagggcacactggtcaccgtgtctagtggcggaggaagcggcggaggatctgaagtgcaggttttggagtctggcggaggactggttcagcctggcggatctctgagactgtcttgtgccgccagcggcttcaccttcagcaactttgccatgagctgggtccgacaggcccctggcaaaggacttgaatgggtgtccacaatcagcggcagcgccggcacaacagattacgccgattctgtgaagggcagattcaccatcagccgggacaacagcaagaaaaccctgtacctccagatgaacagcctgcgcgtggaagataccgccgtgtactactgtgccgatggcagaggccccttcttcgattatcgcggccagggcacactggtcaccgtttcttctggtaccggcggaggcggatctggcggcggaggtagcggtggcggaggatctgaattcgacatccagatgacacagagccctagcagcctgtctgccagcgtgggagacagagtgaccatcacatgcaaggccagcgaccacatcaacaactggctggcctggtatcagcagaagcctggacaggcccctaagctgctgatctacggcgctaccacactggaaacaggcgtgcccagcagattttctggcagcggctctggcaccgactacaccctgacaatatccagcctccagcctgaggacttcgccacctactactgtcagcagagctggaacaccccttggacattcggccagggcaccaagctggaaatcaagagactcgagggacagcctaaggccaatcctaccgtgacactgttccctccaagcagcgaagaactccaggccaacaaggccacacttgtgtgcctgatctccgacttctaccctggggctgtgacagtggcttggaaggccgatggatctcctgtgaaagccggcgtggaaaccaccaagccatccaagcagagcaacaacaaatacgccgccagctcctacctgagcctgacacctgagcagtggaagtcccacagatcctacagctgccaagtgacccacgaaggcagcaccgtggaaaagacagtggcccctacagagtgcagccccatcaagaccgatgtgattacaatggaccccaaggacaactgctccaaggacgccaacgataccctgctgctccagctgaccaacaccagcgcctactacatgtacttgttgctgctgctgaagtccgtggtgtacttcgccatcatcacatgctgcctgctgcggagaaccgccttctgctgcaacggcgagaagtctagggccaagcgatctggatctggagcaacaaacttctcactactcaaacaagcaggtgacgtggaggagaatcccgggcctactagtatggactggatttggcgcatccttttccttgtcggcgctgctaccggcgcgcattccttcgaacaagttcagcttcaacagcctggcgctgagctggtcaaacctggcgcttctgtgaagatgagctgcaaagccagcggctacgccttcagcagctactggatcaactggatgaagcagaaacccggccagggactcgaatggatcggccaaatctatcccggcgacggcgacaccaactacaacggcaagttcaagggcagagccacactgaccgccgatacctctagcagcacagcctacatgcagctgagcagcctgaccagcgaagatagcgccgtgtacttctgtgcccggtccatcacaacagtcgtgggctgcgctatggactattggggccagggaacaagcgtgaccgtgtctagtacgcgtgcctctacaaagggaccctccgtgtttcctctggctcccagcagcaagtctacaagcggaggaacagccgctctgggctgcctggtcaaggattactttcccgagcctgtgaccgtgtcctggaatagcggagcactgacaagcggcgtgcacacctttccagccgtgctgcaaagcagcggcctgtactctctgagcagcgtggtcacagtgcctagctctagcctgggcacccagacctacatctgcaatgtgaaccacaagcctagcaacaccaaggtggacaagagagtggaacccaagagctgtgaagtgaaaaccgactccaccgaccacgtgaagcccaaagagacagagaacaccaagcagcccagcaagagctgccacaagcccaaggccatcgtgcacaccgagaaagtgaacatgatgagcctgaccgtgctgggcctgcggatgctgttcgccaaaaccgtggccgtgaacttcctgctgaccgccaagctgttcttcctc

SEQ ID NO: 6336 - DNA, 2673 bp, Artificial Sequence
  Synthetic Polynucloetide
atggccttaccagtgaccgccttgctcctgccgctggccttgctgctccacgccgccaggccggaggttcagctgcttgagtctggcggaggactggttcaacctggcggaagcctgagactgtcttgtgccgccagcggcttcacctttagcagctacgccatgagctgggtccgacaggctcctggcaaaggactggaatgggtgtccagcatcagcggcagcggcgactacatctactacgccgatagcgtgaagggcagattcaccatcagccgggacatcagcaagaacaccctgtacctccagatgaacagcctgagagccgaggacaccgccgtgtactactgtgccaaagaaggcaccggcgctaacagcagcctggccgattatagaggccagggcacactggtcaccgtgtctagtggcggaggaagcggcggaggatctgaagtgcaggttttggagtctggcggaggactggttcagcctggcggatctctgagactgtcttgtgccgccagcggcttcaccttcagcaactttgccatgagctgggtccgacaggcccctggcaaaggacttgaatgggtgtccacaatcagcggcagcgccggcacaacagattacgccgattctgtgaagggcagattcaccatcagccgggacaacagcaagaaaaccctgtacctccagatgaacagcctgcgcgtggaagataccgccgtgtactactgtgccgatggcagaggccccttcttcgattatcgcggccagggcacactggtcaccgtttcttctggtaccggcggaggcggatctggcggcggaggtagcggtggcggaggatctgaattcgacatccagatgacacagagccctagcagcctgtctgccagcgtgggagacagagtgaccatcacatgcaaggccagcgaccacatcaacaactggctggcctggtatcagcagaagcctggacaggcccctaagctgctgatctacggcgctaccacactggaaacaggcgtgcccagcagattttctggcagcggctctggcaccgactacaccctgacaatatccagcctccagcctgaggacttcgccacctactactgtcagcagagctggaacaccccttggacattcggccagggcaccaagctggaaatcaagagactcgagggacagcctaaggccaatcctaccgtgacactgttccctccaagcagcgaagaactccaggccaacaaggccacacttgtgtgcctgatctccgacttctaccctggggctgtgacagtggcttggaaggccgatggatctcctgtgaaagccggcgtggaaaccaccaagccatccaagcagagcaacaacaaatacgccgccagctcctacctgagcctgacacctgagcagtggaagtcccacagatcctacagctgccaagtgacccacgaaggcagcaccgtggaaaagacagtggcccctacagagtgcagcggcagagccgattgcggcatcaccagcgccagctaccaccagggcgtgctgagcgccaccatcctgtacgagatcctgctgggcaaggccaccctgtacgccgtgctggtgtctgccctggtgctgatggctatggtcaagcggaaggacagccggggaagggccaagcgatctggatctggagcaacaaacttctcactactcaaacaagcaggtgacgtggaggagaatcccgggcctactagtatggactggatttggcgcatccttttccttgtcggcgctgctaccggcgcgcattccttcgaacaagttcagcttcaacagcctggcgctgagctggtcaaacctggcgcttctgtgaagatgagctgcaaagccagcggctacgccttcagcagctactggatcaactggatgaagcagaaacccggccagggactcgaatggatcggccaaatctatcccggcgacggcgacaccaactacaacggcaagttcaagggcagagccacactgaccgccgatacctctagcagcacagcctacatgcagctgagcagcctgaccagcgaagatagcgccgtgtacttctgtgcccggtccatcacaacagtcgtgggctgcgctatggactattggggccagggaacaagcgtgaccgtgtctagtacgcgtgcctctacaaagggaccctccgtgtttcctctggctcccagcagcaagtctacaagcggaggaacagccgctctgggctgcctggtcaaggattactttcccgagcctgtgaccgtgtcctggaatagcggagcactgacaagcggcgtgcacacctttccagccgtgctgcaaagcagcggcctgtactctctgagcagcgtggtcacagtgcctagctctagcctgggcacccagacctacatctgcaatgtgaaccacaagcctagcaacaccaaggtggacaagagagtggaacccaagagctgtatccccgaggacacattcttcccaagcagcgacgtgccctgcgacgtgaagctggtggaaaagagcttcgagacagacaccaacctgaacttccagaacctgagcgtgatcggcttcagaatcctgctgctgaaagtggccggctttaacctgctgatgaccctgcggctgtggtccagc

SEQ ID NO: 6337 - DNA, 2673 bp, Artificial Sequence
  Synthetic Polynucloetide
atggccttaccagtgaccgccttgctcctgccgctggccttgctgctccacgccgccaggccggaggttcagctgcttgagtctggcggaggactggttcaacctggcggaagcctgagactgtcttgtgccgccagcggcttcacctttagcagctacgccatgagctgggtccgacaggctcctggcaaaggactggaatgggtgtccagcatcagcggcagcggcgactacatctactacgccgatagcgtgaagggcagattcaccatcagccgggacatcagcaagaacaccctgtacctccagatgaacagcctgagagccgaggacaccgccgtgtactactgtgccaaagaaggcaccggcgctaacagcagcctggccgattatagaggccagggcacactggtcaccgtgtctagtggcggaggaagcggcggaggatctgaagtgcaggttttggagtctggcggaggactggttcagcctggcggatctctgagactgtcttgtgccgccagcggcttcaccttcagcaactttgccatgagctgggtccgacaggcccctggcaaaggacttgaatgggtgtccacaatcagcggcagcgccggcacaacagattacgccgattctgtgaagggcagattcaccatcagccgggacaacagcaagaaaaccctgtacctccagatgaacagcctgcgcgtggaagataccgccgtgtactactgtgccgatggcagaggccccttcttcgattatcgcggccagggcacactggtcaccgtttcttctggtaccggcggaggcggatctggcggcggaggtagcggtggcggaggatctgaattcgacatccagatgacacagagccctagcagcctgtctgccagcgtgggagacagagtgaccatcacatgcaaggccagcgaccacatcaacaactggctggcctggtatcagcagaagcctggacaggcccctaagctgctgatctacggcgctaccacactggaaacaggcgtgcccagcagattttctggcagcggctctggcaccgactacaccctgacaatatccagcctccagcctgaggacttcgccacctactactgtcagcagagctggaacaccccttggacattcggccagggcaccaagctggaaatcaagagactcgagggacagcctaaggccaatcctaccgtgacactgttccctccaagcagcgaagaactccaggccaacaaggccacacttgtgtgcctgatctccgacttctaccctggggctgtgacagtggcttggaaggccgatggatctcctgtgaaagccggcgtggaaaccaccaagccatccaagcagagcaacaacaaatacgccgccagctcctacctgagcctgacacctgagcagtggaagtcccacagatcctacagctgccaagtgacccacgaaggcagcaccgtggaaaagacagtggcccctacagagtgcagcggcagagccgattgcggctttaccagcgagagctaccagcagggcgtgctgagcgccaccatcctgtacgagatcctgctgggcaaggccaccctgtacgccgtgctggtgtctgccctggtgctgatggctatggtcaagcggaaggacagccggggaagggccaagcgatctggatctggagcaacaaacttctcactactcaaacaagcaggtgacgtggaggagaatcccgggcctactagtatggactggatttggcgcatccttttccttgtcggcgctgctaccggcgcgcattccttcgaacaagttcagcttcaacagcctggcgctgagctggtcaaacctggcgcttctgtgaagatgagctgcaaagccagcggctacgccttcagcagctactggatcaactggatgaagcagaaacccggccagggactcgaatggatcggccaaatctatcccggcgacggcgacaccaactacaacggcaagttcaagggcagagccacactgaccgccgatacctctagcagcacagcctacatgcagctgagcagcctgaccagcgaagatagcgccgtgtacttctgtgcccggtccatcacaacagtcgtgggctgcgctatggactattggggccagggaacaagcgtgaccgtgtctagtacgcgtgcctctacaaagggaccctccgtgtttcctctggctcccagcagcaagtctacaagcggaggaacagccgctctgggctgcctggtcaaggattactttcccgagcctgtgaccgtgtcctggaatagcggagcactgacaagcggcgtgcacacctttccagccgtgctgcaaagcagcggcctgtactctctgagcagcgtggtcacagtgcctagctctagcctgggcacccagacctacatctgcaatgtgaaccacaagcctagcaacaccaaggtggacaagagagtggaacccaagagctgtatccccgaggacacattcttcccaagccccgagagcagctgcgacgtgaagctggtggaaaagagcttcgagacagacaccaacctgaacttccagaacctgagcgtgatcggcttcagaatcctgctgctgaaagtggccggctttaacctgctgatgaccctgcggctgtggtccagc

SEQ ID NO: 6338 - DNA, 2151 bp, Artificial Sequence
  Synthetic Polynucloetide
atggccttaccagtgaccgccttgctcctgccgctggccttgctgctccacgccgccaggccggaggttcagctgcttgagtctggcggaggactggttcaacctggcggaagcctgagactgtcttgtgccgccagcggcttcacctttagcagctacgccatgagctgggtccgacaggctcctggcaaaggactggaatgggtgtccagcatcagcggcagcggcgactacatctactacgccgatagcgtgaagggcagattcaccatcagccgggacatcagcaagaacaccctgtacctccagatgaacagcctgagagccgaggacaccgccgtgtactactgtgccaaagaaggcaccggcgctaacagcagcctggccgattatagaggccagggcacactggtcaccgtgtctagtggcggaggaagcggcggaggatctgaagtgcaggttttggagtctggcggaggactggttcagcctggcggatctctgagactgtcttgtgccgccagcggcttcaccttcagcaactttgccatgagctgggtccgacaggcccctggcaaaggacttgaatgggtgtccacaatcagcggcagcgccggcacaacagattacgccgattctgtgaagggcagattcaccatcagccgggacaacagcaagaaaaccctgtacctccagatgaacagcctgcgcgtggaagataccgccgtgtactactgtgccgatggcagaggccccttcttcgattatcgcggccagggcacactggtcaccgtttcttctggtaccggcggaggcggatctggcggcggaggtagcggtggcggaggatctgaattcgacatccagatgacacagagccctagcagcctgtctgccagcgtgggagacagagtgaccatcacatgcaaggccagcgaccacatcaacaactggctggcctggtatcagcagaagcctggacaggcccctaagctgctgatctacggcgctaccacactggaaacaggcgtgcccagcagattttctggcagcggctctggcaccgactacaccctgacaatatccagcctccagcctgaggacttcgccacctactactgtcagcagagctggaacaccccttggacattcggccagggcaccaagctggaaatcaagagaggcggaggcggaagtggaggcggaggatctggcggcggaggctctcaagttcagcttcaacagcctggcgctgagctggtcaaacctggcgcttctgtgaagatgagctgcaaagccagcggctacgccttcagcagctactggatcaactggatgaagcagaaacccggccagggactcgaatggatcggccaaatctatcccggcgacggcgacaccaactacaacggcaagttcaagggcagagccacactgaccgccgatacctctagcagcacagcctacatgcagctgagcagcctgaccagcgaagatagcgccgtgtacttctgtgcccggtccatcacaacagtcgtgggctgcgctatggactattggggccagggaacaagcgtgaccgtgtctagtacgcgtgacggtaacgaggagatgggaggaatcactcaaaccccttacaaagtctcaatttcaggaacaactgttatccttacatgtccccagtatcctggcagcgagatcctttggcagcataacgacaagaatatagggggagatgaagacgataagaatatcggatctgacgaggatcacttgagcctgaaagagttctccgagcttgaacaaagcggatattatgtgtgctatccgcgcgggtcaaagccggaagacgctaacttttacctttatctccgagccagagtgtgcgaaaattgcatggaaatggacgttatgtccgttgctacaatagttatcgtagatatatgcatcacgggtggactgcttctgctggtttattattggtccaagaatagaaaggccaaagctaaacccgtgaccagaggcgctggcgcaggcggaaggcaaaggggacaaaacaaagaacggccaccaccagtgccaaatccagattatgagcctattcggaaaggacagagggacctgtactctggcctgaatcagagaagaatc

SEQ ID NO: 6339 - DNA, 2046 bp, Artificial Sequence
  Synthetic Polynucloetide
atggccttaccagtgaccgccttgctcctgccgctggccttgctgctccacgccgccaggccggaggttcagctgcttgagtctggcggaggactggttcaacctggcggaagcctgagactgtcttgtgccgccagcggcttcacctttagcagctacgccatgagctgggtccgacaggctcctggcaaaggactggaatgggtgtccagcatcagcggcagcggcgactacatctactacgccgatagcgtgaagggcagattcaccatcagccgggacatcagcaagaacaccctgtacctccagatgaacagcctgagagccgaggacaccgccgtgtactactgtgccaaagaaggcaccggcgctaacagcagcctggccgattatagaggccagggcacactggtcaccgtgtctagtggcggaggaagcggcggaggatctgaagtgcaggttttggagtctggcggaggactggttcagcctggcggatctctgagactgtcttgtgccgccagcggcttcaccttcagcaactttgccatgagctgggtccgacaggcccctggcaaaggacttgaatgggtgtccacaatcagcggcagcgccggcacaacagattacgccgattctgtgaagggcagattcaccatcagccgggacaacagcaagaaaaccctgtacctccagatgaacagcctgcgcgtggaagataccgccgtgtactactgtgccgatggcagaggccccttcttcgattatcgcggccagggcacactggtcaccgtttcttctggtaccggcggaggcggatctggcggcggaggtagcggtggcggaggatctgaattcgacatccagatgacacagagccctagcagcctgtctgccagcgtgggagacagagtgaccatcacatgcaaggccagcgaccacatcaacaactggctggcctggtatcagcagaagcctggacaggcccctaagctgctgatctacggcgctaccacactggaaacaggcgtgcccagcagattttctggcagcggctctggcaccgactacaccctgacaatatccagcctccagcctgaggacttcgccacctactactgtcagcagagctggaacaccccttggacattcggccagggcaccaagctggaaatcaagagaggcggaggcggaagtggaggcggaggatctggcggcggaggctctcaagttcagcttcaacagcctggcgctgagctggtcaaacctggcgcttctgtgaagatgagctgcaaagccagcggctacgccttcagcagctactggatcaactggatgaagcagaaacccggccagggactcgaatggatcggccaaatctatcccggcgacggcgacaccaactacaacggcaagttcaagggcagagccacactgaccgccgatacctctagcagcacagcctacatgcagctgagcagcctgaccagcgaagatagcgccgtgtacttctgtgcccggtccatcacaacagtcgtgggctgcgctatggactattggggccagggaacaagcgtgaccgtgtctagtacgcgtttcaagatccccatcgaggaactggaagatcgggtgttcgtgaactgcaacacctctatcacctgggtggaaggcaccgtgggaacactgctgagcgacatcaccagactggacctcggcaagcggattctggaccctcggggcatctacagatgcaacggcaccgacatctacaaggacaaagaaagcaccgtgcaggtccactacagaatgtgccagtcctgcgtggaactggaccctgctacagtggccggcatcatcgtgaccgatgtgatcgctactctgctgctggctctgggagtgttctgcttcgccggacacgaaacaggcagactgtctggcgctgccgatacacaggccctgctgagaaacgaccaagtgtatcagcccctgcgcgacagagatgatgcccagtattctcacctcggcggcaactgggctagaaacaag

SEQ ID NO: 6340 - DNA, 2076 bp, Artificial Sequence
  Synthetic Polynucloetide
atggccttaccagtgaccgccttgctcctgccgctggccttgctgctccacgccgccaggccggaggttcagctgcttgagtctggcggaggactggttcaacctggcggaagcctgagactgtcttgtgccgccagcggcttcacctttagcagctacgccatgagctgggtccgacaggctcctggcaaaggactggaatgggtgtccagcatcagcggcagcggcgactacatctactacgccgatagcgtgaagggcagattcaccatcagccgggacatcagcaagaacaccctgtacctccagatgaacagcctgagagccgaggacaccgccgtgtactactgtgccaaagaaggcaccggcgctaacagcagcctggccgattatagaggccagggcacactggtcaccgtgtctagtggcggaggaagcggcggaggatctgaagtgcaggttttggagtctggcggaggactggttcagcctggcggatctctgagactgtcttgtgccgccagcggcttcaccttcagcaactttgccatgagctgggtccgacaggcccctggcaaaggacttgaatgggtgtccacaatcagcggcagcgccggcacaacagattacgccgattctgtgaagggcagattcaccatcagccgggacaacagcaagaaaaccctgtacctccagatgaacagcctgcgcgtggaagataccgccgtgtactactgtgccgatggcagaggccccttcttcgattatcgcggccagggcacactggtcaccgtttcttctggtaccggcggaggcggatctggcggcggaggtagcggtggcggaggatctgaattcgacatccagatgacacagagccctagcagcctgtctgccagcgtgggagacagagtgaccatcacatgcaaggccagcgaccacatcaacaactggctggcctggtatcagcagaagcctggacaggcccctaagctgctgatctacggcgctaccacactggaaacaggcgtgcccagcagattttctggcagcggctctggcaccgactacaccctgacaatatccagcctccagcctgaggacttcgccacctactactgtcagcagagctggaacaccccttggacattcggccagggcaccaagctggaaatcaagagaggcggaggcggaagtggaggcggaggatctggcggcggaggctctcaagttcagcttcaacagcctggcgctgagctggtcaaacctggcgcttctgtgaagatgagctgcaaagccagcggctacgccttcagcagctactggatcaactggatgaagcagaaacccggccagggactcgaatggatcggccaaatctatcccggcgacggcgacaccaactacaacggcaagttcaagggcagagccacactgaccgccgatacctctagcagcacagcctacatgcagctgagcagcctgaccagcgaagatagcgccgtgtacttctgtgcccggtccatcacaacagtcgtgggctgcgctatggactattggggccagggaacaagcgtgaccgtgtctagtacgcgtcagagcatcaagggcaaccacctggtcaaggtgtacgactaccaagaggacggcagcgtgctgctgacatgtgatgccgaggccaagaacatcacctggtttaaggacggcaagatgatcggcttcctgaccgaggacaagaagaagtggaacctgggcagcaacgctaaggaccccagaggcatgtatcagtgcaagggcagccagaacaagagcaagcccctccaggtgtactaccggatgtgccagaactgcatcgagctgaacgccgctaccatcagcggctttctgttcgccgagatcgtgtccatcttcgtgctggccgtgggcgtgtactttatcgctggacaggatggcgtgcggcagagcagagcttccgataagcaaaccctgctgcctaacgaccagctgtaccagcctctgaaggacagagaggacgaccagtacagccacctccagggcaatcagctgagaagaaac

SEQ ID NO: 6341 - DNA, 2025 bp, Artificial Sequence
  Synthetic Polynucloetide
atggccttaccagtgaccgccttgctcctgccgctggccttgctgctccacgccgccaggccggaggttcagctgcttgagtctggcggaggactggttcaacctggcggaagcctgagactgtcttgtgccgccagcggcttcacctttagcagctacgccatgagctgggtccgacaggctcctggcaaaggactggaatgggtgtccagcatcagcggcagcggcgactacatctactacgccgatagcgtgaagggcagattcaccatcagccgggacatcagcaagaacaccctgtacctccagatgaacagcctgagagccgaggacaccgccgtgtactactgtgccaaagaaggcaccggcgctaacagcagcctggccgattatagaggccagggcacactggtcaccgtgtctagtggcggaggaagcggcggaggatctgaagtgcaggttttggagtctggcggaggactggttcagcctggcggatctctgagactgtcttgtgccgccagcggcttcaccttcagcaactttgccatgagctgggtccgacaggcccctggcaaaggacttgaatgggtgtccacaatcagcggcagcgccggcacaacagattacgccgattctgtgaagggcagattcaccatcagccgggacaacagcaagaaaaccctgtacctccagatgaacagcctgcgcgtggaagataccgccgtgtactactgtgccgatggcagaggccccttcttcgattatcgcggccagggcacactggtcaccgtttcttctggtaccggcggaggcggatctggcggcggaggtagcggtggcggaggatctgaattcgacatccagatgacacagagccctagcagcctgtctgccagcgtgggagacagagtgaccatcacatgcaaggccagcgaccacatcaacaactggctggcctggtatcagcagaagcctggacaggcccctaagctgctgatctacggcgctaccacactggaaacaggcgtgcccagcagattttctggcagcggctctggcaccgactacaccctgacaatatccagcctccagcctgaggacttcgccacctactactgtcagcagagctggaacaccccttggacattcggccagggcaccaagctggaaatcaagagaggcggaggcggaagtggaggcggaggatctggcggcggaggctctcaagttcagcttcaacagcctggcgctgagctggtcaaacctggcgcttctgtgaagatgagctgcaaagccagcggctacgccttcagcagctactggatcaactggatgaagcagaaacccggccagggactcgaatggatcggccaaatctatcccggcgacggcgacaccaactacaacggcaagttcaagggcagagccacactgaccgccgatacctctagcagcacagcctacatgcagctgagcagcctgaccagcgaagatagcgccgtgtacttctgtgcccggtccatcacaacagtcgtgggctgcgctatggactattggggccagggaacaagcgtgaccgtgtctagtacgcgtcagagttttgggttgttggaccctaaattgtgctatctgttggacggaatcctgttcatttacggagtgatcctgaccgcattgttcctgcgggttaagttttccagatccgcagacgcacccgcttaccaacaagggcagaaccaactctacaatgaacttaatttggggcggagggaagagtacgacgttctggacaaaaggaggggacgagatcccgagatgggcggaaagcctcagcgaaggaagaatccgcaagaggggctttataacgaactccagaaagataaaatggcagaagcctatagtgagattgggatgaagggagaaaggaggaggggtaaaggtcacgatgggttgtaccaaggattgagcacagccactaaagatacctatgatgcgctccacatgcaggccctgccgccaaga

SEQ ID NO: 6342 - DNA, 2727 bp, Artificial Sequence
  Synthetic Polynucloetide
atggccttaccagtgaccgccttgctcctgccgctggccttgctgctccacgccgccaggccggaggttcagctgcttgagtctggcggaggactggttcaacctggcggaagcctgagactgtcttgtgccgccagcggcttcacctttagcagctacgccatgagctgggtccgacaggctcctggcaaaggactggaatgggtgtccagcatcagcggcagcggcgactacatctactacgccgatagcgtgaagggcagattcaccatcagccgggacatcagcaagaacaccctgtacctccagatgaacagcctgagagccgaggacaccgccgtgtactactgtgccaaagaaggcaccggcgctaacagcagcctggccgattatagaggccagggcacactggtcaccgtgtctagtggcggaggaagcggcggaggatctgaagtgcaggttttggagtctggcggaggactggttcagcctggcggatctctgagactgtcttgtgccgccagcggcttcaccttcagcaactttgccatgagctgggtccgacaggcccctggcaaaggacttgaatgggtgtccacaatcagcggcagcgccggcacaacagattacgccgattctgtgaagggcagattcaccatcagccgggacaacagcaagaaaaccctgtacctccagatgaacagcctgcgcgtggaagataccgccgtgtactactgtgccgatggcagaggccccttcttcgattatcgcggccagggcacactggtcaccgtttcttctggtaccggcggaggcggatctggcggcggaggtagcggtggcggaggatctgaattcgacatccagatgacacagagccctagcagcctgtctgccagcgtgggagacagagtgaccatcacatgcaaggccagcgaccacatcaacaactggctggcctggtatcagcagaagcctggacaggcccctaagctgctgatctacggcgctaccacactggaaacaggcgtgcccagcagattttctggcagcggctctggcaccgactacaccctgacaatatccagcctccagcctgaggacttcgccacctactactgtcagcagagctggaacaccccttggacattcggccagggcaccaagctggaaatcaagagaggcggaggcggaagtggaggcggaggatctggcggcggaggctctcaagttcagcttcaacagcctggcgctgagctggtcaaacctggcgcttctgtgaagatgagctgcaaagccagcggctacgccttcagcagctactggatcaactggatgaagcagaaacccggccagggactcgaatggatcggccaaatctatcccggcgacggcgacaccaactacaacggcaagttcaagggcagagccacactgaccgccgatacctctagcagcacagcctacatgcagctgagcagcctgaccagcgaagatagcgccgtgtacttctgtgcccggtccatcacaacagtcgtgggctgcgctatggactattggggccagggaacaagcgtgaccgtgtctagtacgcgtgggagcggcatccagaaccctgatcctgccgtgtaccagctgcgggatagcaagagcagcgacaagagcgtgtgtctgttcaccgacttcgacagccagaccaacgtgtcccagagcaaggactccgacgtgtacatcaccgataagaccgtgctggacatgcggagcatggacttcaagagcaactccgccgtggcctggtccaacaagtccgatttcgcctgcgccaacgccttcaacaacagcattatccccgaggacacattcttcccaagccccgagagcagctgcgacgtgaagctggtggaaaagagcttcgagacagacaccaacctgaacttccagaacctgagcgtgatcggcttcagaatcctgctgctgaaagtggccggctttaacctgctgatgaccctgcggctgtggtccagccgcgccaagagaagcggatctggcgtgaagcagaccctgaatttcgacctgctgaagctggctggcgacgtggaatccaacccaggcccttctagaggccatatgaccgagtacaagcccacggtgcgcctcgccacccgcgacgacgtccccagggccgtacgcaccctcgccgccgcgttcgccgactaccccgccacgcgccacaccgtcgatccggaccgccacatcgagcgggtcaccgagctgcaagaactcttcctcacgcgcgtcgggctcgacatcggcaaggtgtgggtcgcggacgacggcgccgcggtggcggtctggaccacgccggagagcgtcgaagcgggggcggtgttcgccgagatcggcccgcgcatggccgagttgagcggttcccggctggccgcgcagcaacagatggaaggcctcctggcgccgcaccggcccaaggagcccgcgtggttcctggccaccgtcggcgtctcgcccgaccaccagggcaagggtctgggcagcgccgtcgtgctccccggagtggaggcggccgagcgcgccggggtgcccgccttcctggagacctccgcgccccgcaacctccccttctacgagcggctcggcttcaccgtcaccgccgacgtcgaggtgcccgaaggaccgcgcacctggtgcatgacccgcaagcccggtgcctga

SEQ ID NO: 6343 - DNA, 2823 bp, Artificial Sequence
  Synthetic Polynucloetide
atggccttaccagtgaccgccttgctcctgccgctggccttgctgctccacgccgccaggccggaggttcagctgcttgagtctggcggaggactggttcaacctggcggaagcctgagactgtcttgtgccgccagcggcttcacctttagcagctacgccatgagctgggtccgacaggctcctggcaaaggactggaatgggtgtccagcatcagcggcagcggcgactacatctactacgccgatagcgtgaagggcagattcaccatcagccgggacatcagcaagaacaccctgtacctccagatgaacagcctgagagccgaggacaccgccgtgtactactgtgccaaagaaggcaccggcgctaacagcagcctggccgattatagaggccagggcacactggtcaccgtgtctagtggcggaggaagcggcggaggatctgaagtgcaggttttggagtctggcggaggactggttcagcctggcggatctctgagactgtcttgtgccgccagcggcttcaccttcagcaactttgccatgagctgggtccgacaggcccctggcaaaggacttgaatgggtgtccacaatcagcggcagcgccggcacaacagattacgccgattctgtgaagggcagattcaccatcagccgggacaacagcaagaaaaccctgtacctccagatgaacagcctgcgcgtggaagataccgccgtgtactactgtgccgatggcagaggccccttcttcgattatcgcggccagggcacactggtcaccgtttcttctggtaccggcggaggcggatctggcggcggaggtagcggtggcggaggatctgaattcgacatccagatgacacagagccctagcagcctgtctgccagcgtgggagacagagtgaccatcacatgcaaggccagcgaccacatcaacaactggctggcctggtatcagcagaagcctggacaggcccctaagctgctgatctacggcgctaccacactggaaacaggcgtgcccagcagattttctggcagcggctctggcaccgactacaccctgacaatatccagcctccagcctgaggacttcgccacctactactgtcagcagagctggaacaccccttggacattcggccagggcaccaagctggaaatcaagagaggcggaggcggaagtggaggcggaggatctggcggcggaggctctcaagttcagcttcaacagcctggcgctgagctggtcaaacctggcgcttctgtgaagatgagctgcaaagccagcggctacgccttcagcagctactggatcaactggatgaagcagaaacccggccagggactcgaatggatcggccaaatctatcccggcgacggcgacaccaactacaacggcaagttcaagggcagagccacactgaccgccgatacctctagcagcacagcctacatgcagctgagcagcctgaccagcgaagatagcgccgtgtacttctgtgcccggtccatcacaacagtcgtgggctgcgctatggactattggggccagggaacaagcgtgaccgtgtctagtctcgaggacctgaagaacgtgttcccacctgaggtggccgtgttcgagcctagcgaggccgagatcagccacacccagaaagccaccctcgtgtgcctggctaccggcttctaccccgaccatgtggaactgtcttggtgggtcaacggcaaagaggtgcacagcggcgtgtctaccgacccccagccactgaaagaacagcccgccctgaacgacagccggtactgcctgagcagcagactgagagtgtccgccaccttctggcagaacccccggaaccacttcagatgccaggtgcagttctacggcctgagcgagaacgacgagtggacccaggacagagccaagcccgtgacccagatcgtgtctgccgaagcctggggcagagccgattgcggctttaccagcgagagctaccagcagggcgtgctgagcgccaccatcctgtacgagatcctgctgggcaaggccaccctgtacgccgtgctggtgtctgccctggtgctgatggctatggtcaagcggaaggacagccggggaagggccaagcgatctggatctggagcaacaaacttctcactactcaaacaagcaggtgacgtggaggagaatcccgggcctactagaggccatatgaccgagtacaagcccacggtgcgcctcgccacccgcgacgacgtccccagggccgtacgcaccctcgccgccgcgttcgccgactaccccgccacgcgccacaccgtcgatccggaccgccacatcgagcgggtcaccgagctgcaagaactcttcctcacgcgcgtcgggctcgacatcggcaaggtgtgggtcgcggacgacggcgccgcggtggcggtctggaccacgccggagagcgtcgaagcgggggcggtgttcgccgagatcggcccgcgcatggccgagttgagcggttcccggctggccgcgcagcaacagatggaaggcctcctggcgccgcaccggcccaaggagcccgcgtggttcctggccaccgtcggcgtctcgcccgaccaccagggcaagggtctgggcagcgccgtcgtgctccccggagtggaggcggccgagcgcgccggggtgcccgccttcctggagacctccgcgccccgcaacctccccttctacgagcggctcggcttcaccgtcaccgccgacgtcgaggtgcccgaaggaccgcgcacctggtgcatgacccgcaagcccggtgcctga

SEQ ID NO: 6344 - DNA, 2973 bp, Artificial Sequence
  Synthetic Polynucloetide
atggccttaccagtgaccgccttgctcctgccgctggccttgctgctccacgccgccaggccggaggttcagctgcttgagtctggcggaggactggttcaacctggcggaagcctgagactgtcttgtgccgccagcggcttcacctttagcagctacgccatgagctgggtccgacaggctcctggcaaaggactggaatgggtgtccagcatcagcggcagcggcgactacatctactacgccgatagcgtgaagggcagattcaccatcagccgggacatcagcaagaacaccctgtacctccagatgaacagcctgagagccgaggacaccgccgtgtactactgtgccaaagaaggcaccggcgctaacagcagcctggccgattatagaggccagggcacactggtcaccgtgtctagtggcggaggaagcggcggaggatctgaagtgcaggttttggagtctggcggaggactggttcagcctggcggatctctgagactgtcttgtgccgccagcggcttcaccttcagcaactttgccatgagctgggtccgacaggcccctggcaaaggacttgaatgggtgtccacaatcagcggcagcgccggcacaacagattacgccgattctgtgaagggcagattcaccatcagccgggacaacagcaagaaaaccctgtacctccagatgaacagcctgcgcgtggaagataccgccgtgtactactgtgccgatggcagaggccccttcttcgattatcgcggccagggcacactggtcaccgtttcttctggtaccggcggaggcggatctggcggcggaggtagcggtggcggaggatctgaattcgacatccagatgacacagagccctagcagcctgtctgccagcgtgggagacagagtgaccatcacatgcaaggccagcgaccacatcaacaactggctggcctggtatcagcagaagcctggacaggcccctaagctgctgatctacggcgctaccacactggaaacaggcgtgcccagcagattttctggcagcggctctggcaccgactacaccctgacaatatccagcctccagcctgaggacttcgccacctactactgtcagcagagctggaacaccccttggacattcggccagggcaccaagctggaaatcaagagaggcggaggcggaagtggaggcggaggatctggcggcggaggctctcaagttcagcttcaacagcctggcgctgagctggtcaaacctggcgcttctgtgaagatgagctgcaaagccagcggctacgccttcagcagctactggatcaactggatgaagcagaaacccggccagggactcgaatggatcggccaaatctatcccggcgacggcgacaccaactacaacggcaagttcaagggcagagccacactgaccgccgatacctctagcagcacagcctacatgcagctgagcagcctgaccagcgaagatagcgccgtgtacttctgtgcccggtccatcacaacagtcgtgggctgcgctatggactattggggccagggaacaagcgtgaccgtgtctagtacgcgtgagcagaaactgatctcggaagaggatctggggagcggcaccccattcccttctctggcccctcccatcatgctgctggtggacggcaagcagcagatggtggtcgtgtgcctggtgctggatgtggccccacctggactggacagccccatctggtttagcgccggcaatggctctgccctggacgcctttacctacggcccaagccctgccaccgatggcacctggacaaatctggcccacctgagcctgcccagcgaggaactggcttcttgggagcctctcgtgtgccacacaggacctggcgctgagggacacagcagatccacccagcctatgcacctgtctggcgaggccagcaccgccagaacctgtcctcaggaacctctgagaggcacccctggcggagcactgtggctgggagtgctgagactgctgctgttcaagctgctgctgtttgacctgctgctgacctgctcctgtctgtgcgatcctgccggccctctgccttctcctgccaccaccacaagactgagagccctgggcagccacagactgcaccctgccacagagacaggcggcagagaggccacaagcagccctagaccccagcccagagacagaagatggggcgataccccccctggcagaaagcctggatctccagtccgcgccaagagaagcggatctggcgtgaagcagaccctgaatttcgacctgctgaagctggctggcgacgtggaatccaacccaggcccttctagatctagaggccatatgaccgagtacaagcccacggtgcgcctcgccacccgcgacgacgtccccagggccgtacgcaccctcgccgccgcgttcgccgactaccccgccacgcgccacaccgtcgatccggaccgccacatcgagcgggtcaccgagctgcaagaactcttcctcacgcgcgtcgggctcgacatcggcaaggtgtgggtcgcggacgacggcgccgcggtggcggtctggaccacgccggagagcgtcgaagcgggggcggtgttcgccgagatcggcccgcgcatggccgagttgagcggttcccggctggccgcgcagcaacagatggaaggcctcctggcgccgcaccggcccaaggagcccgcgtggttcctggccaccgtcggcgtctcgcccgaccaccagggcaagggtctgggcagcgccgtcgtgctccccggagtggaggcggccgagcgcgccggggtgcccgccttcctggagacctccgcgccccgcaacctccccttctacgagcggctcggcttcaccgtcaccgccgacgtcgaggtgcccgaaggaccgcgcacctggtgcatgacccgcaagcccggtgcctga

SEQ ID NO: 6345 - DNA, 2415 bp, Artificial Sequence
  Synthetic Polynucloetide
atggccttaccagtgaccgccttgctcctgccgctggccttgctgctccacgccgccaggccggaggttcagctgcttgagtctggcggaggactggttcaacctggcggaagcctgagactgtcttgtgccgccagcggcttcacctttagcagctacgccatgagctgggtccgacaggctcctggcaaaggactggaatgggtgtccagcatcagcggcagcggcgactacatctactacgccgatagcgtgaagggcagattcaccatcagccgggacatcagcaagaacaccctgtacctccagatgaacagcctgagagccgaggacaccgccgtgtactactgtgccaaagaaggcaccggcgctaacagcagcctggccgattatagaggccagggcacactggtcaccgtgtctagtggcggaggaagcggcggaggatctgaagtgcaggttttggagtctggcggaggactggttcagcctggcggatctctgagactgtcttgtgccgccagcggcttcaccttcagcaactttgccatgagctgggtccgacaggcccctggcaaaggacttgaatgggtgtccacaatcagcggcagcgccggcacaacagattacgccgattctgtgaagggcagattcaccatcagccgggacaacagcaagaaaaccctgtacctccagatgaacagcctgcgcgtggaagataccgccgtgtactactgtgccgatggcagaggccccttcttcgattatcgcggccagggcacactggtcaccgtttcttctggtaccggcggaggcggatctggcggcggaggtagcggtggcggaggatctgaattcgacatccagatgacacagagccctagcagcctgtctgccagcgtgggagacagagtgaccatcacatgcaaggccagcgaccacatcaacaactggctggcctggtatcagcagaagcctggacaggcccctaagctgctgatctacggcgctaccacactggaaacaggcgtgcccagcagattttctggcagcggctctggcaccgactacaccctgacaatatccagcctccagcctgaggacttcgccacctactactgtcagcagagctggaacaccccttggacattcggccagggcaccaagctggaaatcaagagactcgaggacctgaagaacgtgttcccacctgaggtggccgtgttcgagcctagcgaggccgagatcagccacacccagaaagccaccctcgtgtgcctggctaccggcttctaccccgaccatgtggaactgtcttggtgggtcaacggcaaagaggtgcacagcggcgtgtctaccgacccccagccactgaaagaacagcccgccctgaacgacagccggtactgcctgagcagcagactgagagtgtccgccaccttctggcagaacccccggaaccacttcagatgccaggtgcagttctacggcctgagcgagaacgacgagtggacccaggacagagccaagcccgtgacccagatcgtgtctgccgaagcctggggcagagccgattgcggctttaccagcgagagctaccagcagggcgtgctgagcgccaccatcctgtacgagatcctgctgggcaaggccaccctgtacgccgtgctggtgtctgccctggtgctgatggctatggtcaagcggaaggacagccggggaagggccaagcgatctggatctggagcaacaaacttctcactactcaaacaagcaggtgacgtggaggagaatcccgggcctactagaggccatatgaccgagtacaagcccacggtgcgcctcgccacccgcgacgacgtccccagggccgtacgcaccctcgccgccgcgttcgccgactaccccgccacgcgccacaccgtcgatccggaccgccacatcgagcgggtcaccgagctgcaagaactcttcctcacgcgcgtcgggctcgacatcggcaaggtgtgggtcgcggacgacggcgccgcggtggcggtctggaccacgccggagagcgtcgaagcgggggcggtgttcgccgagatcggcccgcgcatggccgagttgagcggttcccggctggccgcgcagcaacagatggaaggcctcctggcgccgcaccggcccaaggagcccgcgtggttcctggccaccgtcggcgtctcgcccgaccaccagggcaagggtctgggcagcgccgtcgtgctccccggagtggaggcggccgagcgcgccggggtgcccgccttcctggagacctccgcgccccgcaacctccccttctacgagcggctcggcttcaccgtcaccgccgacgtcgaggtgcccgaaggaccgcgcacctggtgcatgacccgcaagcccggtgcctga

SEQ ID NO: 6346 - DNA, 1722 bp, Artificial Sequence
  Synthetic Polynucloetide
atggccttaccagtgaccgccttgctcctgccgctggccttgctgctccacgccgccaggccggaggttcagctgcttgagtctggcggaggactggttcaacctggcggaagcctgagactgtcttgtgccgccagcggcttcacctttagcagctacgccatgagctgggtccgacaggctcctggcaaaggactggaatgggtgtccagcatcagcggcagcggcgactacatctactacgccgatagcgtgaagggcagattcaccatcagccgggacatcagcaagaacaccctgtacctccagatgaacagcctgagagccgaggacaccgccgtgtactactgtgccaaagaaggcaccggcgctaacagcagcctggccgattatagaggccagggcacactggtcaccgtgtctagtggcggaggaagcggcggaggatctgaagtgcaggttttggagtctggcggaggactggttcagcctggcggatctctgagactgtcttgtgccgccagcggcttcaccttcagcaactttgccatgagctgggtccgacaggcccctggcaaaggacttgaatgggtgtccacaatcagcggcagcgccggcacaacagattacgccgattctgtgaagggcagattcaccatcagccgggacaacagcaagaaaaccctgtacctccagatgaacagcctgcgcgtggaagataccgccgtgtactactgtgccgatggcagaggccccttcttcgattatcgcggccagggcacactggtcaccgtttcttctggtaccggcggaggcggatctggcggcggaggtagcggtggcggaggatctgaattcgacatccagatgacacagagccctagcagcctgtctgccagcgtgggagacagagtgaccatcacatgcaaggccagcgaccacatcaacaactggctggcctggtatcagcagaagcctggacaggcccctaagctgctgatctacggcgctaccacactggaaacaggcgtgcccagcagattttctggcagcggctctggcaccgactacaccctgacaatatccagcctccagcctgaggacttcgccacctactactgtcagcagagctggaacaccccttggacattcggccagggcaccaagctggaaatcaagagactcgaggacctgaagaacgtgttcccacctgaggtggccgtgttcgagcctagcgaggccgagatcagccacacccagaaagccaccctcgtgtgcctggctaccggcttctaccccgaccatgtggaactgtcttggtgggtcaacggcaaagaggtgcacagcggcgtgtctaccgacccccagccactgaaagaacagcccgccctgaacgacagccggtactgcctgagcagcagactgagagtgtccgccaccttctggcagaacccccggaaccacttcagatgccaggtgcagttctacggcctgagcgagaacgacgagtggacccaggacagagccaagcccgtgacccagatcgtgtctgccgaagcctggggcagagccgattgcggctttaccagcgagagctaccagcagggcgtgctgagcgccaccatcctgtacgagatcctgctgggcaaggccaccctgtacgccgtgctggtgtctgccctggtgctgatggctatggtcaagcggaaggacagccgggga

SEQ ID NO: 6347 - DNA, 2469 bp, Artificial Sequence
  Synthetic Polynucloetide
atggccttaccagtgaccgccttgctcctgccgctggccttgctgctccacgccgccaggccggaggttcagctgcttgagtctggcggaggactggttcaacctggcggaagcctgagactgtcttgtgccgccagcggcttcacctttagcagctacgccatgagctgggtccgacaggctcctggcaaaggactggaatgggtgtccagcatcagcggcagcggcgactacatctactacgccgatagcgtgaagggcagattcaccatcagccgggacatcagcaagaacaccctgtacctccagatgaacagcctgagagccgaggacaccgccgtgtactactgtgccaaagaaggcaccggcgctaacagcagcctggccgattatagaggccagggcacactggtcaccgtgtctagtggcggaggaagcggcggaggatctgaagtgcaggttttggagtctggcggaggactggttcagcctggcggatctctgagactgtcttgtgccgccagcggcttcaccttcagcaactttgccatgagctgggtccgacaggcccctggcaaaggacttgaatgggtgtccacaatcagcggcagcgccggcacaacagattacgccgattctgtgaagggcagattcaccatcagccgggacaacagcaagaaaaccctgtacctccagatgaacagcctgcgcgtggaagataccgccgtgtactactgtgccgatggcagaggccccttcttcgattatcgcggccagggcacactggtcaccgtttcttctggtaccggcggaggcggatctggcggcggaggtagcggtggcggaggatctgaattcgacatccagatgacacagagccctagcagcctgtctgccagcgtgggagacagagtgaccatcacatgcaaggccagcgaccacatcaacaactggctggcctggtatcagcagaagcctggacaggcccctaagctgctgatctacggcgctaccacactggaaacaggcgtgcccagcagattttctggcagcggctctggcaccgactacaccctgacaatatccagcctccagcctgaggacttcgccacctactactgtcagcagagctggaacaccccttggacattcggccagggcaccaagctggaaatcaagagactcgaggggaaaccaattcccaaccctcttctgggactggattcaaccggcagcggcgaggacctgaagaacgtgttcccacctgaggtggccgtgttcgagcctagcgaggccgagatcagccacacccagaaagccaccctcgtgtgcctggctaccggcttctaccccgaccatgtggaactgtcttggtgggtcaacggcaaagaggtgcacagcggcgtgtgtaccgacccccagccactgaaagaacagcccgccctgaacgacagccggtactgcctgagcagcagactgagagtgtccgccaccttctggcagaacccccggaaccacttcagatgccaggtgcagttctacggcctgagcgagaacgacgagtggacccaggacagagccaagcccgtgacccagatcgtgtctgccgaagcctggggcagagccgattgcggctttaccagcgagagctaccagcagggcgtgctgagcgccaccatcctgtacgagatcctgctgggcaaggccaccctgtacgccgtgctggtgtctgccctggtgctgatggctatggtcaagcggaaggacagccggggaagggccaagcgatctggatctggagcaacaaacttctcactactcaaacaagcaggtgacgtggaggagaatcccgggcctactagaggccatatgaccgagtacaagcccacggtgcgcctcgccacccgcgacgacgtccccagggccgtacgcaccctcgccgccgcgttcgccgactaccccgccacgcgccacaccgtcgatccggaccgccacatcgagcgggtcaccgagctgcaagaactcttcctcacgcgcgtcgggctcgacatcggcaaggtgtgggtcgcggacgacggcgccgcggtggcggtctggaccacgccggagagcgtcgaagcgggggcggtgttcgccgagatcggcccgcgcatggccgagttgagcggttcccggctggccgcgcagcaacagatggaaggcctcctggcgccgcaccggcccaaggagcccgcgtggttcctggccaccgtcggcgtctcgcccgaccaccagggcaagggtctgggcagcgccgtcgtgctccccggagtggaggcggccgagcgcgccggggtgcccgccttcctggagacctccgcgccccgcaacctccccttctacgagcggctcggcttcaccgtcaccgccgacgtcgaggtgcccgaaggaccgcgcacctggtgcatgacccgcaagcccggtgcctga

SEQ ID NO: 6348 - DNA, 1779 bp, Artificial Sequence
  Synthetic Polynucloetide
atggccttaccagtgaccgccttgctcctgccgctggccttgctgctccacgccgccaggccggaggttcagctgcttgagtctggcggaggactggttcaacctggcggaagcctgagactgtcttgtgccgccagcggcttcacctttagcagctacgccatgagctgggtccgacaggctcctggcaaaggactggaatgggtgtccagcatcagcggcagcggcgactacatctactacgccgatagcgtgaagggcagattcaccatcagccgggacatcagcaagaacaccctgtacctccagatgaacagcctgagagccgaggacaccgccgtgtactactgtgccaaagaaggcaccggcgctaacagcagcctggccgattatagaggccagggcacactggtcaccgtgtctagtggcggaggaagcggcggaggatctgaagtgcaggttttggagtctggcggaggactggttcagcctggcggatctctgagactgtcttgtgccgccagcggcttcaccttcagcaactttgccatgagctgggtccgacaggcccctggcaaaggacttgaatgggtgtccacaatcagcggcagcgccggcacaacagattacgccgattctgtgaagggcagattcaccatcagccgggacaacagcaagaaaaccctgtacctccagatgaacagcctgcgcgtggaagataccgccgtgtactactgtgccgatggcagaggccccttcttcgattatcgcggccagggcacactggtcaccgtttcttctggtaccggcggaggcggatctggcggcggaggtagcggtggcggaggatctgaattcgacatccagatgacacagagccctagcagcctgtctgccagcgtgggagacagagtgaccatcacatgcaaggccagcgaccacatcaacaactggctggcctggtatcagcagaagcctggacaggcccctaagctgctgatctacggcgctaccacactggaaacaggcgtgcccagcagattttctggcagcggctctggcaccgactacaccctgacaatatccagcctccagcctgaggacttcgccacctactactgtcagcagagctggaacaccccttggacattcggccagggcaccaagctggaaatcaagagactcgaggggaaaccaattcccaaccctcttctgggactggattcaaccggcagcggcgaggacctgaagaacgtgttcccacctgaggtggccgtgttcgagcctagcgaggccgagatcagccacacccagaaagccaccctcgtgtgcctggctaccggcttctaccccgaccatgtggaactgtcttggtgggtcaacggcaaagaggtgcacagcggcgtgtgtaccgacccccagccactgaaagaacagcccgccctgaacgacagccggtactgcctgagcagcagactgagagtgtccgccaccttctggcagaacccccggaaccacttcagatgccaggtgcagttctacggcctgagcgagaacgacgagtggacccaggacagagccaagcccgtgacccagatcgtgtctgccgaagcctggggcagagccgattgcggctttaccagcgagagctaccagcagggcgtgctgagcgccaccatcctgtacgagatcctgctgggcaaggccaccctgtacgccgtgctggtgtctgccctggtgctgatggctatggtcaagcggaaggacagccggggatga

SEQ ID NO: 6349 - DNA, 2727 bp, Artificial Sequence
  Synthetic Polynucloetide
atggccttaccagtgaccgccttgctcctgccgctggccttgctgctccacgccgccaggccggaggttcagctgcttgagtctggcggaggactggttcaacctggcggaagcctgagactgtcttgtgccgccagcggcttcacctttagcagctacgccatgagctgggtccgacaggctcctggcaaaggactggaatgggtgtccagcatcagcggcagcggcgactacatctactacgccgatagcgtgaagggcagattcaccatcagccgggacatcagcaagaacaccctgtacctccagatgaacagcctgagagccgaggacaccgccgtgtactactgtgccaaagaaggcaccggcgctaacagcagcctggccgattatagaggccagggcacactggtcaccgtgtctagtggcggaggaagcggcggaggatctgaagtgcaggttttggagtctggcggaggactggttcagcctggcggatctctgagactgtcttgtgccgccagcggcttcaccttcagcaactttgccatgagctgggtccgacaggcccctggcaaaggacttgaatgggtgtccacaatcagcggcagcgccggcacaacagattacgccgattctgtgaagggcagattcaccatcagccgggacaacagcaagaaaaccctgtacctccagatgaacagcctgcgcgtggaagataccgccgtgtactactgtgccgatggcagaggccccttcttcgattatcgcggccagggcacactggtcaccgtttcttctggtaccggcggaggcggatctggcggcggaggtagcggtggcggaggatctgaattcgacatccagatgacacagagccctagcagcctgtctgccagcgtgggagacagagtgaccatcacatgcaaggccagcgaccacatcaacaactggctggcctggtatcagcagaagcctggacaggcccctaagctgctgatctacggcgctaccacactggaaacaggcgtgcccagcagattttctggcagcggctctggcaccgactacaccctgacaatatccagcctccagcctgaggacttcgccacctactactgtcagcagagctggaacaccccttggacattcggccagggcaccaagctggaaatcaagagaggcggaggcggaagtggaggcggaggatctggcggcggaggctctcaagttcagcttcaacagcctggcgctgagctggtcaaacctggcgcttctgtgaagatgagctgcaaagccagcggctacgccttcagcagctactggatcaactggatgaagcagaaacccggccagggactcgaatggatcggccaaatctatcccggcgacggcgacaccaactacaacggcaagttcaagggcagagccacactgaccgccgatacctctagcagcacagcctacatgcagctgagcagcctgaccagcgaagatagcgccgtgtacttctgtgcccggtccatcacaacagtcgtgggctgcgctatggactattggggccagggaacaagcgtgaccgtgtctagtacgcgtgggagcggcatccagaaccctgatcctgccgtgtaccagctgcgggatagcaagagcagcgacaagagcgtgtgtctgttcaccgacttcgacagccagaccaacgtgtcccagagcaaggactccgacgtgtacatcaccgataagaccgtgctggacatgcggagcatggacttcaagagcaactccgccgtggcctggtccaacaagtccgatttcgcctgcgccaacgccttcaacaacagcattatccccgaggacacattcttcccaagcagcgacgtgccctgcgacgtgaagctggtggaaaagagcttcgagacagacaccaacctgaacttccagaacctgagcgtgatcggcttcagaatcctgctgctgaaagtggccggctttaacctgctgatgaccctgcggctgtggtccagccgcgccaagagaagcggatctggcgtgaagcagaccctgaatttcgacctgctgaagctggctggcgacgtggaatccaacccaggcccttctagaggccatatgaccgagtacaagcccacggtgcgcctcgccacccgcgacgacgtccccagggccgtacgcaccctcgccgccgcgttcgccgactaccccgccacgcgccacaccgtcgatccggaccgccacatcgagcgggtcaccgagctgcaagaactcttcctcacgcgcgtcgggctcgacatcggcaaggtgtgggtcgcggacgacggcgccgcggtggcggtctggaccacgccggagagcgtcgaagcgggggcggtgttcgccgagatcggcccgcgcatggccgagttgagcggttcccggctggccgcgcagcaacagatggaaggcctcctggcgccgcaccggcccaaggagcccgcgtggttcctggccaccgtcggcgtctcgcccgaccaccagggcaagggtctgggcagcgccgtcgtgctccccggagtggaggcggccgagcgcgccggggtgcccgccttcctggagacctccgcgccccgcaacctccccttctacgagcggctcggcttcaccgtcaccgccgacgtcgaggtgcccgaaggaccgcgcacctggtgcatgacccgcaagcccggtgcctga

SEQ ID NO: 6350 - DNA, 2823 bp, Artificial Sequence
  Synthetic Polynucloetide
atggccttaccagtgaccgccttgctcctgccgctggccttgctgctccacgccgccaggccggaggttcagctgcttgagtctggcggaggactggttcaacctggcggaagcctgagactgtcttgtgccgccagcggcttcacctttagcagctacgccatgagctgggtccgacaggctcctggcaaaggactggaatgggtgtccagcatcagcggcagcggcgactacatctactacgccgatagcgtgaagggcagattcaccatcagccgggacatcagcaagaacaccctgtacctccagatgaacagcctgagagccgaggacaccgccgtgtactactgtgccaaagaaggcaccggcgctaacagcagcctggccgattatagaggccagggcacactggtcaccgtgtctagtggcggaggaagcggcggaggatctgaagtgcaggttttggagtctggcggaggactggttcagcctggcggatctctgagactgtcttgtgccgccagcggcttcaccttcagcaactttgccatgagctgggtccgacaggcccctggcaaaggacttgaatgggtgtccacaatcagcggcagcgccggcacaacagattacgccgattctgtgaagggcagattcaccatcagccgggacaacagcaagaaaaccctgtacctccagatgaacagcctgcgcgtggaagataccgccgtgtactactgtgccgatggcagaggccccttcttcgattatcgcggccagggcacactggtcaccgtttcttctggtaccggcggaggcggatctggcggcggaggtagcggtggcggaggatctgaattcgacatccagatgacacagagccctagcagcctgtctgccagcgtgggagacagagtgaccatcacatgcaaggccagcgaccacatcaacaactggctggcctggtatcagcagaagcctggacaggcccctaagctgctgatctacggcgctaccacactggaaacaggcgtgcccagcagattttctggcagcggctctggcaccgactacaccctgacaatatccagcctccagcctgaggacttcgccacctactactgtcagcagagctggaacaccccttggacattcggccagggcaccaagctggaaatcaagagaggcggaggcggaagtggaggcggaggatctggcggcggaggctctcaagttcagcttcaacagcctggcgctgagctggtcaaacctggcgcttctgtgaagatgagctgcaaagccagcggctacgccttcagcagctactggatcaactggatgaagcagaaacccggccagggactcgaatggatcggccaaatctatcccggcgacggcgacaccaactacaacggcaagttcaagggcagagccacactgaccgccgatacctctagcagcacagcctacatgcagctgagcagcctgaccagcgaagatagcgccgtgtacttctgtgcccggtccatcacaacagtcgtgggctgcgctatggactattggggccagggaacaagcgtgaccgtgtctagtctcgaggacctgaagaacgtgttcccacctgaggtggccgtgttcgagcctagcaaggccgagatcgcccacacccagaaagccaccctcgtgtgcctggctaccggcttctaccccgaccatgtggaactgtcttggtgggtcaacggcaaagaggtgcacagcggcgtgtctaccgacccccagccactgaaagaacagcccgccctgaacgacagccggtactgcctgagcagcagactgagagtgtccgccaccttctggcagaacccccggaaccacttcagatgccaggtgcagttctacggcctgagcgagaacgacgagtggacccaggacagagccaagcccgtgacccagatcgtgtctgccgaagcctggggcagagccgattgcggcatcaccagcgccagctaccaccagggcgtgctgagcgccaccatcctgtacgagatcctgctgggcaaggccaccctgtacgccgtgctggtgtctgccctggtgctgatggctatggtcaagcggaaggacagccggggaagggccaagcgatctggatctggagcaacaaacttctcactactcaaacaagcaggtgacgtggaggagaatcccgggcctactagaggccatatgaccgagtacaagcccacggtgcgcctcgccacccgcgacgacgtccccagggccgtacgcaccctcgccgccgcgttcgccgactaccccgccacgcgccacaccgtcgatccggaccgccacatcgagcgggtcaccgagctgcaagaactcttcctcacgcgcgtcgggctcgacatcggcaaggtgtgggtcgcggacgacggcgccgcggtggcggtctggaccacgccggagagcgtcgaagcgggggcggtgttcgccgagatcggcccgcgcatggccgagttgagcggttcccggctggccgcgcagcaacagatggaaggcctcctggcgccgcaccggcccaaggagcccgcgtggttcctggccaccgtcggcgtctcgcccgaccaccagggcaagggtctgggcagcgccgtcgtgctccccggagtggaggcggccgagcgcgccggggtgcccgccttcctggagacctccgcgccccgcaacctccccttctacgagcggctcggcttcaccgtcaccgccgacgtcgaggtgcccgaaggaccgcgcacctggtgcatgacccgcaagcccggtgcctga

SEQ ID NO: 6351 - DNA, 3777 bp, Artificial Sequence
  Synthetic Polynucloetide
atggccttaccagtgaccgccttgctcctgccgctggccttgctgctccacgccgccaggccggaggttcagctgcttgagtctggcggaggactggttcaacctggcggaagcctgagactgtcttgtgccgccagcggcttcacctttagcagctacgccatgagctgggtccgacaggctcctggcaaaggactggaatgggtgtccagcatcagcggcagcggcgactacatctactacgccgatagcgtgaagggcagattcaccatcagccgggacatcagcaagaacaccctgtacctccagatgaacagcctgagagccgaggacaccgccgtgtactactgtgccaaagaaggcaccggcgctaacagcagcctggccgattatagaggccagggcacactggtcaccgtgtctagtggcggaggaagcggcggaggatctgaagtgcaggttttggagtctggcggaggactggttcagcctggcggatctctgagactgtcttgtgccgccagcggcttcaccttcagcaactttgccatgagctgggtccgacaggcccctggcaaaggacttgaatgggtgtccacaatcagcggcagcgccggcacaacagattacgccgattctgtgaagggcagattcaccatcagccgggacaacagcaagaaaaccctgtacctccagatgaacagcctgcgcgtggaagataccgccgtgtactactgtgccgatggcagaggccccttcttcgattatcgcggccagggcacactggtcaccgtttcttctggtaccggcggaggcggatctggcggcggaggtagcggtggcggaggatctgaattcgacatccagatgacacagagccctagcagcctgtctgccagcgtgggagacagagtgaccatcacatgcaaggccagcgaccacatcaacaactggctggcctggtatcagcagaagcctggacaggcccctaagctgctgatctacggcgctaccacactggaaacaggcgtgcccagcagattttctggcagcggctctggcaccgactacaccctgacaatatccagcctccagcctgaggacttcgccacctactactgtcagcagagctggaacaccccttggacattcggccagggcaccaagctggaaatcaagagactcgagatccagaaccctgatcctgccgtgtaccagctgcgggatagcaagagcagcgacaagagcgtgtgtctgttcaccgacttcgacagccagaccaacgtgtcccagagcaaggactccgacgtgtacatcaccgataagtgcgtgctggacatgcggagcatggacttcaagagcaactccgccgtggcctggtccaacaagtccgatttcgcctgcgccaacgccttcaacaacagcattatccccgaggacacattcttcccaagcagcgacgtgccctgcgacgtgaagctggtggaaaagagcttcgagacagacaccaacctgaacttccagaacctgagcgtgatcggcttcagaatcctgctgctgaaagtggccggctttaacctgctgatgaccctgcggctgtggtccagccgcgccaagagaagcggatctggcgtgaagcagaccctgaatttcgacctgctgaagctggctggcgacgtggaatccaacccaggccctactagtatggactggatttggcgcatccttttccttgtcggcgctgctaccggcgcccattccgggcccgaagtgcagctggttgaatctggcggaggactggttcaggctggcggatctctgagactgtcttgtgccgccagcggcagaacctttagcatgggctggtttagacaggcccctggcaaagagagagagttcgtcgccgccatcacatactctggcggcagcccttactacgccgactctgtgaagggcagattcaccatcagccgggacaacgccaagaacaccgtgtacctccagatgaacagcctgaagcctgaggacaccgccgtgtactactgcgccgccaatccaacatacggcagcgactggaacgccgagaattggggccagggaacccaagtgacagtgtctagcggatccggcggcggaggatctggcggaggcggatctgggggcggaggctctttcgaacaagttcagcttcaacagcctggcgctgagctggtcaaacctggcgcttctgtgaagatgagctgcaaagccagcggctacgccttcagcagctactggatcaactggatgaagcagaaacccggccagggactcgaatggatcggccaaatctatcccggcgacggcgacaccaactacaacggcaagttcaagggcagagccacactgaccgccgatacctctagcagcacagcctacatgcagctgagcagcctgaccagcgaagatagcgccgtgtacttctgtgcccggtccatcacaacagtcgtgggctgcgctatggactattggggccagggaacaagcgtgaccgtgtctagtacgcgtgaggacctgaagaacgtgttcccacctgaggtggccgtgttcgagcctagcaaggccgagatcgcccacacccagaaagccaccctcgtgtgcctggctaccggcttctaccccgaccatgtggaactgtcttggtgggtcaacggcaaagaggtgcacagcggcgtgtgtaccgacccccagccactgaaagaacagcccgccctgaacgacagccggtactgcctgagcagcagactgagagtgtccgccaccttctggcagaacccccggaaccacttcagatgccaggtgcagttctacggcctgagcgagaacgacgagtggacccaggacagagccaagcccgtgacccagatcgtgtctgccgaagcctggggcagagccgattgcggcatcaccagcgccagctaccaccagggcgtgctgagcgccaccatcctgtacgagatcctgctgggcaaggccaccctgtacgccgtgctggtgtctgccctggtgctgatggctatggtcaagcggaaggacagccggggaagggccaagcgatctggatctggagcaacaaacttctcactactcaaacaagcaggtgacgtggaggagaatcccgggccttctagaggccatatgaccgagtacaagcccacggtgcgcctcgccacccgcgacgacgtccccagggccgtacgcaccctcgccgccgcgttcgccgactaccccgccacgcgccacaccgtcgatccggaccgccacatcgagcgggtcaccgagctgcaagaactcttcctcacgcgcgtcgggctcgacatcggcaaggtgtgggtcgcggacgacggcgccgcggtggcggtctggaccacgccggagagcgtcgaagcgggggcggtgttcgccgagatcggcccgcgcatggccgagttgagcggttcccggctggccgcgcagcaacagatggaaggcctcctggcgccgcaccggcccaaggagcccgcgtggttcctggccaccgtcggcgtctcgcccgaccaccagggcaagggtctgggcagcgccgtcgtgctccccggagtggaggcggccgagcgcgccggggtgcccgccttcctggagacctccgcgccccgcaacctccccttctacgagcggctcggcttcaccgtcaccgccgacgtcgaggtgcccgaaggaccgcgcacctggtgcatgacccgcaagcccggtgcctga

SEQ ID NO: 6352 - DNA, 3774 bp, Artificial Sequence
  Synthetic Polynucloetide
atggccttaccagtgaccgccttgctcctgccgctggccttgctgctccacgccgccaggccggaggttcagctgcttgagtctggcggaggactggttcaacctggcggaagcctgagactgtcttgtgccgccagcggcttcacctttagcagctacgccatgagctgggtccgacaggctcctggcaaaggactggaatgggtgtccagcatcagcggcagcggcgactacatctactacgccgatagcgtgaagggcagattcaccatcagccgggacatcagcaagaacaccctgtacctccagatgaacagcctgagagccgaggacaccgccgtgtactactgtgccaaagaaggcaccggcgctaacagcagcctggccgattatagaggccagggcacactggtcaccgtgtctagtggcggaggaagcggcggaggatctgaagtgcaggttttggagtctggcggaggactggttcagcctggcggatctctgagactgtcttgtgccgccagcggcttcaccttcagcaactttgccatgagctgggtccgacaggcccctggcaaaggacttgaatgggtgtccacaatcagcggcagcgccggcacaacagattacgccgattctgtgaagggcagattcaccatcagccgggacaacagcaagaaaaccctgtacctccagatgaacagcctgcgcgtggaagataccgccgtgtactactgtgccgatggcagaggccccttcttcgattatcgcggccagggcacactggtcaccgtttcttctggtaccggcggaggcggatctggcggcggaggtagcggtggcggaggatctgaattcgacatccagatgacacagagccctagcagcctgtctgccagcgtgggagacagagtgaccatcacatgcaaggccagcgaccacatcaacaactggctggcctggtatcagcagaagcctggacaggcccctaagctgctgatctacggcgctaccacactggaaacaggcgtgcccagcagattttctggcagcggctctggcaccgactacaccctgacaatatccagcctccagcctgaggacttcgccacctactactgtcagcagagctggaacaccccttggacattcggccagggcaccaagctggaaatcaagagactcgaggacctgaagaacgtgttcccacctgaggtggccgtgttcgagcctagcaaggccgagatcgcccacacccagaaagccaccctcgtgtgcctggctaccggcttctaccccgaccatgtggaactgtcttggtgggtcaacggcaaagaggtgcacagcggcgtgtgtaccgacccccagccactgaaagaacagcccgccctgaacgacagccggtactgcctgagcagcagactgagagtgtccgccaccttctggcagaacccccggaaccacttcagatgccaggtgcagttctacggcctgagcgagaacgacgagtggacccaggacagagccaagcccgtgacccagatcgtgtctgccgaagcctggggcagagccgattgcggcatcaccagcgccagctaccaccagggcgtgctgagcgccaccatcctgtacgagatcctgctgggcaaggccaccctgtacgccgtgctggtgtctgccctggtgctgatggctatggtcaagcggaaggacagccggggaagggccaagcgatctggatctggagcaacaaacttctcactactcaaacaagcaggtgacgtggaggagaatcccgggcctactagtatggactggatttggcgcatccttttccttgtcggcgctgctaccggcgcccattccgggcccgaagtgcagctggttgaatctggcggaggactggttcaggctggcggatctctgagactgtcttgtgccgccagcggcagaacctttagcatgggctggtttagacaggcccctggcaaagagagagagttcgtcgccgccatcacatactctggcggcagcccttactacgccgactctgtgaagggcagattcaccatcagccgggacaacgccaagaacaccgtgtacctccagatgaacagcctgaagcctgaggacaccgccgtgtactactgcgccgccaatccaacatacggcagcgactggaacgccgagaattggggccagggaacccaagtgacagtgtctagcggatccggcggcggaggatctggcggaggcggatctgggggcggaggctctttcgaacaagttcagcttcaacagcctggcgctgagctggtcaaacctggcgcttctgtgaagatgagctgcaaagccagcggctacgccttcagcagctactggatcaactggatgaagcagaaacccggccagggactcgaatggatcggccaaatctatcccggcgacggcgacaccaactacaacggcaagttcaagggcagagccacactgaccgccgatacctctagcagcacagcctacatgcagctgagcagcctgaccagcgaagatagcgccgtgtacttctgtgcccggtccatcacaacagtcgtgggctgcgctatggactattggggccagggaacaagcgtgaccgtgtctagtacgcgtatccagaaccctgatcctgccgtgtaccagctgcgggatagcaagagcagcgacaagagcgtgtgtctgttcaccgacttcgacagccagaccaacgtgtcccagagcaaggactccgacgtgtacatcaccgataagtgcgtgctggacatgcggagcatggacttcaagagcaactccgccgtggcctggtccaacaagtccgatttcgcctgcgccaacgccttcaacaacagcattatccccgaggacacattcttcccaagcagcgacgtgccctgcgacgtgaagctggtggaaaagagcttcgagacagacaccaacctgaacttccagaacctgagcgtgatcggcttcagaatcctgctgctgaaagtggccggctttaacctgctgatgaccctgcggctgtggtccagccgcgccaagagaagcggatctggcgtgaagcagaccctgaatttcgacctgctgaagctggctggcgacgtggaatccaacccaggcccttctagaggccatatgaccgagtacaagcccacggtgcgcctcgccacccgcgacgacgtccccagggccgtacgcaccctcgccgccgcgttcgccgactaccccgccacgcgccacaccgtcgatccggaccgccacatcgagcgggtcaccgagctgcaagaactcttcctcacgcgcgtcgggctcgacatcggcaaggtgtgggtcgcggacgacggcgccgcggtggcggtctggaccacgccggagagcgtcgaagcgggggcggtgttcgccgagatcggcccgcgcatggccgagttgagcggttcccggctggccgcgcagcaacagatggaaggcctcctggcgccgcaccggcccaaggagcccgcgtggttcctggccaccgtcggcgtctcgcccgaccaccagggcaagggtctgggcagcgccgtcgtgctccccggagtggaggcggccgagcgcgccggggtgcccgccttcctggagacctccgcgccccgcaacctccccttctacgagcggctcggcttcaccgtcaccgccgacgtcgaggtgcccgaaggaccgcgcacctggtgcatgacccgcaagcccggtgcctga

SEQ ID NO: 6353 - DNA, 3774 bp, Artificial Sequence
  Synthetic Polynucloetide
atggccttaccagtgaccgccttgctcctgccgctggccttgctgctccacgccgccaggccggaggttcagctgcttgagtctggcggaggactggttcaacctggcggaagcctgagactgtcttgtgccgccagcggcttcacctttagcagctacgccatgagctgggtccgacaggctcctggcaaaggactggaatgggtgtccagcatcagcggcagcggcgactacatctactacgccgatagcgtgaagggcagattcaccatcagccgggacatcagcaagaacaccctgtacctccagatgaacagcctgagagccgaggacaccgccgtgtactactgtgccaaagaaggcaccggcgctaacagcagcctggccgattatagaggccagggcacactggtcaccgtgtctagtggcggaggaagcggcggaggatctgaagtgcaggttttggagtctggcggaggactggttcagcctggcggatctctgagactgtcttgtgccgccagcggcttcaccttcagcaactttgccatgagctgggtccgacaggcccctggcaaaggacttgaatgggtgtccacaatcagcggcagcgccggcacaacagattacgccgattctgtgaagggcagattcaccatcagccgggacaacagcaagaaaaccctgtacctccagatgaacagcctgcgcgtggaagataccgccgtgtactactgtgccgatggcagaggccccttcttcgattatcgcggccagggcacactggtcaccgtttcttctggtaccggcggaggcggatctggcggcggaggtagcggtggcggaggatctgaattcgacatccagatgacacagagccctagcagcctgtctgccagcgtgggagacagagtgaccatcacatgcaaggccagcgaccacatcaacaactggctggcctggtatcagcagaagcctggacaggcccctaagctgctgatctacggcgctaccacactggaaacaggcgtgcccagcagattttctggcagcggctctggcaccgactacaccctgacaatatccagcctccagcctgaggacttcgccacctactactgtcagcagagctggaacaccccttggacattcggccagggcaccaagctggaaatcaagagactcgaggacctgaagaacgtgttcccacctgaggtggccgtgttcgagcctagcgaggccgagatcagccacacccagaaagccaccctcgtgtgcctggctaccggcttctaccccgaccatgtggaactgtcttggtgggtcaacggcaaagaggtgcacagcggcgtgtgtaccgacccccagccactgaaagaacagcccgccctgaacgacagccggtactgcctgagcagcagactgagagtgtccgccaccttctggcagaacccccggaaccacttcagatgccaggtgcagttctacggcctgagcgagaacgacgagtggacccaggacagagccaagcccgtgacccagatcgtgtctgccgaagcctggggcagagccgattgcggctttaccagcgagagctaccagcagggcgtgctgagcgccaccatcctgtacgagatcctgctgggcaaggccaccctgtacgccgtgctggtgtctgccctggtgctgatggctatggtcaagcggaaggacagccggggaagggccaagcgatctggatctggagcaacaaacttctcactactcaaacaagcaggtgacgtggaggagaatcccgggcctactagtatggactggatttggcgcatccttttccttgtcggcgctgctaccggcgcccattccgggcccgaagtgcagctggttgaatctggcggaggactggttcaggctggcggatctctgagactgtcttgtgccgccagcggcagaacctttagcatgggctggtttagacaggcccctggcaaagagagagagttcgtcgccgccatcacatactctggcggcagcccttactacgccgactctgtgaagggcagattcaccatcagccgggacaacgccaagaacaccgtgtacctccagatgaacagcctgaagcctgaggacaccgccgtgtactactgcgccgccaatccaacatacggcagcgactggaacgccgagaattggggccagggaacccaagtgacagtgtctagcggatccggcggcggaggatctggcggaggcggatctgggggcggaggctctttcgaacaagttcagcttcaacagcctggcgctgagctggtcaaacctggcgcttctgtgaagatgagctgcaaagccagcggctacgccttcagcagctactggatcaactggatgaagcagaaacccggccagggactcgaatggatcggccaaatctatcccggcgacggcgacaccaactacaacggcaagttcaagggcagagccacactgaccgccgatacctctagcagcacagcctacatgcagctgagcagcctgaccagcgaagatagcgccgtgtacttctgtgcccggtccatcacaacagtcgtgggctgcgctatggactattggggccagggaacaagcgtgaccgtgtctagtacgcgtatccagaaccctgatcctgccgtgtaccagctgcgggatagcaagagcagcgacaagagcgtgtgtctgttcaccgacttcgacagccagaccaacgtgtcccagagcaaggactccgacgtgtacatcaccgataagtgcgtgctggacatgcggagcatggacttcaagagcaactccgccgtggcctggtccaacaagtccgatttcgcctgcgccaacgccttcaacaacagcattatccccgaggacacattcttcccaagccccgagagcagctgcgacgtgaagctggtggaaaagagcttcgagacagacaccaacctgaacttccagaacctgagcgtgatcggcttcagaatcctgctgctgaaagtggccggctttaacctgctgatgaccctgcggctgtggtccagccgcgccaagagaagcggatctggcgtgaagcagaccctgaatttcgacctgctgaagctggctggcgacgtggaatccaacccaggcccttctagaggccatatgaccgagtacaagcccacggtgcgcctcgccacccgcgacgacgtccccagggccgtacgcaccctcgccgccgcgttcgccgactaccccgccacgcgccacaccgtcgatccggaccgccacatcgagcgggtcaccgagctgcaagaactcttcctcacgcgcgtcgggctcgacatcggcaaggtgtgggtcgcggacgacggcgccgcggtggcggtctggaccacgccggagagcgtcgaagcgggggcggtgttcgccgagatcggcccgcgcatggccgagttgagcggttcccggctggccgcgcagcaacagatggaaggcctcctggcgccgcaccggcccaaggagcccgcgtggttcctggccaccgtcggcgtctcgcccgaccaccagggcaagggtctgggcagcgccgtcgtgctccccggagtggaggcggccgagcgcgccggggtgcccgccttcctggagacctccgcgccccgcaacctccccttctacgagcggctcggcttcaccgtcaccgccgacgtcgaggtgcccgaaggaccgcgcacctggtgcatgacccgcaagcccggtgcctga

SEQ ID NO: 6354 - DNA, 3072 bp, Artificial Sequence
  Synthetic Polynucloetide
atggccttaccagtgaccgccttgctcctgccgctggccttgctgctccacgccgccaggccggaggttcagctgcttgagtctggcggaggactggttcaacctggcggaagcctgagactgtcttgtgccgccagcggcttcacctttagcagctacgccatgagctgggtccgacaggctcctggcaaaggactggaatgggtgtccagcatcagcggcagcggcgactacatctactacgccgatagcgtgaagggcagattcaccatcagccgggacatcagcaagaacaccctgtacctccagatgaacagcctgagagccgaggacaccgccgtgtactactgtgccaaagaaggcaccggcgctaacagcagcctggccgattatagaggccagggcacactggtcaccgtgtctagtggcggaggaagcggcggaggatctgaagtgcaggttttggagtctggcggaggactggttcagcctggcggatctctgagactgtcttgtgccgccagcggcttcaccttcagcaactttgccatgagctgggtccgacaggcccctggcaaaggacttgaatgggtgtccacaatcagcggcagcgccggcacaacagattacgccgattctgtgaagggcagattcaccatcagccgggacaacagcaagaaaaccctgtacctccagatgaacagcctgcgcgtggaagataccgccgtgtactactgtgccgatggcagaggccccttcttcgattatcgcggccagggcacactggtcaccgtttcttctggtaccggcggaggcggatctggcggcggaggtagcggtggcggaggatctgaattcgacatccagatgacacagagccctagcagcctgtctgccagcgtgggagacagagtgaccatcacatgcaaggccagcgaccacatcaacaactggctggcctggtatcagcagaagcctggacaggcccctaagctgctgatctacggcgctaccacactggaaacaggcgtgcccagcagattttctggcagcggctctggcaccgactacaccctgacaatatccagcctccagcctgaggacttcgccacctactactgtcagcagagctggaacaccccttggacattcggccagggcaccaagctggaaatcaagagactcgaggacctgaagaacgtgttcccacctgaggtggccgtgttcgagcctagcgaggccgagatcagccacacccagaaagccaccctcgtgtgcctggctaccggcttctaccccgaccatgtggaactgtcttggtgggtcaacggcaaagaggtgcacagcggcgtgtgtaccgacccccagccactgaaagaacagcccgccctgaacgacagccggtactgcctgagcagcagactgagagtgtccgccaccttctggcagaacccccggaaccacttcagatgccaggtgcagttctacggcctgagcgagaacgacgagtggacccaggacagagccaagcccgtgacccagatcgtgtctgccgaagcctggggcagagccgattgcggctttaccagcgagagctaccagcagggcgtgctgagcgccaccatcctgtacgagatcctgctgggcaaggccaccctgtacgccgtgctggtgtctgccctggtgctgatggctatggtcaagcggaaggacagccggggaagggccaagcgatctggatctggagcaacaaacttctcactactcaaacaagcaggtgacgtggaggagaatcccgggcctactagtatggactggatttggcgcatccttttccttgtcggcgctgctaccggcgcccattccgggcccgaagtgcagctggttgaatctggcggaggactggttcaggctggcggatctctgagactgtcttgtgccgccagcggcagaacctttagcatgggctggtttagacaggcccctggcaaagagagagagttcgtcgccgccatcacatactctggcggcagcccttactacgccgactctgtgaagggcagattcaccatcagccgggacaacgccaagaacaccgtgtacctccagatgaacagcctgaagcctgaggacaccgccgtgtactactgcgccgccaatccaacatacggcagcgactggaacgccgagaattggggccagggaacccaagtgacagtgtctagcggatccggcggcggaggatctggcggaggcggatctgggggcggaggctctttcgaacaagttcagcttcaacagcctggcgctgagctggtcaaacctggcgcttctgtgaagatgagctgcaaagccagcggctacgccttcagcagctactggatcaactggatgaagcagaaacccggccagggactcgaatggatcggccaaatctatcccggcgacggcgacaccaactacaacggcaagttcaagggcagagccacactgaccgccgatacctctagcagcacagcctacatgcagctgagcagcctgaccagcgaagatagcgccgtgtacttctgtgcccggtccatcacaacagtcgtgggctgcgctatggactattggggccagggaacaagcgtgaccgtgtctagtacgcgtatccagaaccctgatcctgccgtgtaccagctgcgggatagcaagagcagcgacaagagcgtgtgtctgttcaccgacttcgacagccagaccaacgtgtcccagagcaaggactccgacgtgtacatcaccgataagtgcgtgctggacatgcggagcatggacttcaagagcaactccgccgtggcctggtccaacaagtccgatttcgcctgcgccaacgccttcaacaacagcattatccccgaggacacattcttcccaagccccgagagcagctgcgacgtgaagctggtggaaaagagcttcgagacagacaccaacctgaacttccagaacctgagcgtgatcggcttcagaatcctgctgctgaaagtggccggctttaacctgctgatgaccctgcggctgtggtccagc

SEQ ID NO: 6355 - DNA, 3747 bp, Artificial Sequence
  Synthetic Polynucloetide
atggccttaccagtgaccgccttgctcctgccgctggccttgctgctccacgccgccaggccggaggttcagctgcttgagtctggcggaggactggttcaacctggcggaagcctgagactgtcttgtgccgccagcggcttcacctttagcagctacgccatgagctgggtccgacaggctcctggcaaaggactggaatgggtgtccagcatcagcggcagcggcgactacatctactacgccgatagcgtgaagggcagattcaccatcagccgggacatcagcaagaacaccctgtacctccagatgaacagcctgagagccgaggacaccgccgtgtactactgtgccaaagaaggcaccggcgctaacagcagcctggccgattatagaggccagggcacactggtcaccgtgtctagtggcggaggaagcggcggaggatctgaagtgcaggttttggagtctggcggaggactggttcagcctggcggatctctgagactgtcttgtgccgccagcggcttcaccttcagcaactttgccatgagctgggtccgacaggcccctggcaaaggacttgaatgggtgtccacaatcagcggcagcgccggcacaacagattacgccgattctgtgaagggcagattcaccatcagccgggacaacagcaagaaaaccctgtacctccagatgaacagcctgcgcgtggaagataccgccgtgtactactgtgccgatggcagaggccccttcttcgattatcgcggccagggcacactggtcaccgtttcttctggtaccggcggaggcggatctggcggcggaggtagcggtggcggaggatctgaattcgacatccagatgacacagagccctagcagcctgtctgccagcgtgggagacagagtgaccatcacatgcaaggccagcgaccacatcaacaactggctggcctggtatcagcagaagcctggacaggcccctaagctgctgatctacggcgctaccacactggaaacaggcgtgcccagcagattttctggcagcggctctggcaccgactacaccctgacaatatccagcctccagcctgaggacttcgccacctactactgtcagcagagctggaacaccccttggacattcggccagggcaccaagctggaaatcaagagactcgaggacctgaagaacgtgttcccacctgaggtggccgtgttcgagcctagcgaggccgagatcagccacacccagaaagccaccctcgtgtgcctggctaccggcttctaccccgaccatgtggaactgtcttggtgggtcaacggcaaagaggtgcacagcggcgtgtgtaccgacccccagccactgaaagaacagcccgccctgaacgacagccggtactgcctgagcagcagactgagagtgtccgccaccttctggcagaacccccggaaccacttcagatgccaggtgcagttctacggcctgagcgagaacgacgagtggacccaggacagagccaagcccgtgacccagatcgtgtctgccgaagcctggggcagagccgattgcggctttaccagcgagagctaccagcagggcgtgctgagcgccaccatcctgtacgagatcctgctgggcaaggccaccctgtacgccgtgctggtgtctgccctggtgctgatggctatggtcaagcggaaggacagccggggaagggccaagcgatctggatctggagcaacaaacttctcactactcaaacaagcaggtgacgtggaggagaatcccgggcctactagtatggactggatttggcgcatccttttccttgtcggcgctgctaccggcgcccattccgggcccgaagtgcagctggttgaatctggcggaggactggttcaggctggcggatctctgagactgtcttgtgccgccagcggcagaacctttagcatgggctggtttagacaggcccctggcaaagagagagagttcgtcgccgccatcacatactctggcggcagcccttactacgccgactctgtgaagggcagattcaccatcagccgggacaacgccaagaacaccgtgtacctccagatgaacagcctgaagcctgaggacaccgccgtgtactactgcgccgccaatccaacatacggcagcgactggaacgccgagaattggggccagggaacccaagtgacagtgtctagcggatccggcggcggaggatctggcggaggcggatctgggggcggaggctctttcgaacaagttcagcttcaacagcctggcgctgagctggtcaaacctggcgcttctgtgaagatgagctgcaaagccagcggctacgccttcagcagctactggatcaactggatgaagcagaaacccggccagggactcgaatggatcggccaaatctatcccggcgacggcgacaccaactacaacggcaagttcaagggcagagccacactgaccgccgatacctctagcagcacagcctacatgcagctgagcagcctgaccagcgaagatagcgccgtgtacttctgtgcccggtccatcacaacagtcgtgggctgcgctatggactattggggccagggaacaagcgtgaccgtgtctagtacgcgtatccagaaccctgatcctgccgtgtaccagctgcgggatagcaagagcagcgacaagagcgtgtgtctgttcaccgacttcgacagccagaccaacgtgtcccagagcaaggactccgacgtgtacatcaccgataagtgcgtgctggacatgcggagcatggacttcaagagcaactccgccgtggcctggtccaacaagtccgatttcgcctgcgccaacgccttcaacaacagcattatccccgaggacacattcttcccaagccccgagagcagctgcgacgtgaagctggtggaaaagagcttcgagacagacaccaacctgaacttccagaacctgagcgtgatcggcttcagaatcctgctgctgaaagtggccggctttaacctgctgatgaccctgcggctgtggtccagccgcgccaagagaagcggatctggcgtgaagcagaccctgaatttcgacctgctgaagctggctggcgacgtggaatccaacccaggcccttctagaggcgggatccacaccatggctacctacgaggtgctgtgcgaggtggcaagaaagctgggcaccgacgacagagaagtggtgctgttcctgctgaacgtgttcatccctcagcctacactggcccagctgatcggtgcactgagagccctgaaagaggaaggccggctgacctttcctctgctggccgaatgcctgttcagagccggaagaagggatctgctgcgggacctgctgcatctggaccccagatttctggaaagacacctggccggcaccatgagctacttcagcccttaccagctgaccgtgctgcacgttgacggcgaactgtgcgccagagatattcggagcctgatcttcctgagcaaggacaccatcggcagccggtctacccctcagacatttctgcactgggtgtactgcatggaaaacctggacctgctcggccccacagatgtggatgccctgatgtccatgctgagaagcctgagcagagtggacctccagagacaggtgcagacactgatgggactgcacctgagcggacctagccacagccagcactacagacacacccct

SEQ ID NO: 6356 - DNA, 3084 bp, Artificial Sequence
  Synthetic Polynucloetide
atggccttaccagtgaccgccttgctcctgccgctggccttgctgctccacgccgccaggccggaggttcagctgcttgagtctggcggaggactggttcaacctggcggaagcctgagactgtcttgtgccgccagcggcttcacctttagcagctacgccatgagctgggtccgacaggctcctggcaaaggactggaatgggtgtccagcatcagcggcagcggcgactacatctactacgccgatagcgtgaagggcagattcaccatcagccgggacatcagcaagaacaccctgtacctccagatgaacagcctgagagccgaggacaccgccgtgtactactgtgccaaagaaggcaccggcgctaacagcagcctggccgattatagaggccagggcacactggtcaccgtgtctagtggcggaggaagcggcggaggatctgaagtgcaggttttggagtctggcggaggactggttcagcctggcggatctctgagactgtcttgtgccgccagcggcttcaccttcagcaactttgccatgagctgggtccgacaggcccctggcaaaggacttgaatgggtgtccacaatcagcggcagcgccggcacaacagattacgccgattctgtgaagggcagattcaccatcagccgggacaacagcaagaaaaccctgtacctccagatgaacagcctgcgcgtggaagataccgccgtgtactactgtgccgatggcagaggccccttcttcgattatcgcggccagggcacactggtcaccgtttcttctggtaccggcggaggcggatctggcggcggaggtagcggtggcggaggatctgaattcgacatccagatgacacagagccctagcagcctgtctgccagcgtgggagacagagtgaccatcacatgcaaggccagcgaccacatcaacaactggctggcctggtatcagcagaagcctggacaggcccctaagctgctgatctacggcgctaccacactggaaacaggcgtgcccagcagattttctggcagcggctctggcaccgactacaccctgacaatatccagcctccagcctgaggacttcgccacctactactgtcagcagagctggaacaccccttggacattcggccagggcaccaagctggaaatcaagagactcgagatccagaaccctgatcctgccgtgtaccagctgcgggatagcaagagcagcgacaagagcgtgtgtctgttcaccgacttcgacagccagaccaacgtgtcccagagcaaggactccgacgtgtacatcaccgataagtgcgtgctggacatgcggagcatggacttcaagagcaactccgccgtggcctggtccaacaagtccgatttcgcctgcgccaacgccttcaacaacagcattatccccgaggacacattcttcccaagccccgagagcagctgcgacgtgaagctggtggaaaagagcttcgagacagacaccaacctgaacttccagaacctgagcgtgatcggcttcagaatcctgctgctgaaagtggccggctttaacctgctgatgaccctgcggctgtggtccagccgcgccaagagaagcggatctggcgtgaagcagaccctgaatttcgacctgctgaagctggctggcgacgtggaatccaacccaggccctactagtatggactggatttggcgcatccttttccttgtcggcgctgctaccggcgcccattccgggcccgaagtgcagctggttgaatctggcggaggactggttcaggctggcggatctctgagactgtcttgtgccgccagcggcagaacctttagcatgggctggtttagacaggcccctggcaaagagagagagttcgtcgccgccatcacatactctggcggcagcccttactacgccgactctgtgaagggcagattcaccatcagccgggacaacgccaagaacaccgtgtacctccagatgaacagcctgaagcctgaggacaccgccgtgtactactgcgccgccaatccaacatacggcagcgactggaacgccgagaattggggccagggaacccaagtgacagtgtctagcggatccggcggcggaggatctggcggaggcggatctgggggcggaggctctttcgaacaagttcagcttcaacagcctggcgctgagctggtcaaacctggcgcttctgtgaagatgagctgcaaagccagcggctacgccttcagcagctactggatcaactggatgaagcagaaacccggccagggactcgaatggatcggccaaatctatcccggcgacggcgacaccaactacaacggcaagttcaagggcagagccacactgaccgccgatacctctagcagcacagcctacatgcagctgagcagcctgaccagcgaagatagcgccgtgtacttctgtgcccggtccatcacaacagtcgtgggctgcgctatggactattggggccagggaacaagcgtgaccgtgtctagtacgcgtgaggacctgaagaacgtgttcccacctgaggtggccgtgttcgagcctagcgaggccgagatcagccacacccagaaagccaccctcgtgtgcctggctaccggcttctaccccgaccatgtggaactgtcttggtgggtcaacggcaaagaggtgcacagcggcgtgtgtaccgacccccagccactgaaagaacagcccgccctgaacgacagccggtactgcctgagcagcagactgagagtgtccgccaccttctggcagaacccccggaaccacttcagatgccaggtgcagttctacggcctgagcgagaacgacgagtggacccaggacagagccaagcccgtgacccagatcgtgtctgccgaagcctggggcagagccgattgcggctttaccagcgagagctaccagcagggcgtgctgagcgccaccatcctgtacgagatcctgctgggcaaggccaccctgtacgccgtgctggtgtctgccctggtgctgatggctatggtcaagcggaaggacagccgggga

SEQ ID NO: 6357 - DNA, 3750 bp, Artificial Sequence
  Synthetic Polynucloetide
atggccttaccagtgaccgccttgctcctgccgctggccttgctgctccacgccgccaggccggaggttcagctgcttgagtctggcggaggactggttcaacctggcggaagcctgagactgtcttgtgccgccagcggcttcacctttagcagctacgccatgagctgggtccgacaggctcctggcaaaggactggaatgggtgtccagcatcagcggcagcggcgactacatctactacgccgatagcgtgaagggcagattcaccatcagccgggacatcagcaagaacaccctgtacctccagatgaacagcctgagagccgaggacaccgccgtgtactactgtgccaaagaaggcaccggcgctaacagcagcctggccgattatagaggccagggcacactggtcaccgtgtctagtggcggaggaagcggcggaggatctgaagtgcaggttttggagtctggcggaggactggttcagcctggcggatctctgagactgtcttgtgccgccagcggcttcaccttcagcaactttgccatgagctgggtccgacaggcccctggcaaaggacttgaatgggtgtccacaatcagcggcagcgccggcacaacagattacgccgattctgtgaagggcagattcaccatcagccgggacaacagcaagaaaaccctgtacctccagatgaacagcctgcgcgtggaagataccgccgtgtactactgtgccgatggcagaggccccttcttcgattatcgcggccagggcacactggtcaccgtttcttctggtaccggcggaggcggatctggcggcggaggtagcggtggcggaggatctgaattcgacatccagatgacacagagccctagcagcctgtctgccagcgtgggagacagagtgaccatcacatgcaaggccagcgaccacatcaacaactggctggcctggtatcagcagaagcctggacaggcccctaagctgctgatctacggcgctaccacactggaaacaggcgtgcccagcagattttctggcagcggctctggcaccgactacaccctgacaatatccagcctccagcctgaggacttcgccacctactactgtcagcagagctggaacaccccttggacattcggccagggcaccaagctggaaatcaagagactcgagatccagaaccctgatcctgccgtgtaccagctgcgggatagcaagagcagcgacaagagcgtgtgtctgttcaccgacttcgacagccagaccaacgtgtcccagagcaaggactccgacgtgtacatcaccgataagtgcgtgctggacatgcggagcatggacttcaagagcaactccgccgtggcctggtccaacaagtccgatttcgcctgcgccaacgccttcaacaacagcattatccccgaggacacattcttcccaagccccgagagcagctgcgacgtgaagctggtggaaaagagcttcgagacagacaccaacctgaacttccagaacctgagcgtgatcggcttcagaatcctgctgctgaaagtggccggctttaacctgctgatgaccctgcggctgtggtccagccgcgccaagagaagcggatctggcgtgaagcagaccctgaatttcgacctgctgaagctggctggcgacgtggaatccaacccaggccctactagtatggactggatttggcgcatccttttccttgtcggcgctgctaccggcgcccattccgggcccgaagtgcagctggttgaatctggcggaggactggttcaggctggcggatctctgagactgtcttgtgccgccagcggcagaacctttagcatgggctggtttagacaggcccctggcaaagagagagagttcgtcgccgccatcacatactctggcggcagcccttactacgccgactctgtgaagggcagattcaccatcagccgggacaacgccaagaacaccgtgtacctccagatgaacagcctgaagcctgaggacaccgccgtgtactactgcgccgccaatccaacatacggcagcgactggaacgccgagaattggggccagggaacccaagtgacagtgtctagcggatccggcggcggaggatctggcggaggcggatctgggggcggaggctctttcgaacaagttcagcttcaacagcctggcgctgagctggtcaaacctggcgcttctgtgaagatgagctgcaaagccagcggctacgccttcagcagctactggatcaactggatgaagcagaaacccggccagggactcgaatggatcggccaaatctatcccggcgacggcgacaccaactacaacggcaagttcaagggcagagccacactgaccgccgatacctctagcagcacagcctacatgcagctgagcagcctgaccagcgaagatagcgccgtgtacttctgtgcccggtccatcacaacagtcgtgggctgcgctatggactattggggccagggaacaagcgtgaccgtgtctagtacgcgtgaggacctgaagaacgtgttcccacctgaggtggccgtgttcgagcctagcgaggccgagatcagccacacccagaaagccaccctcgtgtgcctggctaccggcttctaccccgaccatgtggaactgtcttggtgggtcaacggcaaagaggtgcacagcggcgtgtgtaccgacccccagccactgaaagaacagcccgccctgaacgacagccggtactgcctgagcagcagactgagagtgtccgccaccttctggcagaacccccggaaccacttcagatgccaggtgcagttctacggcctgagcgagaacgacgagtggacccaggacagagccaagcccgtgacccagatcgtgtctgccgaagcctggggcagagccgattgcggctttaccagcgagagctaccagcagggcgtgctgagcgccaccatcctgtacgagatcctgctgggcaaggccaccctgtacgccgtgctggtgtctgccctggtgctgatggctatggtcaagcggaaggacagccggggaagggccaagcgatctggatctggagcaacaaacttctcactactcaaacaagcaggtgacgtggaggagaatcccgggccttctagaggcgggatccacaccatggctacctacgaggtgctgtgcgaggtggcaagaaagctgggcaccgacgacagagaagtggtgctgttcctgctgaacgtgttcatccctcagcctacactggcccagctgatcggtgcactgagagccctgaaagaggaaggccggctgacctttcctctgctggccgaatgcctgttcagagccggaagaagggatctgctgcgggacctgctgcatctggaccccagatttctggaaagacacctggccggcaccatgagctacttcagcccttaccagctgaccgtgctgcacgttgacggcgaactgtgcgccagagatattcggagcctgatcttcctgagcaaggacaccatcggcagccggtctacccctcagacatttctgcactgggtgtactgcatggaaaacctggacctgctcggccccacagatgtggatgccctgatgtccatgctgagaagcctgagcagagtggacctccagagacaggtgcagacactgatgggactgcacctgagcggacctagccacagccagcactacagacacacccct

SEQ ID NO: 6358 - DNA, 3774 bp, Artificial Sequence
  Synthetic Polynucloetide
atggccttaccagtgaccgccttgctcctgccgctggccttgctgctccacgccgccaggccggaggttcagctgcttgagtctggcggaggactggttcaacctggcggaagcctgagactgtcttgtgccgccagcggcttcacctttagcagctacgccatgagctgggtccgacaggctcctggcaaaggactggaatgggtgtccagcatcagcggcagcggcgactacatctactacgccgatagcgtgaagggcagattcaccatcagccgggacatcagcaagaacaccctgtacctccagatgaacagcctgagagccgaggacaccgccgtgtactactgtgccaaagaaggcaccggcgctaacagcagcctggccgattatagaggccagggcacactggtcaccgtgtctagtggcggaggaagcggcggaggatctgaagtgcaggttttggagtctggcggaggactggttcagcctggcggatctctgagactgtcttgtgccgccagcggcttcaccttcagcaactttgccatgagctgggtccgacaggcccctggcaaaggacttgaatgggtgtccacaatcagcggcagcgccggcacaacagattacgccgattctgtgaagggcagattcaccatcagccgggacaacagcaagaaaaccctgtacctccagatgaacagcctgcgcgtggaagataccgccgtgtactactgtgccgatggcagaggccccttcttcgattatcgcggccagggcacactggtcaccgtttcttctggtaccggcggaggcggatctggcggcggaggtagcggtggcggaggatctgaattcgacatccagatgacacagagccctagcagcctgtctgccagcgtgggagacagagtgaccatcacatgcaaggccagcgaccacatcaacaactggctggcctggtatcagcagaagcctggacaggcccctaagctgctgatctacggcgctaccacactggaaacaggcgtgcccagcagattttctggcagcggctctggcaccgactacaccctgacaatatccagcctccagcctgaggacttcgccacctactactgtcagcagagctggaacaccccttggacattcggccagggcaccaagctggaaatcaagagactcgaggacctgaagaacgtgttcccacctgaggtggccgtgttcgagcctagcgaggccgagatcagccacacccagaaagccaccctcgtgtgcctggctaccggcttctaccccgaccatgtggaactgtcttggtgggtcaacggcaaagaggtgcacagcggcgtgtctaccgacccccagccactgaaagaacagcccgccctgaacgacagccggtactgcctgagcagcagactgagagtgtccgccaccttctggcagaacccccggaaccacttcagatgccaggtgcagttctacggcctgagcgagaacgacgagtggacccaggacagagccaagcccgtgacccagatcgtgtctgccgaagcctggggcagagccgattgcggctttaccagcgagagctaccagcagggcgtgctgagcgccaccatcctgtacgagatcctgctgggcaaggccaccctgtacgccgtgctggtgtctgccctggtgctgatggctatggtcaagcggaaggacagccggggaagggccaagcgatctggatctggagcaacaaacttctcactactcaaacaagcaggtgacgtggaggagaatcccgggcctactagtatggactggatttggcgcatccttttccttgtcggcgctgctaccggcgcccattccgggcccgaagtgcagctggttgaatctggcggaggactggttcaggctggcggatctctgagactgtcttgtgccgccagcggcagaacctttagcatgggctggtttagacaggcccctggcaaagagagagagttcgtcgccgccatcacatactctggcggcagcccttactacgccgactctgtgaagggcagattcaccatcagccgggacaacgccaagaacaccgtgtacctccagatgaacagcctgaagcctgaggacaccgccgtgtactactgcgccgccaatccaacatacggcagcgactggaacgccgagaattggggccagggaacccaagtgacagtgtctagcggatccggcggcggaggatctggcggaggcggatctgggggcggaggctctttcgaacaagttcagcttcaacagcctggcgctgagctggtcaaacctggcgcttctgtgaagatgagctgcaaagccagcggctacgccttcagcagctactggatcaactggatgaagcagaaacccggccagggactcgaatggatcggccaaatctatcccggcgacggcgacaccaactacaacggcaagttcaagggcagagccacactgaccgccgatacctctagcagcacagcctacatgcagctgagcagcctgaccagcgaagatagcgccgtgtacttctgtgcccggtccatcacaacagtcgtgggctgcgctatggactattggggccagggaacaagcgtgaccgtgtctagtacgcgtatccagaaccctgatcctgccgtgtaccagctgcgggatagcaagagcagcgacaagagcgtgtgtctgttcaccgacttcgacagccagaccaacgtgtcccagagcaaggactccgacgtgtacatcaccgataagaccgtgctggacatgcggagcatggacttcaagagcaactccgccgtggcctggtccaacaagtccgatttcgcctgcgccaacgccttcaacaacagcattatccccgaggacacattcttcccaagccccgagagcagctgcgacgtgaagctggtggaaaagagcttcgagacagacaccaacctgaacttccagaacctgagcgtgatcggcttcagaatcctgctgctgaaagtggccggctttaacctgctgatgaccctgcggctgtggtccagccgcgccaagagaagcggatctggcgtgaagcagaccctgaatttcgacctgctgaagctggctggcgacgtggaatccaacccaggcccttctagaggccatatgaccgagtacaagcccacggtgcgcctcgccacccgcgacgacgtccccagggccgtacgcaccctcgccgccgcgttcgccgactaccccgccacgcgccacaccgtcgatccggaccgccacatcgagcgggtcaccgagctgcaagaactcttcctcacgcgcgtcgggctcgacatcggcaaggtgtgggtcgcggacgacggcgccgcggtggcggtctggaccacgccggagagcgtcgaagcgggggcggtgttcgccgagatcggcccgcgcatggccgagttgagcggttcccggctggccgcgcagcaacagatggaaggcctcctggcgccgcaccggcccaaggagcccgcgtggttcctggccaccgtcggcgtctcgcccgaccaccagggcaagggtctgggcagcgccgtcgtgctccccggagtggaggcggccgagcgcgccggggtgcccgccttcctggagacctccgcgccccgcaacctccccttctacgagcggctcggcttcaccgtcaccgccgacgtcgaggtgcccgaaggaccgcgcacctggtgcatgacccgcaagcccggtgcctga

SEQ ID NO: 6359 - DNA, 4020 bp, Artificial Sequence
  Synthetic Polynucloetide
atggccttaccagtgaccgccttgctcctgccgctggccttgctgctccacgccgccaggccggaggttcagctgcttgagtctggcggaggactggttcaacctggcggaagcctgagactgtcttgtgccgccagcggcttcacctttagcagctacgccatgagctgggtccgacaggctcctggcaaaggactggaatgggtgtccagcatcagcggcagcggcgactacatctactacgccgatagcgtgaagggcagattcaccatcagccgggacatcagcaagaacaccctgtacctccagatgaacagcctgagagccgaggacaccgccgtgtactactgtgccaaagaaggcaccggcgctaacagcagcctggccgattatagaggccagggcacactggtcaccgtgtctagtggcggaggaagcggcggaggatctgaagtgcaggttttggagtctggcggaggactggttcagcctggcggatctctgagactgtcttgtgccgccagcggcttcaccttcagcaactttgccatgagctgggtccgacaggcccctggcaaaggacttgaatgggtgtccacaatcagcggcagcgccggcacaacagattacgccgattctgtgaagggcagattcaccatcagccgggacaacagcaagaaaaccctgtacctccagatgaacagcctgcgcgtggaagataccgccgtgtactactgtgccgatggcagaggccccttcttcgattatcgcggccagggcacactggtcaccgtttcttctggtaccggcggaggcggatctggcggcggaggtagcggtggcggaggatctgaattcgacatccagatgacacagagccctagcagcctgtctgccagcgtgggagacagagtgaccatcacatgcaaggccagcgaccacatcaacaactggctggcctggtatcagcagaagcctggacaggcccctaagctgctgatctacggcgctaccacactggaaacaggcgtgcccagcagattttctggcagcggctctggcaccgactacaccctgacaatatccagcctccagcctgaggacttcgccacctactactgtcagcagagctggaacaccccttggacattcggccagggcaccaagctggaaatcaagagactcgaggacctgaagaacgtgttcccacctgaggtggccgtgttcgagcctagcgaggccgagatcagccacacccagaaagccaccctcgtgtgcctggctaccggcttctaccccgaccatgtggaactgtcttggtgggtcaacggcaaagaggtgcacagcggcgtgtctaccgacccccagccactgaaagaacagcccgccctgaacgacagccggtactgcctgagcagcagactgagagtgtccgccaccttctggcagaacccccggaaccacttcagatgccaggtgcagttctacggcctgagcgagaacgacgagtggacccaggacagagccaagcccgtgacccagatcgtgtctgccgaagcctggggcagagccgattgcggctttaccagcgagagctaccagcagggcgtgctgagcgccaccatcctgtacgagatcctgctgggcaaggccaccctgtacgccgtgctggtgtctgccctggtgctgatggctatggtcaagcggaaggacagccggggaagggccaagcgatctggatctggagcaacaaacttctcactactcaaacaagcaggtgacgtggaggagaatcccgggcctactagtatggactggatttggcgcatccttttccttgtcggcgctgctaccggcgcccattccgggcccgaagtgcagctggttgaatctggcggaggactggttcaggctggcggatctctgagactgtcttgtgccgccagcggcagaacctttagcatgggctggtttagacaggcccctggcaaagagagagagttcgtcgccgccatcacatactctggcggcagcccttactacgccgactctgtgaagggcagattcaccatcagccgggacaacgccaagaacaccgtgtacctccagatgaacagcctgaagcctgaggacaccgccgtgtactactgcgccgccaatccaacatacggcagcgactggaacgccgagaattggggccagggaacccaagtgacagtgtctagcggatccggcggcggaggatctggcggaggcggatctgggggcggaggctctttcgaacaagttcagcttcaacagcctggcgctgagctggtcaaacctggcgcttctgtgaagatgagctgcaaagccagcggctacgccttcagcagctactggatcaactggatgaagcagaaacccggccagggactcgaatggatcggccaaatctatcccggcgacggcgacaccaactacaacggcaagttcaagggcagagccacactgaccgccgatacctctagcagcacagcctacatgcagctgagcagcctgaccagcgaagatagcgccgtgtacttctgtgcccggtccatcacaacagtcgtgggctgcgctatggactattggggccagggaacaagcgtgaccgtgtctagtacgcgtgagcagaaactgatctcggaagaggatgggagcggcaccccattcccttctctggcccctcccatcatgctgctggtggacggcaagcagcagatggtggtcgtgtgcctggtgctggatgtggccccacctggactggacagccccatctggtttagcgccggcaatggctctgccctggacgcctttacctacggcccaagccctgccaccgatggcacctggacaaatctggcccacctgagcctgcccagcgaggaactggcttcttgggagcctctcgtgtgccacacaggacctggcgctgagggacacagcagatccacccagcctatgcacctgtctggcgaggccagcaccgccagaacctgtcctcaggaacctctgagaggcacccctggcggagcactgtggctgggagtgctgagactgctgctgttcaagctgctgctgtttgacctgctgctgacctgctcctgtctgtgcgatcctgccggccctctgccttctcctgccaccaccacaagactgagagccctgggcagccacagactgcaccctgccacagagacaggcggcagagaggccacaagcagccctagaccccagcccagagacagaagatggggcgataccccccctggcagaaagcctggatctccagtccgcgccaagagaagcggatctggcgtgaagcagaccctgaatttcgacctgctgaagctggctggcgacgtggaatccaacccaggcccttctagaggccatatgaccgagtacaagcccacggtgcgcctcgccacccgcgacgacgtccccagggccgtacgcaccctcgccgccgcgttcgccgactaccccgccacgcgccacaccgtcgatccggaccgccacatcgagcgggtcaccgagctgcaagaactcttcctcacgcgcgtcgggctcgacatcggcaaggtgtgggtcgcggacgacggcgccgcggtggcggtctggaccacgccggagagcgtcgaagcgggggcggtgttcgccgagatcggcccgcgcatggccgagttgagcggttcccggctggccgcgcagcaacagatggaaggcctcctggcgccgcaccggcccaaggagcccgcgtggttcctggccaccgtcggcgtctcgcccgaccaccagggcaagggtctgggcagcgccgtcgtgctccccggagtggaggcggccgagcgcgccggggtgcccgccttcctggagacctccgcgccccgcaacctccccttctacgagcggctcggcttcaccgtcaccgccgacgtcgaggtgcccgaaggaccgcgcacctggtgcatgacccgcaagcccggtgcctga

SEQ ID NO: 6360 - DNA, 3885 bp, Artificial Sequence
  Synthetic Polynucloetide
atggccttaccagtgaccgccttgctcctgccgctggccttgctgctccacgccgccaggccggaggttcagctgcttgagtctggcggaggactggttcaacctggcggaagcctgagactgtcttgtgccgccagcggcttcacctttagcagctacgccatgagctgggtccgacaggctcctggcaaaggactggaatgggtgtccagcatcagcggcagcggcgactacatctactacgccgatagcgtgaagggcagattcaccatcagccgggacatcagcaagaacaccctgtacctccagatgaacagcctgagagccgaggacaccgccgtgtactactgtgccaaagaaggcaccggcgctaacagcagcctggccgattatagaggccagggcacactggtcaccgtgtctagtggcggaggaagcggcggaggatctgaagtgcaggttttggagtctggcggaggactggttcagcctggcggatctctgagactgtcttgtgccgccagcggcttcaccttcagcaactttgccatgagctgggtccgacaggcccctggcaaaggacttgaatgggtgtccacaatcagcggcagcgccggcacaacagattacgccgattctgtgaagggcagattcaccatcagccgggacaacagcaagaaaaccctgtacctccagatgaacagcctgcgcgtggaagataccgccgtgtactactgtgccgatggcagaggccccttcttcgattatcgcggccagggcacactggtcaccgtttcttctggtaccggcggaggcggatctggcggcggaggtagcggtggcggaggatctgaattcgacatccagatgacacagagccctagcagcctgtctgccagcgtgggagacagagtgaccatcacatgcaaggccagcgaccacatcaacaactggctggcctggtatcagcagaagcctggacaggcccctaagctgctgatctacggcgctaccacactggaaacaggcgtgcccagcagattttctggcagcggctctggcaccgactacaccctgacaatatccagcctccagcctgaggacttcgccacctactactgtcagcagagctggaacaccccttggacattcggccagggcaccaagctggaaatcaagagactcgaggggaaaccaattcccaaccctcttctgggactggattcaaccggcagcggcgacaagcagctggacgccgacgtgtcccccaagcctaccatcttcctgccctctatcgccgagacaaagctccagaaggccggcacctacctgtgcctgctggaaaagttcttcccagatgtgattaagatccactggcaggaaaagaagtccaacaccatcctgggcagccaggaaggcaacaccatgaagaccaacgacacctacatgaagttcagctggctgaccgtgcccgagaagtccctggacaaagaacacagatgcatcgtgcggcacgaaaacaacaagaacggcgtggaccaggaaatcatcttcccacccatcaagaccgatgtgattacaatggaccccaaggacaactgctccaaggacgccaacgataccctgctgctccagctgaccaacaccagcgcctactacatgtacttgttgctgctgctgaagtccgtggtgtacttcgccatcatcacatgctgcctgctgcggagaaccgccttctgctgcaacggcgagaagtctagggccaagcgatctggatctggagcaacaaacttctcactactcaaacaagcaggtgacgtggaggagaatcccgggcctactagtatggactggatttggcgcatccttttccttgtcggcgctgctaccggcgcccattccgggcccgaagtgcagctggttgaatctggcggaggactggttcaggctggcggatctctgagactgtcttgtgccgccagcggcagaacctttagcatgggctggtttagacaggcccctggcaaagagagagagttcgtcgccgccatcacatactctggcggcagcccttactacgccgactctgtgaagggcagattcaccatcagccgggacaacgccaagaacaccgtgtacctccagatgaacagcctgaagcctgaggacaccgccgtgtactactgcgccgccaatccaacatacggcagcgactggaacgccgagaattggggccagggaacccaagtgacagtgtctagcggatccggcggcggaggatctggcggaggcggatctgggggcggaggctctttcgaacaagttcagcttcaacagcctggcgctgagctggtcaaacctggcgcttctgtgaagatgagctgcaaagccagcggctacgccttcagcagctactggatcaactggatgaagcagaaacccggccagggactcgaatggatcggccaaatctatcccggcgacggcgacaccaactacaacggcaagttcaagggcagagccacactgaccgccgatacctctagcagcacagcctacatgcagctgagcagcctgaccagcgaagatagcgccgtgtacttctgtgcccggtccatcacaacagtcgtgggctgcgctatggactattggggccagggaacaagcgtgaccgtgtctagtacgcgtgagcagaaactgatctcggaagaggatgggagcggcagccagcctcacaccaagcccagcgtgttcgtgatgaagaacggcaccaacgtggcctgcctcgtgaaagagttctaccccaaggacatcaggatcaacctggtgtccagcaagaagatcaccgagttcgaccccgccatcgtgatctcccccagcggcaagtacaacgccgtgaagctggggaagtacgaggacagcaacagcgtgacctgctccgtgcagcacgacaacaagaccgtgcacagcaccgactttgaagtgaaaaccgactccaccgaccacgtgaagcccaaagagacagagaacaccaagcagcccagcaagagctgccacaagcccaaggccatcgtgcacaccgagaaagtgaacatgatgagcctgaccgtgctgggcctgcggatgctgttcgccaaaaccgtggccgtgaacttcctgctgaccgccaagctgttcttcctccgcgccaagagaagcggatctggcgtgaagcagaccctgaatttcgacctgctgaagctggctggcgacgtggaatccaacccaggcccttctagaggccatatgaccgagtacaagcccacggtgcgcctcgccacccgcgacgacgtccccagggccgtacgcaccctcgccgccgcgttcgccgactaccccgccacgcgccacaccgtcgatccggaccgccacatcgagcgggtcaccgagctgcaagaactcttcctcacgcgcgtcgggctcgacatcggcaaggtgtgggtcgcggacgacggcgccgcggtggcggtctggaccacgccggagagcgtcgaagcgggggcggtgttcgccgagatcggcccgcgcatggccgagttgagcggttcccggctggccgcgcagcaacagatggaaggcctcctggcgccgcaccggcccaaggagcccgcgtggttcctggccaccgtcggcgtctcgcccgaccaccagggcaagggtctgggcagcgccgtcgtgctccccggagtggaggcggccgagcgcgccggggtgcccgccttcctggagacctccgcgccccgcaacctccccttctacgagcggctcggcttcaccgtcaccgccgacgtcgaggtgcccgaaggaccgcgcacctggtgcatgacccgcaagcccggtgcctga

SEQ ID NO: 6361 - DNA, 3096 bp, Artificial Sequence
  Synthetic Polynucloetide
atggccttaccagtgaccgccttgctcctgccgctggccttgctgctccacgccgccaggccggaggttcagctgcttgagtctggcggaggactggttcaacctggcggaagcctgagactgtcttgtgccgccagcggcttcacctttagcagctacgccatgagctgggtccgacaggctcctggcaaaggactggaatgggtgtccagcatcagcggcagcggcgactacatctactacgccgatagcgtgaagggcagattcaccatcagccgggacatcagcaagaacaccctgtacctccagatgaacagcctgagagccgaggacaccgccgtgtactactgtgccaaagaaggcaccggcgctaacagcagcctggccgattatagaggccagggcacactggtcaccgtgtctagtggcggaggaagcggcggaggatctgaagtgcaggttttggagtctggcggaggactggttcagcctggcggatctctgagactgtcttgtgccgccagcggcttcaccttcagcaactttgccatgagctgggtccgacaggcccctggcaaaggacttgaatgggtgtccacaatcagcggcagcgccggcacaacagattacgccgattctgtgaagggcagattcaccatcagccgggacaacagcaagaaaaccctgtacctccagatgaacagcctgcgcgtggaagataccgccgtgtactactgtgccgatggcagaggccccttcttcgattatcgcggccagggcacactggtcaccgtttcttctggtaccggcggaggcggatctggcggcggaggtagcggtggcggaggatctgaattcgacatccagatgacacagagccctagcagcctgtctgccagcgtgggagacagagtgaccatcacatgcaaggccagcgaccacatcaacaactggctggcctggtatcagcagaagcctggacaggcccctaagctgctgatctacggcgctaccacactggaaacaggcgtgcccagcagattttctggcagcggctctggcaccgactacaccctgacaatatccagcctccagcctgaggacttcgccacctactactgtcagcagagctggaacaccccttggacattcggccagggcaccaagctggaaatcaagagactcgagagccagcctcacaccaagcccagcgtgttcgtgatgaagaacggcaccaacgtggcctgcctcgtgaaagagttctaccccaaggacatcaggatcaacctggtgtccagcaagaagatcaccgagttcgaccccgccatcgtgatctcccccagcggcaagtacaacgccgtgaagctggggaagtacgaggacagcaacagcgtgacctgctccgtgcagcacgacaacaagaccgtgcacagcaccgactttgaagtgaaaaccgactccaccgaccacgtgaagcccaaagagacagagaacaccaagcagcccagcaagagctgccacaagcccaaggccatcgtgcacaccgagaaagtgaacatgatgagcctgaccgtgctgggcctgcggatgctgttcgccaaaaccgtggccgtgaacttcctgctgaccgccaagctgttcttcctcagggccaagcgatctggatctggagcaacaaacttctcactactcaaacaagcaggtgacgtggaggagaatcccgggcctactagtatggactggatttggcgcatccttttccttgtcggcgctgctaccggcgcccattccgggcccgaagtgcagctggttgaatctggcggaggactggttcaggctggcggatctctgagactgtcttgtgccgccagcggcagaacctttagcatgggctggtttagacaggcccctggcaaagagagagagttcgtcgccgccatcacatactctggcggcagcccttactacgccgactctgtgaagggcagattcaccatcagccgggacaacgccaagaacaccgtgtacctccagatgaacagcctgaagcctgaggacaccgccgtgtactactgcgccgccaatccaacatacggcagcgactggaacgccgagaattggggccagggaacccaagtgacagtgtctagcggatccggcggcggaggatctggcggaggcggatctgggggcggaggctctttcgaacaagttcagcttcaacagcctggcgctgagctggtcaaacctggcgcttctgtgaagatgagctgcaaagccagcggctacgccttcagcagctactggatcaactggatgaagcagaaacccggccagggactcgaatggatcggccaaatctatcccggcgacggcgacaccaactacaacggcaagttcaagggcagagccacactgaccgccgatacctctagcagcacagcctacatgcagctgagcagcctgaccagcgaagatagcgccgtgtacttctgtgcccggtccatcacaacagtcgtgggctgcgctatggactattggggccagggaacaagcgtgaccgtgtctagtacgcgtgacaagcagctggacgccgacgtgtcccccaagcctaccatcttcctgccctctatcgccgagacaaagctccagaaggccggcacctacctgtgcctgctggaaaagttcttcccagatgtgattaagatccactggcaggaaaagaagtccaacaccatcctgggcagccaggaaggcaacaccatgaagaccaacgacacctacatgaagttcagctggctgaccgtgcccgagaagtccctggacaaagaacacagatgcatcgtgcggcacgaaaacaacaagaacggcgtggaccaggaaatcatcttcccacccatcaagaccgatgtgattacaatggaccccaaggacaactgctccaaggacgccaacgataccctgctgctccagctgaccaacaccagcgcctactacatgtacttgttgctgctgctgaagtccgtggtgtacttcgccatcatcacatgctgcctgctgcggagaaccgccttctgctgcaacggcgagaagtct

SEQ ID NO: 6362 - DNA, 4305 bp, Artificial Sequence
  Synthetic Polynucloetide
atggccttaccagtgaccgccttgctcctgccgctggccttgctgctccacgccgccaggccggaggttcagctgcttgagtctggcggaggactggttcaacctggcggaagcctgagactgtcttgtgccgccagcggcttcacctttagcagctacgccatgagctgggtccgacaggctcctggcaaaggactggaatgggtgtccagcatcagcggcagcggcgactacatctactacgccgatagcgtgaagggcagattcaccatcagccgggacatcagcaagaacaccctgtacctccagatgaacagcctgagagccgaggacaccgccgtgtactactgtgccaaagaaggcaccggcgctaacagcagcctggccgattatagaggccagggcacactggtcaccgtgtctagtggcggaggaagcggcggaggatctgaagtgcaggttttggagtctggcggaggactggttcagcctggcggatctctgagactgtcttgtgccgccagcggcttcaccttcagcaactttgccatgagctgggtccgacaggcccctggcaaaggacttgaatgggtgtccacaatcagcggcagcgccggcacaacagattacgccgattctgtgaagggcagattcaccatcagccgggacaacagcaagaaaaccctgtacctccagatgaacagcctgcgcgtggaagataccgccgtgtactactgtgccgatggcagaggccccttcttcgattatcgcggccagggcacactggtcaccgtttcttctggtaccggcggaggcggatctggcggcggaggtagcggtggcggaggatctgaattcgacatccagatgacacagagccctagcagcctgtctgccagcgtgggagacagagtgaccatcacatgcaaggccagcgaccacatcaacaactggctggcctggtatcagcagaagcctggacaggcccctaagctgctgatctacggcgctaccacactggaaacaggcgtgcccagcagattttctggcagcggctctggcaccgactacaccctgacaatatccagcctccagcctgaggacttcgccacctactactgtcagcagagctggaacaccccttggacattcggccagggcaccaagctggaaatcaagagaggacagcctaaggccaatcctaccgtgacactgttccctccaagcagcgaagaactccaggccaacaaggccacacttgtgtgcctgatctccgacttctaccctggggctgtgacagtggcttggaaggccgatggatctcctgtgaaagccggcgtggaaaccaccaagccatccaagcagagcaacaacaaatacgccgccagctcctacctgagcctgacacctgagcagtggaagtcccacagatcctacagctgccaagtgacccacgaaggcagcaccgtggaaaagacagtggcccctacagagtgcagcggatcccagagcttcggcctgctggaccccaagctgtgctacctgctggatggcatcctgttcatctacggcgtgatcctgaccgccctgttcctgagagtgaagttcagcagaagcgccgacgcccctgcctaccagcagggacagaaccaactgtacaacgagctgaacctgggcagacgggaagagtacgacgtgctggacaagcggagaggcagggaccctgagatgggcggaaagccccagcggagaaagaacccccaggaaggactgtataacgaactccagaaagacaagatggccgaagcctacagcgagatcggcatgaagggcgagcggagaagaggcaagggccacgatggcctgtaccagggcctgagcaccgccaccaaggacacctatgacgccctgcacatgcaggccctgcctccaagaagggccaagcgatctggatctggagcaacaaacttctcactactcaaacaagcaggtgacgtggaggagaatcccgggcctactagtatggactggatttggcgcatccttttccttgtcggcgctgctaccggcgcccattccgggcccgaagtgcagctggttgaatctggcggaggactggttcaggctggcggatctctgagactgtcttgtgccgccagcggcagaacctttagcatgggctggtttagacaggcccctggcaaagagagagagttcgtcgccgccatcacatactctggcggcagcccttactacgccgactctgtgaagggcagattcaccatcagccgggacaacgccaagaacaccgtgtacctccagatgaacagcctgaagcctgaggacaccgccgtgtactactgcgccgccaatccaacatacggcagcgactggaacgccgagaattggggccagggaacccaagtgacagtgtctagcggatccggcggcggaggatctggcggaggcggatctgggggcggaggctctttcgaacaagttcagcttcaacagcctggcgctgagctggtcaaacctggcgcttctgtgaagatgagctgcaaagccagcggctacgccttcagcagctactggatcaactggatgaagcagaaacccggccagggactcgaatggatcggccaaatctatcccggcgacggcgacaccaactacaacggcaagttcaagggcagagccacactgaccgccgatacctctagcagcacagcctacatgcagctgagcagcctgaccagcgaagatagcgccgtgtacttctgtgcccggtccatcacaacagtcgtgggctgcgctatggactattggggccagggaacaagcgtgaccgtgtctagtgcctctacaaagggaccctccgtgtttcctctggctcccagcagcaagtctacaagcggaggaacagccgctctgggctgcctggtcaaggattactttcccgagcctgtgaccgtgtcctggaatagcggagcactgacaagcggcgtgcacacctttccagccgtgctgcaaagcagcggcctgtactctctgagcagcgtggtcacagtgcctagctctagcctgggcacccagacctacatctgcaatgtgaaccacaagcctagcaacaccaaggtggacaagagagtggaacccaagagctgtggtacccagagttttgggttgttggaccctaaattgtgctatctgttggacggaatcctgttcatttacggagtgatcctgaccgcattgttcctgcgggttaagttttccagatccgcagacgcacccgcttaccaacaagggcagaaccaactctacaatgaacttaatttggggcggagggaagagtacgacgttctggacaaaaggaggggacgagatcccgagatgggcggaaagcctcagcgaaggaagaatccgcaagaggggctttataacgaactccagaaagataaaatggcagaagcctatagtgagattgggatgaagggagaaaggaggaggggtaaaggtcacgatgggttgtaccaaggattgagcacagccactaaagatacctatgatgcgctccacatgcaggccctgccgccaagacgcgccaagagaagcggatctggcgtgaagcagaccctgaatttcgacctgctgaagctggctggcgacgtggaatccaacccaggcccttctagaggccatatgaccgagtacaagcccacggtgcgcctcgccacccgcgacgacgtccccagggccgtacgcaccctcgccgccgcgttcgccgactaccccgccacgcgccacaccgtcgatccggaccgccacatcgagcgggtcaccgagctgcaagaactcttcctcacgcgcgtcgggctcgacatcggcaaggtgtgggtcgcggacgacggcgccgcggtggcggtctggaccacgccggagagcgtcgaagcgggggcggtgttcgccgagatcggcccgcgcatggccgagttgagcggttcccggctggccgcgcagcaacagatggaaggcctcctggcgccgcaccggcccaaggagcccgcgtggttcctggccaccgtcggcgtctcgcccgaccaccagggcaagggtctgggcagcgccgtcgtgctccccggagtggaggcggccgagcgcgccggggtgcccgccttcctggagacctccgcgccccgcaacctccccttctacgagcggctcggcttcaccgtcaccgccgacgtcgaggtgcccgaaggaccgcgcacctggtgcatgacccgcaagcccggtgcctga

SEQ ID NO: 6363 - DNA, 3660 bp, Artificial Sequence
  Synthetic Polynucloetide
atggccttaccagtgaccgccttgctcctgccgctggccttgctgctccacgccgccaggccggaggttcagctgcttgagtctggcggaggactggttcaacctggcggaagcctgagactgtcttgtgccgccagcggcttcacctttagcagctacgccatgagctgggtccgacaggctcctggcaaaggactggaatgggtgtccagcatcagcggcagcggcgactacatctactacgccgatagcgtgaagggcagattcaccatcagccgggacatcagcaagaacaccctgtacctccagatgaacagcctgagagccgaggacaccgccgtgtactactgtgccaaagaaggcaccggcgctaacagcagcctggccgattatagaggccagggcacactggtcaccgtgtctagtggcggaggaagcggcggaggatctgaagtgcaggttttggagtctggcggaggactggttcagcctggcggatctctgagactgtcttgtgccgccagcggcttcaccttcagcaactttgccatgagctgggtccgacaggcccctggcaaaggacttgaatgggtgtccacaatcagcggcagcgccggcacaacagattacgccgattctgtgaagggcagattcaccatcagccgggacaacagcaagaaaaccctgtacctccagatgaacagcctgcgcgtggaagataccgccgtgtactactgtgccgatggcagaggccccttcttcgattatcgcggccagggcacactggtcaccgtttcttctggtaccggcggaggcggatctggcggcggaggtagcggtggcggaggatctgaattcgacatccagatgacacagagccctagcagcctgtctgccagcgtgggagacagagtgaccatcacatgcaaggccagcgaccacatcaacaactggctggcctggtatcagcagaagcctggacaggcccctaagctgctgatctacggcgctaccacactggaaacaggcgtgcccagcagattttctggcagcggctctggcaccgactacaccctgacaatatccagcctccagcctgaggacttcgccacctactactgtcagcagagctggaacaccccttggacattcggccagggcaccaagctggaaatcaagagactcgaggacctgaagaacgtgttcccacctgaggtggccgtgttcgagcctagcgaggccgagatcagccacacccagaaagccaccctcgtgtgcctggctaccggcttctaccccgaccatgtggaactgtcttggtgggtcaacggcaaagaggtgcacagcggcgtgtctaccgacccccagccactgaaagaacagcccgccctgaacgacagccggtactgcctgagcagcagactgagagtgtccgccaccttctggcagaacccccggaaccacttcagatgccaggtgcagttctacggcctgagcgagaacgacgagtggacccaggacagagccaagcccgtgacccagatcgtgtctgccgaagcctggggcagagccgattgcggatcccagagcttcggcctgctggaccccaagctgtgctacctgctggatggcatcctgttcatctacggcgtgatcctgaccgccctgttcctgagagtgaagttcagcagaagcgccgacgcccctgcctaccagcagggacagaaccaactgtacaacgagctgaacctgggcagacgggaagagtacgacgtgctggacaagcggagaggcagggaccctgagatgggcggaaagccccagcggagaaagaacccccaggaaggactgtataacgaactccagaaagacaagatggccgaagcctacagcgagatcggcatgaagggcgagcggagaagaggcaagggccacgatggcctgtaccagggcctgagcaccgccaccaaggacacctatgacgccctgcacatgcaggccctgcctccaagaagggccaagcgatctggatctggagcaacaaacttctcactactcaaacaagcaggtgacgtggaggagaatcccgggcctactagtatggactggatttggcgcatccttttccttgtcggcgctgctaccggcgcccattccgggcccgaagtgcagctggttgaatctggcggaggactggttcaggctggcggatctctgagactgtcttgtgccgccagcggcagaacctttagcatgggctggtttagacaggcccctggcaaagagagagagttcgtcgccgccatcacatactctggcggcagcccttactacgccgactctgtgaagggcagattcaccatcagccgggacaacgccaagaacaccgtgtacctccagatgaacagcctgaagcctgaggacaccgccgtgtactactgcgccgccaatccaacatacggcagcgactggaacgccgagaattggggccagggaacccaagtgacagtgtctagcggatccggcggcggaggatctggcggaggcggatctgggggcggaggctctttcgaacaagttcagcttcaacagcctggcgctgagctggtcaaacctggcgcttctgtgaagatgagctgcaaagccagcggctacgccttcagcagctactggatcaactggatgaagcagaaacccggccagggactcgaatggatcggccaaatctatcccggcgacggcgacaccaactacaacggcaagttcaagggcagagccacactgaccgccgatacctctagcagcacagcctacatgcagctgagcagcctgaccagcgaagatagcgccgtgtacttctgtgcccggtccatcacaacagtcgtgggctgcgctatggactattggggccagggaacaagcgtgaccgtgtctagtacgcgtatccagaaccctgatcctgccgtgtaccagctgcgggatagcaagagcagcgacaagagcgtgtgtctgttcaccgacttcgacagccagaccaacgtgtcccagagcaaggactccgacgtgtacatcaccgataagaccgtgctggacatgcggagcatggacttcaagagcaactccgccgtggcctggtccaacaagtccgatttcgcctgcgccaacgccttcaacaacagcattatccccgaggacacattcttcccaagccccgagagcagctgcggtacccagagttttgggttgttggaccctaaattgtgctatctgttggacggaatcctgttcatttacggagtgatcctgaccgcattgttcctgcgggttaagttttccagatccgcagacgcacccgcttaccaacaagggcagaaccaactctacaatgaacttaatttggggcggagggaagagtacgacgttctggacaaaaggaggggacgagatcccgagatgggcggaaagcctcagcgaaggaagaatccgcaagaggggctttataacgaactccagaaagataaaatggcagaagcctatagtgagattgggatgaagggagaaaggaggaggggtaaaggtcacgatgggttgtaccaaggattgagcacagccactaaagatacctatgatgcgctccacatgcaggccctgccgccaaga

SEQ ID NO: 6364 - DNA, 3660 bp, Artificial Sequence
  Synthetic Polynucloetide
atggccttaccagtgaccgccttgctcctgccgctggccttgctgctccacgccgccaggccggaggttcagctgcttgagtctggcggaggactggttcaacctggcggaagcctgagactgtcttgtgccgccagcggcttcacctttagcagctacgccatgagctgggtccgacaggctcctggcaaaggactggaatgggtgtccagcatcagcggcagcggcgactacatctactacgccgatagcgtgaagggcagattcaccatcagccgggacatcagcaagaacaccctgtacctccagatgaacagcctgagagccgaggacaccgccgtgtactactgtgccaaagaaggcaccggcgctaacagcagcctggccgattatagaggccagggcacactggtcaccgtgtctagtggcggaggaagcggcggaggatctgaagtgcaggttttggagtctggcggaggactggttcagcctggcggatctctgagactgtcttgtgccgccagcggcttcaccttcagcaactttgccatgagctgggtccgacaggcccctggcaaaggacttgaatgggtgtccacaatcagcggcagcgccggcacaacagattacgccgattctgtgaagggcagattcaccatcagccgggacaacagcaagaaaaccctgtacctccagatgaacagcctgcgcgtggaagataccgccgtgtactactgtgccgatggcagaggccccttcttcgattatcgcggccagggcacactggtcaccgtttcttctggtaccggcggaggcggatctggcggcggaggtagcggtggcggaggatctgaattcgacatccagatgacacagagccctagcagcctgtctgccagcgtgggagacagagtgaccatcacatgcaaggccagcgaccacatcaacaactggctggcctggtatcagcagaagcctggacaggcccctaagctgctgatctacggcgctaccacactggaaacaggcgtgcccagcagattttctggcagcggctctggcaccgactacaccctgacaatatccagcctccagcctgaggacttcgccacctactactgtcagcagagctggaacaccccttggacattcggccagggcaccaagctggaaatcaagagactcgaggacctgaagaacgtgttcccacctgaggtggccgtgttcgagcctagcaaggccgagatcgcccacacccagaaagccaccctcgtgtgcctggctaccggcttctaccccgaccatgtggaactgtcttggtgggtcaacggcaaagaggtgcacagcggcgtgtgtaccgacccccagccactgaaagaacagcccgccctgaacgacagccggtactgcctgagcagcagactgagagtgtccgccaccttctggcagaacccccggaaccacttcagatgccaggtgcagttctacggcctgagcgagaacgacgagtggacccaggacagagccaagcccgtgacccagatcgtgtctgccgaagcctggggcagagccgattgcggatcccagagcttcggcctgctggaccccaagctgtgctacctgctggatggcatcctgttcatctacggcgtgatcctgaccgccctgttcctgagagtgaagttcagcagaagcgccgacgcccctgcctaccagcagggacagaaccaactgtacaacgagctgaacctgggcagacgggaagagtacgacgtgctggacaagcggagaggcagggaccctgagatgggcggaaagccccagcggagaaagaacccccaggaaggactgtataacgaactccagaaagacaagatggccgaagcctacagcgagatcggcatgaagggcgagcggagaagaggcaagggccacgatggcctgtaccagggcctgagcaccgccaccaaggacacctatgacgccctgcacatgcaggccctgcctccaagaagggccaagcgatctggatctggagcaacaaacttctcactactcaaacaagcaggtgacgtggaggagaatcccgggcctactagtatggactggatttggcgcatccttttccttgtcggcgctgctaccggcgcccattccgggcccgaagtgcagctggttgaatctggcggaggactggttcaggctggcggatctctgagactgtcttgtgccgccagcggcagaacctttagcatgggctggtttagacaggcccctggcaaagagagagagttcgtcgccgccatcacatactctggcggcagcccttactacgccgactctgtgaagggcagattcaccatcagccgggacaacgccaagaacaccgtgtacctccagatgaacagcctgaagcctgaggacaccgccgtgtactactgcgccgccaatccaacatacggcagcgactggaacgccgagaattggggccagggaacccaagtgacagtgtctagcggatccggcggcggaggatctggcggaggcggatctgggggcggaggctctttcgaacaagttcagcttcaacagcctggcgctgagctggtcaaacctggcgcttctgtgaagatgagctgcaaagccagcggctacgccttcagcagctactggatcaactggatgaagcagaaacccggccagggactcgaatggatcggccaaatctatcccggcgacggcgacaccaactacaacggcaagttcaagggcagagccacactgaccgccgatacctctagcagcacagcctacatgcagctgagcagcctgaccagcgaagatagcgccgtgtacttctgtgcccggtccatcacaacagtcgtgggctgcgctatggactattggggccagggaacaagcgtgaccgtgtctagtacgcgtatccagaaccctgatcctgccgtgtaccagctgcgggatagcaagagcagcgacaagagcgtgtgtctgttcaccgacttcgacagccagaccaacgtgtcccagagcaaggactccgacgtgtacatcaccgataagtgcgtgctggacatgcggagcatggacttcaagagcaactccgccgtggcctggtccaacaagtccgatttcgcctgcgccaacgccttcaacaacagcattatccccgaggacacattcttcccaagcagcgacgtgccctgcggtacccagagttttgggttgttggaccctaaattgtgctatctgttggacggaatcctgttcatttacggagtgatcctgaccgcattgttcctgcgggttaagttttccagatccgcagacgcacccgcttaccaacaagggcagaaccaactctacaatgaacttaatttggggcggagggaagagtacgacgttctggacaaaaggaggggacgagatcccgagatgggcggaaagcctcagcgaaggaagaatccgcaagaggggctttataacgaactccagaaagataaaatggcagaagcctatagtgagattgggatgaagggagaaaggaggaggggtaaaggtcacgatgggttgtaccaaggattgagcacagccactaaagatacctatgatgcgctccacatgcaggccctgccgccaaga

SEQ ID NO: 6365 - DNA, 3873 bp, Artificial Sequence
  Synthetic Polynucloetide
atggccttaccagtgaccgccttgctcctgccgctggccttgctgctccacgccgccaggccggaggttcagctgcttgagtctggcggaggactggttcaacctggcggaagcctgagactgtcttgtgccgccagcggcttcacctttagcagctacgccatgagctgggtccgacaggctcctggcaaaggactggaatgggtgtccagcatcagcggcagcggcgactacatctactacgccgatagcgtgaagggcagattcaccatcagccgggacatcagcaagaacaccctgtacctccagatgaacagcctgagagccgaggacaccgccgtgtactactgtgccaaagaaggcaccggcgctaacagcagcctggccgattatagaggccagggcacactggtcaccgtgtctagtggcggaggaagcggcggaggatctgaagtgcaggttttggagtctggcggaggactggttcagcctggcggatctctgagactgtcttgtgccgccagcggcttcaccttcagcaactttgccatgagctgggtccgacaggcccctggcaaaggacttgaatgggtgtccacaatcagcggcagcgccggcacaacagattacgccgattctgtgaagggcagattcaccatcagccgggacaacagcaagaaaaccctgtacctccagatgaacagcctgcgcgtggaagataccgccgtgtactactgtgccgatggcagaggccccttcttcgattatcgcggccagggcacactggtcaccgtttcttctggtaccggcggaggcggatctggcggcggaggtagcggtggcggaggatctgaattcgacatccagatgacacagagccctagcagcctgtctgccagcgtgggagacagagtgaccatcacatgcaaggccagcgaccacatcaacaactggctggcctggtatcagcagaagcctggacaggcccctaagctgctgatctacggcgctaccacactggaaacaggcgtgcccagcagattttctggcagcggctctggcaccgactacaccctgacaatatccagcctccagcctgaggacttcgccacctactactgtcagcagagctggaacaccccttggacattcggccagggcaccaagctggaaatcaagagactcgaggggaaaccaattcccaaccctcttctgggactggattcaaccggcagcggcgaggacctgaagaacgtgttcccacctgaggtggccgtgttcgagcctagcgaggccgagatcagccacacccagaaagccaccctcgtgtgcctggctaccggcttctaccccgaccatgtggaactgtcttggtgggtcaacggcaaagaggtgcacagcggcgtgtctaccgacccccagccactgaaagaacagcccgccctgaacgacagccggtactgcctgagcagcagactgagagtgtccgccaccttctggcagaacccccggaaccacttcagatgccaggtgcagttctacggcctgagcgagaacgacgagtggacccaggacagagccaagcccgtgacccagatcgtgtctgccgaagcctggggcagagccgattgcggatcccagagcttcggcctgctggaccccaagctgtgctacctgctggatggcatcctgttcatctacggcgtgatcctgaccgccctgttcctgagagtgaagttcagcagaagcgccgacgcccctgcctaccagcagggacagaaccaactgtacaacgagctgaacctgggcagacgggaagagtacgacgtgctggacaagcggagaggcagggaccctgagatgggcggaaagccccagcggagaaagaacccccaggaaggactgtataacgaactccagaaagacaagatggccgaagcctacagcgagatcggcatgaagggcgagcggagaagaggcaagggccacgatggcctgtaccagggcctgagcaccgccaccaaggacacctatgacgccctgcacatgcaggccctgcctccaagaagggccaagcgatctggatctggagcaacaaacttctcactactcaaacaagcaggtgacgtggaggagaatcccgggcctactagtatggactggatttggcgcatccttttccttgtcggcgctgctaccggcgcccattccgggcccgaagtgcagctggttgaatctggcggaggactggttcaggctggcggatctctgagactgtcttgtgccgccagcggcagaacctttagcatgggctggtttagacaggcccctggcaaagagagagagttcgtcgccgccatcacatactctggcggcagcccttactacgccgactctgtgaagggcagattcaccatcagccgggacaacgccaagaacaccgtgtacctccagatgaacagcctgaagcctgaggacaccgccgtgtactactgcgccgccaatccaacatacggcagcgactggaacgccgagaattggggccagggaacccaagtgacagtgtctagcggatccggcggcggaggatctggcggaggcggatctgggggcggaggctctttcgaacaagttcagcttcaacagcctggcgctgagctggtcaaacctggcgcttctgtgaagatgagctgcaaagccagcggctacgccttcagcagctactggatcaactggatgaagcagaaacccggccagggactcgaatggatcggccaaatctatcccggcgacggcgacaccaactacaacggcaagttcaagggcagagccacactgaccgccgatacctctagcagcacagcctacatgcagctgagcagcctgaccagcgaagatagcgccgtgtacttctgtgcccggtccatcacaacagtcgtgggctgcgctatggactattggggccagggaacaagcgtgaccgtgtctagtacgcgtgagcagaaactgatctcggaagaggatgggagcggcatccagaaccctgatcctgccgtgtaccagctgcgggatagcaagagcagcgacaagagcgtgtgtctgttcaccgacttcgacagccagaccaacgtgtcccagagcaaggactccgacgtgtacatcaccgataagaccgtgctggacatgcggagcatggacttcaagagcaactccgccgtggcctggtccaacaagtccgatttcgcctgcgccaacgccttcaacaacagcattatccccgaggacacattcttcccaagccccgagagcagctgcggtacccagagttttgggttgttggaccctaaattgtgctatctgttggacggaatcctgttcatttacggagtgatcctgaccgcattgttcctgaggagcaagcggtcacggctgctccacagcgattacatgaatatgacaccacgaagaccgggtcctactcgcaaacactaccaaccctacgcacctccccgcgactttgcagcgtaccgatctcgggttaagttttccagatccgcagacgcacccgcttaccaacaagggcagaaccaactctacaatgaacttaatttggggcggagggaagagtacgacgttctggacaaaaggaggggacgagatcccgagatgggcggaaagcctcagcgaaggaagaatccgcaagaggggctttataacgaactccagaaagataaaatggcagaagcctatagtgagattgggatgaagggagaaaggaggaggggtaaaggtcacgatgggttgtaccaaggattgagcacagccactaaagatacctatgatgcgctccacatgcaggccctgccgccaaga

SEQ ID NO: 6366 - DNA, 3996 bp, Artificial Sequence
  Synthetic Polynucloetide
atggccttaccagtgaccgccttgctcctgccgctggccttgctgctccacgccgccaggccggaggttcagctgcttgagtctggcggaggactggttcaacctggcggaagcctgagactgtcttgtgccgccagcggcttcacctttagcagctacgccatgagctgggtccgacaggctcctggcaaaggactggaatgggtgtccagcatcagcggcagcggcgactacatctactacgccgatagcgtgaagggcagattcaccatcagccgggacatcagcaagaacaccctgtacctccagatgaacagcctgagagccgaggacaccgccgtgtactactgtgccaaagaaggcaccggcgctaacagcagcctggccgattatagaggccagggcacactggtcaccgtgtctagtggcggaggaagcggcggaggatctgaagtgcaggttttggagtctggcggaggactggttcagcctggcggatctctgagactgtcttgtgccgccagcggcttcaccttcagcaactttgccatgagctgggtccgacaggcccctggcaaaggacttgaatgggtgtccacaatcagcggcagcgccggcacaacagattacgccgattctgtgaagggcagattcaccatcagccgggacaacagcaagaaaaccctgtacctccagatgaacagcctgcgcgtggaagataccgccgtgtactactgtgccgatggcagaggccccttcttcgattatcgcggccagggcacactggtcaccgtttcttctggtaccggcggaggcggatctggcggcggaggtagcggtggcggaggatctgaattcgacatccagatgacacagagccctagcagcctgtctgccagcgtgggagacagagtgaccatcacatgcaaggccagcgaccacatcaacaactggctggcctggtatcagcagaagcctggacaggcccctaagctgctgatctacggcgctaccacactggaaacaggcgtgcccagcagattttctggcagcggctctggcaccgactacaccctgacaatatccagcctccagcctgaggacttcgccacctactactgtcagcagagctggaacaccccttggacattcggccagggcaccaagctggaaatcaagagactcgaggggaaaccaattcccaaccctcttctgggactggattcaaccggcagcggcgaggacctgaagaacgtgttcccacctgaggtggccgtgttcgagcctagcgaggccgagatcagccacacccagaaagccaccctcgtgtgcctggctaccggcttctaccccgaccatgtggaactgtcttggtgggtcaacggcaaagaggtgcacagcggcgtgtctaccgacccccagccactgaaagaacagcccgccctgaacgacagccggtactgcctgagcagcagactgagagtgtccgccaccttctggcagaacccccggaaccacttcagatgccaggtgcagttctacggcctgagcgagaacgacgagtggacccaggacagagccaagcccgtgacccagatcgtgtctgccgaagcctggggcagagccgattgcggatcccagagcttcggcctgctggaccccaagctgtgctacctgctggatggcatcctgttcatctacggcgtgatcctgaccgccctgttcctgaggagtaagaggagcaggctcctgcacagtgactacatgaacatgactccacgccgccccggacccacccgcaagcattaccagccctatgccccaccacgcgacttcgcagcctatcgctccagagtgaagttcagcagaagcgccgacgcccctgcctaccagcagggacagaaccaactgtacaacgagctgaacctgggcagacgggaagagtacgacgtgctggacaagcggagaggcagggaccctgagatgggcggaaagccccagcggagaaagaacccccaggaaggactgtataacgaactccagaaagacaagatggccgaagcctacagcgagatcggcatgaagggcgagcggagaagaggcaagggccacgatggcctgtaccagggcctgagcaccgccaccaaggacacctatgacgccctgcacatgcaggccctgcctccaagaagggccaagcgatctggatctggagcaacaaacttctcactactcaaacaagcaggtgacgtggaggagaatcccgggcctactagtatggactggatttggcgcatccttttccttgtcggcgctgctaccggcgcccattccgggcccgaagtgcagctggttgaatctggcggaggactggttcaggctggcggatctctgagactgtcttgtgccgccagcggcagaacctttagcatgggctggtttagacaggcccctggcaaagagagagagttcgtcgccgccatcacatactctggcggcagcccttactacgccgactctgtgaagggcagattcaccatcagccgggacaacgccaagaacaccgtgtacctccagatgaacagcctgaagcctgaggacaccgccgtgtactactgcgccgccaatccaacatacggcagcgactggaacgccgagaattggggccagggaacccaagtgacagtgtctagcggatccggcggcggaggatctggcggaggcggatctgggggcggaggctctttcgaacaagttcagcttcaacagcctggcgctgagctggtcaaacctggcgcttctgtgaagatgagctgcaaagccagcggctacgccttcagcagctactggatcaactggatgaagcagaaacccggccagggactcgaatggatcggccaaatctatcccggcgacggcgacaccaactacaacggcaagttcaagggcagagccacactgaccgccgatacctctagcagcacagcctacatgcagctgagcagcctgaccagcgaagatagcgccgtgtacttctgtgcccggtccatcacaacagtcgtgggctgcgctatggactattggggccagggaacaagcgtgaccgtgtctagtacgcgtgagcagaaactgatctcggaagaggatgggagcggcatccagaaccctgatcctgccgtgtaccagctgcgggatagcaagagcagcgacaagagcgtgtgtctgttcaccgacttcgacagccagaccaacgtgtcccagagcaaggactccgacgtgtacatcaccgataagaccgtgctggacatgcggagcatggacttcaagagcaactccgccgtggcctggtccaacaagtccgatttcgcctgcgccaacgccttcaacaacagcattatccccgaggacacattcttcccaagccccgagagcagctgcggtacccagagttttgggttgttggaccctaaattgtgctatctgttggacggaatcctgttcatttacggagtgatcctgaccgcattgttcctgaggagcaagcggtcacggctgctccacagcgattacatgaatatgacaccacgaagaccgggtcctactcgcaaacactaccaaccctacgcacctccccgcgactttgcagcgtaccgatctcgggttaagttttccagatccgcagacgcacccgcttaccaacaagggcagaaccaactctacaatgaacttaatttggggcggagggaagagtacgacgttctggacaaaaggaggggacgagatcccgagatgggcggaaagcctcagcgaaggaagaatccgcaagaggggctttataacgaactccagaaagataaaatggcagaagcctatagtgagattgggatgaagggagaaaggaggaggggtaaaggtcacgatgggttgtaccaaggattgagcacagccactaaagatacctatgatgcgctccacatgcaggccctgccgccaaga

SEQ ID NO: 6367 - DNA, 3879 bp, Artificial Sequence
  Synthetic Polynucloetide
atggccttaccagtgaccgccttgctcctgccgctggccttgctgctccacgccgccaggccggaggttcagctgcttgagtctggcggaggactggttcaacctggcggaagcctgagactgtcttgtgccgccagcggcttcacctttagcagctacgccatgagctgggtccgacaggctcctggcaaaggactggaatgggtgtccagcatcagcggcagcggcgactacatctactacgccgatagcgtgaagggcagattcaccatcagccgggacatcagcaagaacaccctgtacctccagatgaacagcctgagagccgaggacaccgccgtgtactactgtgccaaagaaggcaccggcgctaacagcagcctggccgattatagaggccagggcacactggtcaccgtgtctagtggcggaggaagcggcggaggatctgaagtgcaggttttggagtctggcggaggactggttcagcctggcggatctctgagactgtcttgtgccgccagcggcttcaccttcagcaactttgccatgagctgggtccgacaggcccctggcaaaggacttgaatgggtgtccacaatcagcggcagcgccggcacaacagattacgccgattctgtgaagggcagattcaccatcagccgggacaacagcaagaaaaccctgtacctccagatgaacagcctgcgcgtggaagataccgccgtgtactactgtgccgatggcagaggccccttcttcgattatcgcggccagggcacactggtcaccgtttcttctggtaccggcggaggcggatctggcggcggaggtagcggtggcggaggatctgaattcgacatccagatgacacagagccctagcagcctgtctgccagcgtgggagacagagtgaccatcacatgcaaggccagcgaccacatcaacaactggctggcctggtatcagcagaagcctggacaggcccctaagctgctgatctacggcgctaccacactggaaacaggcgtgcccagcagattttctggcagcggctctggcaccgactacaccctgacaatatccagcctccagcctgaggacttcgccacctactactgtcagcagagctggaacaccccttggacattcggccagggcaccaagctggaaatcaagagactcgaggggaaaccaattcccaaccctcttctgggactggattcaaccggcagcggcgaggacctgaagaacgtgttcccacctgaggtggccgtgttcgagcctagcgaggccgagatcagccacacccagaaagccaccctcgtgtgcctggctaccggcttctaccccgaccatgtggaactgtcttggtgggtcaacggcaaagaggtgcacagcggcgtgtctaccgacccccagccactgaaagaacagcccgccctgaacgacagccggtactgcctgagcagcagactgagagtgtccgccaccttctggcagaacccccggaaccacttcagatgccaggtgcagttctacggcctgagcgagaacgacgagtggacccaggacagagccaagcccgtgacccagatcgtgtctgccgaagcctggggcagagccgattgcggatcccagagcttcggcctgctggaccccaagctgtgctacctgctggatggcatcctgttcatctacggcgtgatcctgaccgccctgttcctgagagtgaagttcagcagaagcgccgacgcccctgcctaccagcagggacagaaccaactgtacaacgagctgaacctgggcagacgggaagagtacgacgtgctggacaagcggagaggcagggaccctgagatgggcggaaagccccagcggagaaagaacccccaggaaggactgtataacgaactccagaaagacaagatggccgaagcctacagcgagatcggcatgaagggcgagcggagaagaggcaagggccacgatggcctgtaccagggcctgagcaccgccaccaaggacacctatgacgccctgcacatgcaggccctgcctccaagaagggccaagcgatctggatctggagcaacaaacttctcactactcaaacaagcaggtgacgtggaggagaatcccgggcctactagtatggactggatttggcgcatccttttccttgtcggcgctgctaccggcgcccattccgggcccgaagtgcagctggttgaatctggcggaggactggttcaggctggcggatctctgagactgtcttgtgccgccagcggcagaacctttagcatgggctggtttagacaggcccctggcaaagagagagagttcgtcgccgccatcacatactctggcggcagcccttactacgccgactctgtgaagggcagattcaccatcagccgggacaacgccaagaacaccgtgtacctccagatgaacagcctgaagcctgaggacaccgccgtgtactactgcgccgccaatccaacatacggcagcgactggaacgccgagaattggggccagggaacccaagtgacagtgtctagcggatccggcggcggaggatctggcggaggcggatctgggggcggaggctctttcgaacaagttcagcttcaacagcctggcgctgagctggtcaaacctggcgcttctgtgaagatgagctgcaaagccagcggctacgccttcagcagctactggatcaactggatgaagcagaaacccggccagggactcgaatggatcggccaaatctatcccggcgacggcgacaccaactacaacggcaagttcaagggcagagccacactgaccgccgatacctctagcagcacagcctacatgcagctgagcagcctgaccagcgaagatagcgccgtgtacttctgtgcccggtccatcacaacagtcgtgggctgcgctatggactattggggccagggaacaagcgtgaccgtgtctagtacgcgtgagcagaaactgatctcggaagaggatctggggagcggcatccagaaccctgatcctgccgtgtaccagctgcgggatagcaagagcagcgacaagagcgtgtgtctgttcaccgacttcgacagccagaccaacgtgtcccagagcaaggactccgacgtgtacatcaccgataagaccgtgctggacatgcggagcatggacttcaagagcaactccgccgtggcctggtccaacaagtccgatttcgcctgcgccaacgccttcaacaacagcattatccccgaggacacattcttcccaagccccgagagcagctgcggtacccagagttttgggttgttggaccctaaattgtgctatctgttggacggaatcctgttcatttacggagtgatcctgaccgcattgttcctgaagagaggccggaagaagctgctgtacatcttcaagcagcctttcatgcggcccgtgcagaccacccaggaagaggacggctgctcctgccggttccccgaggaagaagaaggcggctgcgagctgcgggttaagttttccagatccgcagacgcacccgcttaccaacaagggcagaaccaactctacaatgaacttaatttggggcggagggaagagtacgacgttctggacaaaaggaggggacgagatcccgagatgggcggaaagcctcagcgaaggaagaatccgcaagaggggctttataacgaactccagaaagataaaatggcagaagcctatagtgagattgggatgaagggagaaaggaggaggggtaaaggtcacgatgggttgtaccaaggattgagcacagccactaaagatacctatgatgcgctccacatgcaggccctgccgccaaga

SEQ ID NO: 6368 - DNA, 4005 bp, Artificial Sequence
  Synthetic Polynucloetide
atggccttaccagtgaccgccttgctcctgccgctggccttgctgctccacgccgccaggccggaggttcagctgcttgagtctggcggaggactggttcaacctggcggaagcctgagactgtcttgtgccgccagcggcttcacctttagcagctacgccatgagctgggtccgacaggctcctggcaaaggactggaatgggtgtccagcatcagcggcagcggcgactacatctactacgccgatagcgtgaagggcagattcaccatcagccgggacatcagcaagaacaccctgtacctccagatgaacagcctgagagccgaggacaccgccgtgtactactgtgccaaagaaggcaccggcgctaacagcagcctggccgattatagaggccagggcacactggtcaccgtgtctagtggcggaggaagcggcggaggatctgaagtgcaggttttggagtctggcggaggactggttcagcctggcggatctctgagactgtcttgtgccgccagcggcttcaccttcagcaactttgccatgagctgggtccgacaggcccctggcaaaggacttgaatgggtgtccacaatcagcggcagcgccggcacaacagattacgccgattctgtgaagggcagattcaccatcagccgggacaacagcaagaaaaccctgtacctccagatgaacagcctgcgcgtggaagataccgccgtgtactactgtgccgatggcagaggccccttcttcgattatcgcggccagggcacactggtcaccgtttcttctggtaccggcggaggcggatctggcggcggaggtagcggtggcggaggatctgaattcgacatccagatgacacagagccctagcagcctgtctgccagcgtgggagacagagtgaccatcacatgcaaggccagcgaccacatcaacaactggctggcctggtatcagcagaagcctggacaggcccctaagctgctgatctacggcgctaccacactggaaacaggcgtgcccagcagattttctggcagcggctctggcaccgactacaccctgacaatatccagcctccagcctgaggacttcgccacctactactgtcagcagagctggaacaccccttggacattcggccagggcaccaagctggaaatcaagagactcgaggggaaaccaattcccaaccctcttctgggactggattcaaccggcagcggcgaggacctgaagaacgtgttcccacctgaggtggccgtgttcgagcctagcgaggccgagatcagccacacccagaaagccaccctcgtgtgcctggctaccggcttctaccccgaccatgtggaactgtcttggtgggtcaacggcaaagaggtgcacagcggcgtgtctaccgacccccagccactgaaagaacagcccgccctgaacgacagccggtactgcctgagcagcagactgagagtgtccgccaccttctggcagaacccccggaaccacttcagatgccaggtgcagttctacggcctgagcgagaacgacgagtggacccaggacagagccaagcccgtgacccagatcgtgtctgccgaagcctggggcagagccgattgcggatcccagagcttcggcctgctggaccccaagctgtgctacctgctggatggcatcctgttcatctacggcgtgatcctgaccgccctgttcctgaaacggggcagaaagaaactcctgtatatattcaaacaaccatttatgagaccagtacaaactactcaagaggaagatggctgtagctgccgatttccagaagaagaagaaggaggatgtgaactgagagtgaagttcagcagaagcgccgacgcccctgcctaccagcagggacagaaccaactgtacaacgagctgaacctgggcagacgggaagagtacgacgtgctggacaagcggagaggcagggaccctgagatgggcggaaagccccagcggagaaagaacccccaggaaggactgtataacgaactccagaaagacaagatggccgaagcctacagcgagatcggcatgaagggcgagcggagaagaggcaagggccacgatggcctgtaccagggcctgagcaccgccaccaaggacacctatgacgccctgcacatgcaggccctgcctccaagaagggccaagcgatctggatctggagcaacaaacttctcactactcaaacaagcaggtgacgtggaggagaatcccgggcctactagtatggactggatttggcgcatccttttccttgtcggcgctgctaccggcgcccattccgggcccgaagtgcagctggttgaatctggcggaggactggttcaggctggcggatctctgagactgtcttgtgccgccagcggcagaacctttagcatgggctggtttagacaggcccctggcaaagagagagagttcgtcgccgccatcacatactctggcggcagcccttactacgccgactctgtgaagggcagattcaccatcagccgggacaacgccaagaacaccgtgtacctccagatgaacagcctgaagcctgaggacaccgccgtgtactactgcgccgccaatccaacatacggcagcgactggaacgccgagaattggggccagggaacccaagtgacagtgtctagcggatccggcggcggaggatctggcggaggcggatctgggggcggaggctctttcgaacaagttcagcttcaacagcctggcgctgagctggtcaaacctggcgcttctgtgaagatgagctgcaaagccagcggctacgccttcagcagctactggatcaactggatgaagcagaaacccggccagggactcgaatggatcggccaaatctatcccggcgacggcgacaccaactacaacggcaagttcaagggcagagccacactgaccgccgatacctctagcagcacagcctacatgcagctgagcagcctgaccagcgaagatagcgccgtgtacttctgtgcccggtccatcacaacagtcgtgggctgcgctatggactattggggccagggaacaagcgtgaccgtgtctagtacgcgtgagcagaaactgatctcggaagaggatctggggagcggcatccagaaccctgatcctgccgtgtaccagctgcgggatagcaagagcagcgacaagagcgtgtgtctgttcaccgacttcgacagccagaccaacgtgtcccagagcaaggactccgacgtgtacatcaccgataagaccgtgctggacatgcggagcatggacttcaagagcaactccgccgtggcctggtccaacaagtccgatttcgcctgcgccaacgccttcaacaacagcattatccccgaggacacattcttcccaagccccgagagcagctgcggtacccagagttttgggttgttggaccctaaattgtgctatctgttggacggaatcctgttcatttacggagtgatcctgaccgcattgttcctgaagagaggccggaagaagctgctgtacatcttcaagcagcctttcatgcggcccgtgcagaccacccaggaagaggacggctgctcctgccggttccccgaggaagaagaaggcggctgcgagctgcgggttaagttttccagatccgcagacgcacccgcttaccaacaagggcagaaccaactctacaatgaacttaatttggggcggagggaagagtacgacgttctggacaaaaggaggggacgagatcccgagatgggcggaaagcctcagcgaaggaagaatccgcaagaggggctttataacgaactccagaaagataaaatggcagaagcctatagtgagattgggatgaagggagaaaggaggaggggtaaaggtcacgatgggttgtaccaaggattgagcacagccactaaagatacctatgatgcgctccacatgcaggccctgccgccaaga

SEQ ID NO: 6369 - DNA, 3678 bp, Artificial Sequence
  Synthetic Polynucloetide
atggccttaccagtgaccgccttgctcctgccgctggccttgctgctccacgccgccaggccggaggttcagctgcttgagtctggcggaggactggttcaacctggcggaagcctgagactgtcttgtgccgccagcggcttcacctttagcagctacgccatgagctgggtccgacaggctcctggcaaaggactggaatgggtgtccagcatcagcggcagcggcgactacatctactacgccgatagcgtgaagggcagattcaccatcagccgggacatcagcaagaacaccctgtacctccagatgaacagcctgagagccgaggacaccgccgtgtactactgtgccaaagaaggcaccggcgctaacagcagcctggccgattatagaggccagggcacactggtcaccgtgtctagtggcggaggaagcggcggaggatctgaagtgcaggttttggagtctggcggaggactggttcagcctggcggatctctgagactgtcttgtgccgccagcggcttcaccttcagcaactttgccatgagctgggtccgacaggcccctggcaaaggacttgaatgggtgtccacaatcagcggcagcgccggcacaacagattacgccgattctgtgaagggcagattcaccatcagccgggacaacagcaagaaaaccctgtacctccagatgaacagcctgcgcgtggaagataccgccgtgtactactgtgccgatggcagaggccccttcttcgattatcgcggccagggcacactggtcaccgtttcttctggtaccggcggaggcggatctggcggcggaggtagcggtggcggaggatctgaattcgacatccagatgacacagagccctagcagcctgtctgccagcgtgggagacagagtgaccatcacatgcaaggccagcgaccacatcaacaactggctggcctggtatcagcagaagcctggacaggcccctaagctgctgatctacggcgctaccacactggaaacaggcgtgcccagcagattttctggcagcggctctggcaccgactacaccctgacaatatccagcctccagcctgaggacttcgccacctactactgtcagcagagctggaacaccccttggacattcggccagggcaccaagctggaaatcaagagactcgagcagagcttcggcctgctggaccccaagctgtgctacctgctggatggcatcctgttcatctacggcgtgatcctgaccgccctgttcctgagagtgaagttcagcagaagcgccgacgcccctgcctaccagcagggacagaaccaactgtacaacgagctgaacctgggcagacgggaagagtacgacgtgctggacaagcggagaggcagggaccctgagatgggcggaaagccccagcggagaaagaacccccaggaaggactgtataacgaactccagaaagacaagatggccgaagcctacagcgagatcggcatgaagggcgagcggagaagaggcaagggccacgatggcctgtaccagggcctgagcaccgccaccaaggacacctatgacgccctgcacatgcaggccctgcctccaagaagggccaagcgatctggatctggagcaacaaacttctcactactcaaacaagcaggtgacgtggaggagaatcccgggcctactagtatggactggatttggcgcatccttttccttgtcggcgctgctaccggcgcccattccgggcccgaagtgcagctggttgaatctggcggaggactggttcaggctggcggatctctgagactgtcttgtgccgccagcggcagaacctttagcatgggctggtttagacaggcccctggcaaagagagagagttcgtcgccgccatcacatactctggcggcagcccttactacgccgactctgtgaagggcagattcaccatcagccgggacaacgccaagaacaccgtgtacctccagatgaacagcctgaagcctgaggacaccgccgtgtactactgcgccgccaatccaacatacggcagcgactggaacgccgagaattggggccagggaacccaagtgacagtgtctagcggatccggcggcggaggatctggcggaggcggatctgggggcggaggctctttcgaacaagttcagcttcaacagcctggcgctgagctggtcaaacctggcgcttctgtgaagatgagctgcaaagccagcggctacgccttcagcagctactggatcaactggatgaagcagaaacccggccagggactcgaatggatcggccaaatctatcccggcgacggcgacaccaactacaacggcaagttcaagggcagagccacactgaccgccgatacctctagcagcacagcctacatgcagctgagcagcctgaccagcgaagatagcgccgtgtacttctgtgcccggtccatcacaacagtcgtgggctgcgctatggactattggggccagggaacaagcgtgaccgtgtctagtacgcgtcagagttttgggttgttggaccctaaattgtgctatctgttggacggaatcctgttcatttacggagtgatcctgaccgcattgttcctgcgggttaagttttccagatccgcagacgcacccgcttaccaacaagggcagaaccaactctacaatgaacttaatttggggcggagggaagagtacgacgttctggacaaaaggaggggacgagatcccgagatgggcggaaagcctcagcgaaggaagaatccgcaagaggggctttataacgaactccagaaagataaaatggcagaagcctatagtgagattgggatgaagggagaaaggaggaggggtaaaggtcacgatgggttgtaccaaggattgagcacagccactaaagatacctatgatgcgctccacatgcaggccctgccgccaagacgcgccaagagaagcggatctggcgtgaagcagaccctgaatttcgacctgctgaagctggctggcgacgtggaatccaacccaggcccttctagaggccatatgaccgagtacaagcccacggtgcgcctcgccacccgcgacgacgtccccagggccgtacgcaccctcgccgccgcgttcgccgactaccccgccacgcgccacaccgtcgatccggaccgccacatcgagcgggtcaccgagctgcaagaactcttcctcacgcgcgtcgggctcgacatcggcaaggtgtgggtcgcggacgacggcgccgcggtggcggtctggaccacgccggagagcgtcgaagcgggggcggtgttcgccgagatcggcccgcgcatggccgagttgagcggttcccggctggccgcgcagcaacagatggaaggcctcctggcgccgcaccggcccaaggagcccgcgtggttcctggccaccgtcggcgtctcgcccgaccaccagggcaagggtctgggcagcgccgtcgtgctccccggagtggaggcggccgagcgcgccggggtgcccgccttcctggagacctccgcgccccgcaacctccccttctacgagcggctcggcttcaccgtcaccgccgacgtcgaggtgcccgaaggaccgcgcacctggtgcatgacccgcaagcccggtgcctga

SEQ ID NO: 6370 - DNA, 3150 bp, Artificial Sequence
  Synthetic Polynucloetide
atggccttaccagtgaccgccttgctcctgccgctggccttgctgctccacgccgccaggccggaggttcagctgcttgagtctggcggaggactggttcaacctggcggaagcctgagactgtcttgtgccgccagcggcttcacctttagcagctacgccatgagctgggtccgacaggctcctggcaaaggactggaatgggtgtccagcatcagcggcagcggcgactacatctactacgccgatagcgtgaagggcagattcaccatcagccgggacatcagcaagaacaccctgtacctccagatgaacagcctgagagccgaggacaccgccgtgtactactgtgccaaagaaggcaccggcgctaacagcagcctggccgattatagaggccagggcacactggtcaccgtgtctagtggcggaggaagcggcggaggatctgaagtgcaggttttggagtctggcggaggactggttcagcctggcggatctctgagactgtcttgtgccgccagcggcttcaccttcagcaactttgccatgagctgggtccgacaggcccctggcaaaggacttgaatgggtgtccacaatcagcggcagcgccggcacaacagattacgccgattctgtgaagggcagattcaccatcagccgggacaacagcaagaaaaccctgtacctccagatgaacagcctgcgcgtggaagataccgccgtgtactactgtgccgatggcagaggccccttcttcgattatcgcggccagggcacactggtcaccgtttcttctggtaccggcggaggcggatctggcggcggaggtagcggtggcggaggatctgaattcgacatccagatgacacagagccctagcagcctgtctgccagcgtgggagacagagtgaccatcacatgcaaggccagcgaccacatcaacaactggctggcctggtatcagcagaagcctggacaggcccctaagctgctgatctacggcgctaccacactggaaacaggcgtgcccagcagattttctggcagcggctctggcaccgactacaccctgacaatatccagcctccagcctgaggacttcgccacctactactgtcagcagagctggaacaccccttggacattcggccagggcaccaagctggaaatcaagagactcgagggacagcctaaggccaatcctaccgtgacactgttccctccaagcagcgaagaactccaggccaacaaggccacacttgtgtgcctgatctccgacttctaccctggggctgtgacagtggcttggaaggccgatggatctcctgtgaaagccggcgtggaaaccaccaagccatccaagcagagcaacaacaaatacgccgccagctcctacctgagcctgacacctgagcagtggaagtcccacagatcctacagctgccaagtgacccacgaaggcagcaccgtggaaaagacagtggcccctacagagtgcagccccatcaagaccgatgtgattacaatggaccccaaggacaactgctccaaggacgccaacgataccctgctgctccagctgaccaacaccagcgcctactacatgtacttgttgctgctgctgaagtccgtggtgtacttcgccatcatcacatgctgcctgctgcggagaaccgccttctgctgcaacggcgagaagtctagggccaagcgatctggatctggagcaacaaacttctcactactcaaacaagcaggtgacgtggaggagaatcccgggcctactagtatggactggatttggcgcatccttttccttgtcggcgctgctaccggcgcccattccgggcccgaagtgcagctggttgaatctggcggaggactggttcaggctggcggatctctgagactgtcttgtgccgccagcggcagaacctttagcatgggctggtttagacaggcccctggcaaagagagagagttcgtcgccgccatcacatactctggcggcagcccttactacgccgactctgtgaagggcagattcaccatcagccgggacaacgccaagaacaccgtgtacctccagatgaacagcctgaagcctgaggacaccgccgtgtactactgcgccgccaatccaacatacggcagcgactggaacgccgagaattggggccagggaacccaagtgacagtgtctagcggatccggcggcggaggatctggcggaggcggatctgggggcggaggctctttcgaacaagttcagcttcaacagcctggcgctgagctggtcaaacctggcgcttctgtgaagatgagctgcaaagccagcggctacgccttcagcagctactggatcaactggatgaagcagaaacccggccagggactcgaatggatcggccaaatctatcccggcgacggcgacaccaactacaacggcaagttcaagggcagagccacactgaccgccgatacctctagcagcacagcctacatgcagctgagcagcctgaccagcgaagatagcgccgtgtacttctgtgcccggtccatcacaacagtcgtgggctgcgctatggactattggggccagggaacaagcgtgaccgtgtctagtacgcgtgcctctacaaagggaccctccgtgtttcctctggctcccagcagcaagtctacaagcggaggaacagccgctctgggctgcctggtcaaggattactttcccgagcctgtgaccgtgtcctggaatagcggagcactgacaagcggcgtgcacacctttccagccgtgctgcaaagcagcggcctgtactctctgagcagcgtggtcacagtgcctagctctagcctgggcacccagacctacatctgcaatgtgaaccacaagcctagcaacaccaaggtggacaagagagtggaacccaagagctgtgaagtgaaaaccgactccaccgaccacgtgaagcccaaagagacagagaacaccaagcagcccagcaagagctgccacaagcccaaggccatcgtgcacaccgagaaagtgaacatgatgagcctgaccgtgctgggcctgcggatgctgttcgccaaaaccgtggccgtgaacttcctgctgaccgccaagctgttcttcctc

SEQ ID NO: 6371 - DNA, 3084 bp, Artificial Sequence
  Synthetic Polynucloetide
atggccttaccagtgaccgccttgctcctgccgctggccttgctgctccacgccgccaggccggaggttcagctgcttgagtctggcggaggactggttcaacctggcggaagcctgagactgtcttgtgccgccagcggcttcacctttagcagctacgccatgagctgggtccgacaggctcctggcaaaggactggaatgggtgtccagcatcagcggcagcggcgactacatctactacgccgatagcgtgaagggcagattcaccatcagccgggacatcagcaagaacaccctgtacctccagatgaacagcctgagagccgaggacaccgccgtgtactactgtgccaaagaaggcaccggcgctaacagcagcctggccgattatagaggccagggcacactggtcaccgtgtctagtggcggaggaagcggcggaggatctgaagtgcaggttttggagtctggcggaggactggttcagcctggcggatctctgagactgtcttgtgccgccagcggcttcaccttcagcaactttgccatgagctgggtccgacaggcccctggcaaaggacttgaatgggtgtccacaatcagcggcagcgccggcacaacagattacgccgattctgtgaagggcagattcaccatcagccgggacaacagcaagaaaaccctgtacctccagatgaacagcctgcgcgtggaagataccgccgtgtactactgtgccgatggcagaggccccttcttcgattatcgcggccagggcacactggtcaccgtttcttctggtaccggcggaggcggatctggcggcggaggtagcggtggcggaggatctgaattcgacatccagatgacacagagccctagcagcctgtctgccagcgtgggagacagagtgaccatcacatgcaaggccagcgaccacatcaacaactggctggcctggtatcagcagaagcctggacaggcccctaagctgctgatctacggcgctaccacactggaaacaggcgtgcccagcagattttctggcagcggctctggcaccgactacaccctgacaatatccagcctccagcctgaggacttcgccacctactactgtcagcagagctggaacaccccttggacattcggccagggcaccaagctggaaatcaagagactcgagggacagcctaaggccaatcctaccgtgacactgttccctccaagcagcgaagaactccaggccaacaaggccacacttgtgtgcctgatctccgacttctaccctggggctgtgacagtggcttggaaggccgatggatctcctgtgaaagccggcgtggaaaccaccaagccatccaagcagagcaacaacaaatacgccgccagctcctacctgagcctgacacctgagcagtggaagtcccacagatcctacagctgccaagtgacccacgaaggcagcaccgtggaaaagacagtggcccctacagagtgcagcggcagagccgattgcggcatcaccagcgccagctaccaccagggcgtgctgagcgccaccatcctgtacgagatcctgctgggcaaggccaccctgtacgccgtgctggtgtctgccctggtgctgatggctatggtcaagcggaaggacagccggggaagggccaagcgatctggatctggagcaacaaacttctcactactcaaacaagcaggtgacgtggaggagaatcccgggcctactagtatggactggatttggcgcatccttttccttgtcggcgctgctaccggcgcccattccgggcccgaagtgcagctggttgaatctggcggaggactggttcaggctggcggatctctgagactgtcttgtgccgccagcggcagaacctttagcatgggctggtttagacaggcccctggcaaagagagagagttcgtcgccgccatcacatactctggcggcagcccttactacgccgactctgtgaagggcagattcaccatcagccgggacaacgccaagaacaccgtgtacctccagatgaacagcctgaagcctgaggacaccgccgtgtactactgcgccgccaatccaacatacggcagcgactggaacgccgagaattggggccagggaacccaagtgacagtgtctagcggatccggcggcggaggatctggcggaggcggatctgggggcggaggctctttcgaacaagttcagcttcaacagcctggcgctgagctggtcaaacctggcgcttctgtgaagatgagctgcaaagccagcggctacgccttcagcagctactggatcaactggatgaagcagaaacccggccagggactcgaatggatcggccaaatctatcccggcgacggcgacaccaactacaacggcaagttcaagggcagagccacactgaccgccgatacctctagcagcacagcctacatgcagctgagcagcctgaccagcgaagatagcgccgtgtacttctgtgcccggtccatcacaacagtcgtgggctgcgctatggactattggggccagggaacaagcgtgaccgtgtctagtacgcgtgcctctacaaagggaccctccgtgtttcctctggctcccagcagcaagtctacaagcggaggaacagccgctctgggctgcctggtcaaggattactttcccgagcctgtgaccgtgtcctggaatagcggagcactgacaagcggcgtgcacacctttccagccgtgctgcaaagcagcggcctgtactctctgagcagcgtggtcacagtgcctagctctagcctgggcacccagacctacatctgcaatgtgaaccacaagcctagcaacaccaaggtggacaagagagtggaacccaagagctgtatccccgaggacacattcttcccaagcagcgacgtgccctgcgacgtgaagctggtggaaaagagcttcgagacagacaccaacctgaacttccagaacctgagcgtgatcggcttcagaatcctgctgctgaaagtggccggctttaacctgctgatgaccctgcggctgtggtccagc

SEQ ID NO: 6372 - DNA, 3084 bp, Artificial Sequence
  Synthetic Polynucloetide
atggccttaccagtgaccgccttgctcctgccgctggccttgctgctccacgccgccaggccggaggttcagctgcttgagtctggcggaggactggttcaacctggcggaagcctgagactgtcttgtgccgccagcggcttcacctttagcagctacgccatgagctgggtccgacaggctcctggcaaaggactggaatgggtgtccagcatcagcggcagcggcgactacatctactacgccgatagcgtgaagggcagattcaccatcagccgggacatcagcaagaacaccctgtacctccagatgaacagcctgagagccgaggacaccgccgtgtactactgtgccaaagaaggcaccggcgctaacagcagcctggccgattatagaggccagggcacactggtcaccgtgtctagtggcggaggaagcggcggaggatctgaagtgcaggttttggagtctggcggaggactggttcagcctggcggatctctgagactgtcttgtgccgccagcggcttcaccttcagcaactttgccatgagctgggtccgacaggcccctggcaaaggacttgaatgggtgtccacaatcagcggcagcgccggcacaacagattacgccgattctgtgaagggcagattcaccatcagccgggacaacagcaagaaaaccctgtacctccagatgaacagcctgcgcgtggaagataccgccgtgtactactgtgccgatggcagaggccccttcttcgattatcgcggccagggcacactggtcaccgtttcttctggtaccggcggaggcggatctggcggcggaggtagcggtggcggaggatctgaattcgacatccagatgacacagagccctagcagcctgtctgccagcgtgggagacagagtgaccatcacatgcaaggccagcgaccacatcaacaactggctggcctggtatcagcagaagcctggacaggcccctaagctgctgatctacggcgctaccacactggaaacaggcgtgcccagcagattttctggcagcggctctggcaccgactacaccctgacaatatccagcctccagcctgaggacttcgccacctactactgtcagcagagctggaacaccccttggacattcggccagggcaccaagctggaaatcaagagactcgagggacagcctaaggccaatcctaccgtgacactgttccctccaagcagcgaagaactccaggccaacaaggccacacttgtgtgcctgatctccgacttctaccctggggctgtgacagtggcttggaaggccgatggatctcctgtgaaagccggcgtggaaaccaccaagccatccaagcagagcaacaacaaatacgccgccagctcctacctgagcctgacacctgagcagtggaagtcccacagatcctacagctgccaagtgacccacgaaggcagcaccgtggaaaagacagtggcccctacagagtgcagcggcagagccgattgcggctttaccagcgagagctaccagcagggcgtgctgagcgccaccatcctgtacgagatcctgctgggcaaggccaccctgtacgccgtgctggtgtctgccctggtgctgatggctatggtcaagcggaaggacagccggggaagggccaagcgatctggatctggagcaacaaacttctcactactcaaacaagcaggtgacgtggaggagaatcccgggcctactagtatggactggatttggcgcatccttttccttgtcggcgctgctaccggcgcccattccgggcccgaagtgcagctggttgaatctggcggaggactggttcaggctggcggatctctgagactgtcttgtgccgccagcggcagaacctttagcatgggctggtttagacaggcccctggcaaagagagagagttcgtcgccgccatcacatactctggcggcagcccttactacgccgactctgtgaagggcagattcaccatcagccgggacaacgccaagaacaccgtgtacctccagatgaacagcctgaagcctgaggacaccgccgtgtactactgcgccgccaatccaacatacggcagcgactggaacgccgagaattggggccagggaacccaagtgacagtgtctagcggatccggcggcggaggatctggcggaggcggatctgggggcggaggctctttcgaacaagttcagcttcaacagcctggcgctgagctggtcaaacctggcgcttctgtgaagatgagctgcaaagccagcggctacgccttcagcagctactggatcaactggatgaagcagaaacccggccagggactcgaatggatcggccaaatctatcccggcgacggcgacaccaactacaacggcaagttcaagggcagagccacactgaccgccgatacctctagcagcacagcctacatgcagctgagcagcctgaccagcgaagatagcgccgtgtacttctgtgcccggtccatcacaacagtcgtgggctgcgctatggactattggggccagggaacaagcgtgaccgtgtctagtacgcgtgcctctacaaagggaccctccgtgtttcctctggctcccagcagcaagtctacaagcggaggaacagccgctctgggctgcctggtcaaggattactttcccgagcctgtgaccgtgtcctggaatagcggagcactgacaagcggcgtgcacacctttccagccgtgctgcaaagcagcggcctgtactctctgagcagcgtggtcacagtgcctagctctagcctgggcacccagacctacatctgcaatgtgaaccacaagcctagcaacaccaaggtggacaagagagtggaacccaagagctgtatccccgaggacacattcttcccaagccccgagagcagctgcgacgtgaagctggtggaaaagagcttcgagacagacaccaacctgaacttccagaacctgagcgtgatcggcttcagaatcctgctgctgaaagtggccggctttaacctgctgatgaccctgcggctgtggtccagc

SEQ ID NO: 6373 - DNA, 2985 bp, Artificial Sequence
  Synthetic Polynucloetide
atggccttaccagtgaccgccttgctcctgccgctggccttgctgctccacgccgccaggccggaggttcagctgcttgagtctggcggaggactggttcaacctggcggaagcctgagactgtcttgtgccgccagcggcttcacctttagcagctacgccatgagctgggtccgacaggctcctggcaaaggactggaatgggtgtccagcatcagcggcagcggcgactacatctactacgccgatagcgtgaagggcagattcaccatcagccgggacatcagcaagaacaccctgtacctccagatgaacagcctgagagccgaggacaccgccgtgtactactgtgccaaagaaggcaccggcgctaacagcagcctggccgattatagaggccagggcacactggtcaccgtgtctagtggcggaggaagcggcggaggatctgaagtgcaggttttggagtctggcggaggactggttcagcctggcggatctctgagactgtcttgtgccgccagcggcttcaccttcagcaactttgccatgagctgggtccgacaggcccctggcaaaggacttgaatgggtgtccacaatcagcggcagcgccggcacaacagattacgccgattctgtgaagggcagattcaccatcagccgggacaacagcaagaaaaccctgtacctccagatgaacagcctgcgcgtggaagataccgccgtgtactactgtgccgatggcagaggccccttcttcgattatcgcggccagggcacactggtcaccgtttcttctctcgagggacagcctaaggccaatcctaccgtgacactgttccctccaagcagcgaagaactccaggccaacaaggccacacttgtgtgcctgatctccgacttctaccctggggctgtgacagtggcttggaaggccgatggatctcctgtgaaagccggcgtggaaaccaccaagccatccaagcagagcaacaacaaatacgccgccagctcctacctgagcctgacacctgagcagtggaagtcccacagatcctacagctgccaagtgacccacgaaggcagcaccgtggaaaagacagtggcccctacagagtgcagcggcagagccgattgcggctttaccagcgagagctaccagcagggcgtgctgagcgccaccatcctgtacgagatcctgctgggcaaggccaccctgtacgccgtgctggtgtctgccctggtgctgatggctatggtcaagcggaaggacagccggggaagggccaagcgatctggatctggagcaacaaacttctcactactcaaacaagcaggtgacgtggaggagaatcccgggcctactagtatggactggatttggcgcatccttttccttgtcggcgctgctaccggcgcgcattccgggcccgaagtgcagctggttgaatctggcggaggactggttcaggctggcggatctctgagactgtcttgtgccgccagcggcagaacctttagcatgggctggtttagacaggcccctggcaaagagagagagttcgtcgccgccatcacatactctggcggcagcccttactacgccgactctgtgaagggcagattcaccatcagccgggacaacgccaagaacaccgtgtacctccagatgaacagcctgaagcctgaggacaccgccgtgtactactgcgccgccaatccaacatacggcagcgactggaacgccgagaattggggccagggaacccaagtgacagtgtctagcacgcgtgcctctacaaagggaccctccgtgtttcctctggctcccagcagcaagtctacaagcggaggaacagccgctctgggctgcctggtcaaggattactttcccgagcctgtgaccgtgtcctggaatagcggagcactgacaagcggcgtgcacacctttccagccgtgctgcaaagcagcggcctgtactctctgagcagcgtggtcacagtgcctagctctagcctgggcacccagacctacatctgcaatgtgaaccacaagcctagcaacaccaaggtggacaagagagtggaacccaagagctgtatccccgaggacacattcttcccaagccccgagagcagctgcgacgtgaagctggtggaaaagagcttcgagacagacaccaacctgaacttccagaacctgagcgtgatcggcttcagaatcctgctgctgaaagtggccggctttaacctgctgatgaccctgcggctgtggtccagccgcgccaagagaagcggatctggcgtgaagcagaccctgaatttcgacctgctgaagctggctggcgacgtggaatccaacccaggcccttctagaggccatatgaccgagtacaagcccacggtgcgcctcgccacccgcgacgacgtccccagggccgtacgcaccctcgccgccgcgttcgccgactaccccgccacgcgccacaccgtcgatccggaccgccacatcgagcgggtcaccgagctgcaagaactcttcctcacgcgcgtcgggctcgacatcggcaaggtgtgggtcgcggacgacggcgccgcggtggcggtctggaccacgccggagagcgtcgaagcgggggcggtgttcgccgagatcggcccgcgcatggccgagttgagcggttcccggctggccgcgcagcaacagatggaaggcctcctggcgccgcaccggcccaaggagcccgcgtggttcctggccaccgtcggcgtctcgcccgaccaccagggcaagggtctgggcagcgccgtcgtgctccccggagtggaggcggccgagcgcgccggggtgcccgccttcctggagacctccgcgccccgcaacctccccttctacgagcggctcggcttcaccgtcaccgccgacgtcgaggtgcccgaaggaccgcgcacctggtgcatgacccgcaagcccggtgcctga

SEQ ID NO: 6374 - DNA, 2283 bp, Artificial Sequence
  Synthetic Polynucloetide
atggccttaccagtgaccgccttgctcctgccgctggccttgctgctccacgccgccaggccggaggttcagctgcttgagtctggcggaggactggttcaacctggcggaagcctgagactgtcttgtgccgccagcggcttcacctttagcagctacgccatgagctgggtccgacaggctcctggcaaaggactggaatgggtgtccagcatcagcggcagcggcgactacatctactacgccgatagcgtgaagggcagattcaccatcagccgggacatcagcaagaacaccctgtacctccagatgaacagcctgagagccgaggacaccgccgtgtactactgtgccaaagaaggcaccggcgctaacagcagcctggccgattatagaggccagggcacactggtcaccgtgtctagtggcggaggaagcggcggaggatctgaagtgcaggttttggagtctggcggaggactggttcagcctggcggatctctgagactgtcttgtgccgccagcggcttcaccttcagcaactttgccatgagctgggtccgacaggcccctggcaaaggacttgaatgggtgtccacaatcagcggcagcgccggcacaacagattacgccgattctgtgaagggcagattcaccatcagccgggacaacagcaagaaaaccctgtacctccagatgaacagcctgcgcgtggaagataccgccgtgtactactgtgccgatggcagaggccccttcttcgattatcgcggccagggcacactggtcaccgtttcttctctcgagggacagcctaaggccaatcctaccgtgacactgttccctccaagcagcgaagaactccaggccaacaaggccacacttgtgtgcctgatctccgacttctaccctggggctgtgacagtggcttggaaggccgatggatctcctgtgaaagccggcgtggaaaccaccaagccatccaagcagagcaacaacaaatacgccgccagctcctacctgagcctgacacctgagcagtggaagtcccacagatcctacagctgccaagtgacccacgaaggcagcaccgtggaaaagacagtggcccctacagagtgcagcggcagagccgattgcggctttaccagcgagagctaccagcagggcgtgctgagcgccaccatcctgtacgagatcctgctgggcaaggccaccctgtacgccgtgctggtgtctgccctggtgctgatggctatggtcaagcggaaggacagccggggaagggccaagcgatctggatctggagcaacaaacttctcactactcaaacaagcaggtgacgtggaggagaatcccgggcctactagtatggactggatttggcgcatccttttccttgtcggcgctgctaccggcgcgcattccgggcccgaagtgcagctggttgaatctggcggaggactggttcaggctggcggatctctgagactgtcttgtgccgccagcggcagaacctttagcatgggctggtttagacaggcccctggcaaagagagagagttcgtcgccgccatcacatactctggcggcagcccttactacgccgactctgtgaagggcagattcaccatcagccgggacaacgccaagaacaccgtgtacctccagatgaacagcctgaagcctgaggacaccgccgtgtactactgcgccgccaatccaacatacggcagcgactggaacgccgagaattggggccagggaacccaagtgacagtgtctagcacgcgtgcctctacaaagggaccctccgtgtttcctctggctcccagcagcaagtctacaagcggaggaacagccgctctgggctgcctggtcaaggattactttcccgagcctgtgaccgtgtcctggaatagcggagcactgacaagcggcgtgcacacctttccagccgtgctgcaaagcagcggcctgtactctctgagcagcgtggtcacagtgcctagctctagcctgggcacccagacctacatctgcaatgtgaaccacaagcctagcaacaccaaggtggacaagagagtggaacccaagagctgtatccccgaggacacattcttcccaagccccgagagcagctgcgacgtgaagctggtggaaaagagcttcgagacagacaccaacctgaacttccagaacctgagcgtgatcggcttcagaatcctgctgctgaaagtggccggctttaacctgctgatgaccctgcggctgtggtccagc

SEQ ID NO: 6375 - DNA, 2370 bp, Artificial Sequence
  Synthetic Polynucloetide
atggccttaccagtgaccgccttgctcctgccgctggccttgctgctccacgccgccaggccggaggttcagctgcttgagtctggcggaggactggttcaacctggcggaagcctgagactgtcttgtgccgccagcggcttcacctttagcagctacgccatgagctgggtccgacaggctcctggcaaaggactggaatgggtgtccagcatcagcggcagcggcgactacatctactacgccgatagcgtgaagggcagattcaccatcagccgggacatcagcaagaacaccctgtacctccagatgaacagcctgagagccgaggacaccgccgtgtactactgtgccaaagaaggcaccggcgctaacagcagcctggccgattatagaggccagggcacactggtcaccgtgtctagtggcggaggaagcggcggaggatctgaagtgcaggttttggagtctggcggaggactggttcagcctggcggatctctgagactgtcttgtgccgccagcggcttcaccttcagcaactttgccatgagctgggtccgacaggcccctggcaaaggacttgaatgggtgtccacaatcagcggcagcgccggcacaacagattacgccgattctgtgaagggcagattcaccatcagccgggacaacagcaagaaaaccctgtacctccagatgaacagcctgcgcgtggaagataccgccgtgtactactgtgccgatggcagaggccccttcttcgattatcgcggccagggcacactggtcaccgtttcttctctcgagggatctggcagagccgattgcggctttaccagcgagagctaccagcagggcgtgctgagcgccaccatcctgtacgagatcctgctgggcaaggccaccctgtacgccgtgctggtgtctgccctggtgctgatggctatggtcaagcggaaggacagccggggaagggccaagcgatctggatctggagcaacaaacttctcactactcaaacaagcaggtgacgtggaggagaatcccgggcctactagtatggactggatttggcgcatccttttccttgtcggcgctgctaccggcgcgcattccgggcccgaagtgcagctggttgaatctggcggaggactggttcaggctggcggatctctgagactgtcttgtgccgccagcggcagaacctttagcatgggctggtttagacaggcccctggcaaagagagagagttcgtcgccgccatcacatactctggcggcagcccttactacgccgactctgtgaagggcagattcaccatcagccgggacaacgccaagaacaccgtgtacctccagatgaacagcctgaagcctgaggacaccgccgtgtactactgcgccgccaatccaacatacggcagcgactggaacgccgagaattggggccagggaacccaagtgacagtgtctagcacgcgtggcagcatccccgaggacacattcttcccaagccccgagagcagctgcgacgtgaagctggtggaaaagagcttcgagacagacaccaacctgaacttccagaacctgagcgtgatcggcttcagaatcctgctgctgaaagtggccggctttaacctgctgatgaccctgcggctgtggtccagccgcgccaagagaagcggatctggcgtgaagcagaccctgaatttcgacctgctgaagctggctggcgacgtggaatccaacccaggcccttctagaggccatatgaccgagtacaagcccacggtgcgcctcgccacccgcgacgacgtccccagggccgtacgcaccctcgccgccgcgttcgccgactaccccgccacgcgccacaccgtcgatccggaccgccacatcgagcgggtcaccgagctgcaagaactcttcctcacgcgcgtcgggctcgacatcggcaaggtgtgggtcgcggacgacggcgccgcggtggcggtctggaccacgccggagagcgtcgaagcgggggcggtgttcgccgagatcggcccgcgcatggccgagttgagcggttcccggctggccgcgcagcaacagatggaaggcctcctggcgccgcaccggcccaaggagcccgcgtggttcctggccaccgtcggcgtctcgcccgaccaccagggcaagggtctgggcagcgccgtcgtgctccccggagtggaggcggccgagcgcgccggggtgcccgccttcctggagacctccgcgccccgcaacctccccttctacgagcggctcggcttcaccgtcaccgccgacgtcgaggtgcccgaaggaccgcgcacctggtgcatgacccgcaagcccggtgcctga

SEQ ID NO: 6376 - DNA, 1668 bp, Artificial Sequence
  Synthetic Polynucloetide
atggccttaccagtgaccgccttgctcctgccgctggccttgctgctccacgccgccaggccggaggttcagctgcttgagtctggcggaggactggttcaacctggcggaagcctgagactgtcttgtgccgccagcggcttcacctttagcagctacgccatgagctgggtccgacaggctcctggcaaaggactggaatgggtgtccagcatcagcggcagcggcgactacatctactacgccgatagcgtgaagggcagattcaccatcagccgggacatcagcaagaacaccctgtacctccagatgaacagcctgagagccgaggacaccgccgtgtactactgtgccaaagaaggcaccggcgctaacagcagcctggccgattatagaggccagggcacactggtcaccgtgtctagtggcggaggaagcggcggaggatctgaagtgcaggttttggagtctggcggaggactggttcagcctggcggatctctgagactgtcttgtgccgccagcggcttcaccttcagcaactttgccatgagctgggtccgacaggcccctggcaaaggacttgaatgggtgtccacaatcagcggcagcgccggcacaacagattacgccgattctgtgaagggcagattcaccatcagccgggacaacagcaagaaaaccctgtacctccagatgaacagcctgcgcgtggaagataccgccgtgtactactgtgccgatggcagaggccccttcttcgattatcgcggccagggcacactggtcaccgtttcttctctcgagggatctggcagagccgattgcggctttaccagcgagagctaccagcagggcgtgctgagcgccaccatcctgtacgagatcctgctgggcaaggccaccctgtacgccgtgctggtgtctgccctggtgctgatggctatggtcaagcggaaggacagccggggaagggccaagcgatctggatctggagcaacaaacttctcactactcaaacaagcaggtgacgtggaggagaatcccgggcctactagtatggactggatttggcgcatccttttccttgtcggcgctgctaccggcgcgcattccgggcccgaagtgcagctggttgaatctggcggaggactggttcaggctggcggatctctgagactgtcttgtgccgccagcggcagaacctttagcatgggctggtttagacaggcccctggcaaagagagagagttcgtcgccgccatcacatactctggcggcagcccttactacgccgactctgtgaagggcagattcaccatcagccgggacaacgccaagaacaccgtgtacctccagatgaacagcctgaagcctgaggacaccgccgtgtactactgcgccgccaatccaacatacggcagcgactggaacgccgagaattggggccagggaacccaagtgacagtgtctagcacgcgtggcagcatccccgaggacacattcttcccaagccccgagagcagctgcgacgtgaagctggtggaaaagagcttcgagacagacaccaacctgaacttccagaacctgagcgtgatcggcttcagaatcctgctgctgaaagtggccggctttaacctgctgatgaccctgcggctgtggtccagc

SEQ ID NO: 6377 - DNA, 2397 bp, Artificial Sequence
  Synthetic Polynucloetide
atggccttaccagtgaccgccttgctcctgccgctggccttgctgctccacgccgccaggccggaggttcagctgcttgagtctggcggaggactggttcaacctggcggaagcctgagactgtcttgtgccgccagcggcttcacctttagcagctacgccatgagctgggtccgacaggctcctggcaaaggactggaatgggtgtccagcatcagcggcagcggcgactacatctactacgccgatagcgtgaagggcagattcaccatcagccgggacatcagcaagaacaccctgtacctccagatgaacagcctgagagccgaggacaccgccgtgtactactgtgccaaagaaggcaccggcgctaacagcagcctggccgattatagaggccagggcacactggtcaccgtgtctagtggcggaggaagcggcggaggatctgaagtgcaggttttggagtctggcggaggactggttcagcctggcggatctctgagactgtcttgtgccgccagcggcttcaccttcagcaactttgccatgagctgggtccgacaggcccctggcaaaggacttgaatgggtgtccacaatcagcggcagcgccggcacaacagattacgccgattctgtgaagggcagattcaccatcagccgggacaacagcaagaaaaccctgtacctccagatgaacagcctgcgcgtggaagataccgccgtgtactactgtgccgatggcagaggccccttcttcgattatcgcggccagggcacactggtcaccgtttcttctctcgaggacaaaactcacacatgcccaccgtgcccagcaggcagagccgattgcggctttaccagcgagagctaccagcagggcgtgctgagcgccaccatcctgtacgagatcctgctgggcaaggccaccctgtacgccgtgctggtgtctgccctggtgctgatggctatggtcaagcggaaggacagccggggaagggccaagcgatctggatctggagcaacaaacttctcactactcaaacaagcaggtgacgtggaggagaatcccgggcctactagtatggactggatttggcgcatccttttccttgtcggcgctgctaccggcgcgcattccgggcccgaagtgcagctggttgaatctggcggaggactggttcaggctggcggatctctgagactgtcttgtgccgccagcggcagaacctttagcatgggctggtttagacaggcccctggcaaagagagagagttcgtcgccgccatcacatactctggcggcagcccttactacgccgactctgtgaagggcagattcaccatcagccgggacaacgccaagaacaccgtgtacctccagatgaacagcctgaagcctgaggacaccgccgtgtactactgcgccgccaatccaacatacggcagcgactggaacgccgagaattggggccagggaacccaagtgacagtgtctagcacgcgtggcagcatccccgaggacacattcttcccaagccccgagagcagctgcgacgtgaagctggtggaaaagagcttcgagacagacaccaacctgaacttccagaacctgagcgtgatcggcttcagaatcctgctgctgaaagtggccggctttaacctgctgatgaccctgcggctgtggtccagccgcgccaagagaagcggatctggcgtgaagcagaccctgaatttcgacctgctgaagctggctggcgacgtggaatccaacccaggcccttctagaggccatatgaccgagtacaagcccacggtgcgcctcgccacccgcgacgacgtccccagggccgtacgcaccctcgccgccgcgttcgccgactaccccgccacgcgccacaccgtcgatccggaccgccacatcgagcgggtcaccgagctgcaagaactcttcctcacgcgcgtcgggctcgacatcggcaaggtgtgggtcgcggacgacggcgccgcggtggcggtctggaccacgccggagagcgtcgaagcgggggcggtgttcgccgagatcggcccgcgcatggccgagttgagcggttcccggctggccgcgcagcaacagatggaaggcctcctggcgccgcaccggcccaaggagcccgcgtggttcctggccaccgtcggcgtctcgcccgaccaccagggcaagggtctgggcagcgccgtcgtgctccccggagtggaggcggccgagcgcgccggggtgcccgccttcctggagacctccgcgccccgcaacctccccttctacgagcggctcggcttcaccgtcaccgccgacgtcgaggtgcccgaaggaccgcgcacctggtgcatgacccgcaagcccggtgcctga

SEQ ID NO: 6378 - DNA, 2397 bp, Artificial Sequence
  Synthetic Polynucloetide
atggccttaccagtgaccgccttgctcctgccgctggccttgctgctccacgccgccaggccggaggttcagctgcttgagtctggcggaggactggttcaacctggcggaagcctgagactgtcttgtgccgccagcggcttcacctttagcagctacgccatgagctgggtccgacaggctcctggcaaaggactggaatgggtgtccagcatcagcggcagcggcgactacatctactacgccgatagcgtgaagggcagattcaccatcagccgggacatcagcaagaacaccctgtacctccagatgaacagcctgagagccgaggacaccgccgtgtactactgtgccaaagaaggcaccggcgctaacagcagcctggccgattatagaggccagggcacactggtcaccgtgtctagtggcggaggaagcggcggaggatctgaagtgcaggttttggagtctggcggaggactggttcagcctggcggatctctgagactgtcttgtgccgccagcggcttcaccttcagcaactttgccatgagctgggtccgacaggcccctggcaaaggacttgaatgggtgtccacaatcagcggcagcgccggcacaacagattacgccgattctgtgaagggcagattcaccatcagccgggacaacagcaagaaaaccctgtacctccagatgaacagcctgcgcgtggaagataccgccgtgtactactgtgccgatggcagaggccccttcttcgattatcgcggccagggcacactggtcaccgtttcttctctcgagggatctggcagagccgattgcggctttaccagcgagagctaccagcagggcgtgctgagcgccaccatcctgtacgagatcctgctgggcaaggccaccctgtacgccgtgctggtgtctgccctggtgctgatggctatggtcaagcggaaggacagccggggaagggccaagcgatctggatctggagcaacaaacttctcactactcaaacaagcaggtgacgtggaggagaatcccgggcctactagtatggactggatttggcgcatccttttccttgtcggcgctgctaccggcgcgcattccgggcccgaagtgcagctggttgaatctggcggaggactggttcaggctggcggatctctgagactgtcttgtgccgccagcggcagaacctttagcatgggctggtttagacaggcccctggcaaagagagagagttcgtcgccgccatcacatactctggcggcagcccttactacgccgactctgtgaagggcagattcaccatcagccgggacaacgccaagaacaccgtgtacctccagatgaacagcctgaagcctgaggacaccgccgtgtactactgcgccgccaatccaacatacggcagcgactggaacgccgagaattggggccagggaacccaagtgacagtgtctagcacgcgtgataaaactcatacctgtccgccatgcccggcaatccccgaggacacattcttcccaagccccgagagcagctgcgacgtgaagctggtggaaaagagcttcgagacagacaccaacctgaacttccagaacctgagcgtgatcggcttcagaatcctgctgctgaaagtggccggctttaacctgctgatgaccctgcggctgtggtccagccgcgccaagagaagcggatctggcgtgaagcagaccctgaatttcgacctgctgaagctggctggcgacgtggaatccaacccaggcccttctagaggccatatgaccgagtacaagcccacggtgcgcctcgccacccgcgacgacgtccccagggccgtacgcaccctcgccgccgcgttcgccgactaccccgccacgcgccacaccgtcgatccggaccgccacatcgagcgggtcaccgagctgcaagaactcttcctcacgcgcgtcgggctcgacatcggcaaggtgtgggtcgcggacgacggcgccgcggtggcggtctggaccacgccggagagcgtcgaagcgggggcggtgttcgccgagatcggcccgcgcatggccgagttgagcggttcccggctggccgcgcagcaacagatggaaggcctcctggcgccgcaccggcccaaggagcccgcgtggttcctggccaccgtcggcgtctcgcccgaccaccagggcaagggtctgggcagcgccgtcgtgctccccggagtggaggcggccgagcgcgccggggtgcccgccttcctggagacctccgcgccccgcaacctccccttctacgagcggctcggcttcaccgtcaccgccgacgtcgaggtgcccgaaggaccgcgcacctggtgcatgacccgcaagcccggtgcctga

SEQ ID NO: 6379 - DNA, 2424 bp, Artificial Sequence
  Synthetic Polynucloetide
atggccttaccagtgaccgccttgctcctgccgctggccttgctgctccacgccgccaggccggaggttcagctgcttgagtctggcggaggactggttcaacctggcggaagcctgagactgtcttgtgccgccagcggcttcacctttagcagctacgccatgagctgggtccgacaggctcctggcaaaggactggaatgggtgtccagcatcagcggcagcggcgactacatctactacgccgatagcgtgaagggcagattcaccatcagccgggacatcagcaagaacaccctgtacctccagatgaacagcctgagagccgaggacaccgccgtgtactactgtgccaaagaaggcaccggcgctaacagcagcctggccgattatagaggccagggcacactggtcaccgtgtctagtggcggaggaagcggcggaggatctgaagtgcaggttttggagtctggcggaggactggttcagcctggcggatctctgagactgtcttgtgccgccagcggcttcaccttcagcaactttgccatgagctgggtccgacaggcccctggcaaaggacttgaatgggtgtccacaatcagcggcagcgccggcacaacagattacgccgattctgtgaagggcagattcaccatcagccgggacaacagcaagaaaaccctgtacctccagatgaacagcctgcgcgtggaagataccgccgtgtactactgtgccgatggcagaggccccttcttcgattatcgcggccagggcacactggtcaccgtttcttctctcgaggacaaaactcacacatgcccaccgtgcccagcaggcagagccgattgcggctttaccagcgagagctaccagcagggcgtgctgagcgccaccatcctgtacgagatcctgctgggcaaggccaccctgtacgccgtgctggtgtctgccctggtgctgatggctatggtcaagcggaaggacagccggggaagggccaagcgatctggatctggagcaacaaacttctcactactcaaacaagcaggtgacgtggaggagaatcccgggcctactagtatggactggatttggcgcatccttttccttgtcggcgctgctaccggcgcgcattccgggcccgaagtgcagctggttgaatctggcggaggactggttcaggctggcggatctctgagactgtcttgtgccgccagcggcagaacctttagcatgggctggtttagacaggcccctggcaaagagagagagttcgtcgccgccatcacatactctggcggcagcccttactacgccgactctgtgaagggcagattcaccatcagccgggacaacgccaagaacaccgtgtacctccagatgaacagcctgaagcctgaggacaccgccgtgtactactgcgccgccaatccaacatacggcagcgactggaacgccgagaattggggccagggaacccaagtgacagtgtctagcacgcgtgataaaactcatacctgtccgccatgcccggcaatccccgaggacacattcttcccaagccccgagagcagctgcgacgtgaagctggtggaaaagagcttcgagacagacaccaacctgaacttccagaacctgagcgtgatcggcttcagaatcctgctgctgaaagtggccggctttaacctgctgatgaccctgcggctgtggtccagccgcgccaagagaagcggatctggcgtgaagcagaccctgaatttcgacctgctgaagctggctggcgacgtggaatccaacccaggcccttctagaggccatatgaccgagtacaagcccacggtgcgcctcgccacccgcgacgacgtccccagggccgtacgcaccctcgccgccgcgttcgccgactaccccgccacgcgccacaccgtcgatccggaccgccacatcgagcgggtcaccgagctgcaagaactcttcctcacgcgcgtcgggctcgacatcggcaaggtgtgggtcgcggacgacggcgccgcggtggcggtctggaccacgccggagagcgtcgaagcgggggcggtgttcgccgagatcggcccgcgcatggccgagttgagcggttcccggctggccgcgcagcaacagatggaaggcctcctggcgccgcaccggcccaaggagcccgcgtggttcctggccaccgtcggcgtctcgcccgaccaccagggcaagggtctgggcagcgccgtcgtgctccccggagtggaggcggccgagcgcgccggggtgcccgccttcctggagacctccgcgccccgcaacctccccttctacgagcggctcggcttcaccgtcaccgccgacgtcgaggtgcccgaaggaccgcgcacctggtgcatgacccgcaagcccggtgcctga

SEQ ID NO: 6380 - DNA, 1722 bp, Artificial Sequence
  Synthetic Polynucloetide
atggccttaccagtgaccgccttgctcctgccgctggccttgctgctccacgccgccaggccggaggttcagctgcttgagtctggcggaggactggttcaacctggcggaagcctgagactgtcttgtgccgccagcggcttcacctttagcagctacgccatgagctgggtccgacaggctcctggcaaaggactggaatgggtgtccagcatcagcggcagcggcgactacatctactacgccgatagcgtgaagggcagattcaccatcagccgggacatcagcaagaacaccctgtacctccagatgaacagcctgagagccgaggacaccgccgtgtactactgtgccaaagaaggcaccggcgctaacagcagcctggccgattatagaggccagggcacactggtcaccgtgtctagtggcggaggaagcggcggaggatctgaagtgcaggttttggagtctggcggaggactggttcagcctggcggatctctgagactgtcttgtgccgccagcggcttcaccttcagcaactttgccatgagctgggtccgacaggcccctggcaaaggacttgaatgggtgtccacaatcagcggcagcgccggcacaacagattacgccgattctgtgaagggcagattcaccatcagccgggacaacagcaagaaaaccctgtacctccagatgaacagcctgcgcgtggaagataccgccgtgtactactgtgccgatggcagaggccccttcttcgattatcgcggccagggcacactggtcaccgtttcttctctcgaggacaaaactcacacatgcccaccgtgcccagcaggcagagccgattgcggctttaccagcgagagctaccagcagggcgtgctgagcgccaccatcctgtacgagatcctgctgggcaaggccaccctgtacgccgtgctggtgtctgccctggtgctgatggctatggtcaagcggaaggacagccggggaagggccaagcgatctggatctggagcaacaaacttctcactactcaaacaagcaggtgacgtggaggagaatcccgggcctactagtatggactggatttggcgcatccttttccttgtcggcgctgctaccggcgcgcattccgggcccgaagtgcagctggttgaatctggcggaggactggttcaggctggcggatctctgagactgtcttgtgccgccagcggcagaacctttagcatgggctggtttagacaggcccctggcaaagagagagagttcgtcgccgccatcacatactctggcggcagcccttactacgccgactctgtgaagggcagattcaccatcagccgggacaacgccaagaacaccgtgtacctccagatgaacagcctgaagcctgaggacaccgccgtgtactactgcgccgccaatccaacatacggcagcgactggaacgccgagaattggggccagggaacccaagtgacagtgtctagcacgcgtgataaaactcatacctgtccgccatgcccggcaatccccgaggacacattcttcccaagccccgagagcagctgcgacgtgaagctggtggaaaagagcttcgagacagacaccaacctgaacttccagaacctgagcgtgatcggcttcagaatcctgctgctgaaagtggccggctttaacctgctgatgaccctgcggctgtggtccagc

SEQ ID NO: 6381 - DNA, 1695 bp, Artificial Sequence
  Synthetic Polynucloetide
atggccttaccagtgaccgccttgctcctgccgctggccttgctgctccacgccgccaggccggaggttcagctgcttgagtctggcggaggactggttcaacctggcggaagcctgagactgtcttgtgccgccagcggcttcacctttagcagctacgccatgagctgggtccgacaggctcctggcaaaggactggaatgggtgtccagcatcagcggcagcggcgactacatctactacgccgatagcgtgaagggcagattcaccatcagccgggacatcagcaagaacaccctgtacctccagatgaacagcctgagagccgaggacaccgccgtgtactactgtgccaaagaaggcaccggcgctaacagcagcctggccgattatagaggccagggcacactggtcaccgtgtctagtggcggaggaagcggcggaggatctgaagtgcaggttttggagtctggcggaggactggttcagcctggcggatctctgagactgtcttgtgccgccagcggcttcaccttcagcaactttgccatgagctgggtccgacaggcccctggcaaaggacttgaatgggtgtccacaatcagcggcagcgccggcacaacagattacgccgattctgtgaagggcagattcaccatcagccgggacaacagcaagaaaaccctgtacctccagatgaacagcctgcgcgtggaagataccgccgtgtactactgtgccgatggcagaggccccttcttcgattatcgcggccagggcacactggtcaccgtttcttctctcgagggatctggcagagccgattgcggctttaccagcgagagctaccagcagggcgtgctgagcgccaccatcctgtacgagatcctgctgggcaaggccaccctgtacgccgtgctggtgtctgccctggtgctgatggctatggtcaagcggaaggacagccggggaagggccaagcgatctggatctggagcaacaaacttctcactactcaaacaagcaggtgacgtggaggagaatcccgggcctactagtatggactggatttggcgcatccttttccttgtcggcgctgctaccggcgcgcattccgggcccgaagtgcagctggttgaatctggcggaggactggttcaggctggcggatctctgagactgtcttgtgccgccagcggcagaacctttagcatgggctggtttagacaggcccctggcaaagagagagagttcgtcgccgccatcacatactctggcggcagcccttactacgccgactctgtgaagggcagattcaccatcagccgggacaacgccaagaacaccgtgtacctccagatgaacagcctgaagcctgaggacaccgccgtgtactactgcgccgccaatccaacatacggcagcgactggaacgccgagaattggggccagggaacccaagtgacagtgtctagcacgcgtgataaaactcatacctgtccgccatgcccggcaatccccgaggacacattcttcccaagccccgagagcagctgcgacgtgaagctggtggaaaagagcttcgagacagacaccaacctgaacttccagaacctgagcgtgatcggcttcagaatcctgctgctgaaagtggccggctttaacctgctgatgaccctgcggctgtggtccagc

SEQ ID NO: 6382 - DNA, 3051 bp, Artificial Sequence
  Synthetic Polynucloetide
atggccttaccagtgaccgccttgctcctgccgctggccttgctgctccacgccgccaggccggaggttcagctgcttgagtctggcggaggactggttcaacctggcggaagcctgagactgtcttgtgccgccagcggcttcacctttagcagctacgccatgagctgggtccgacaggctcctggcaaaggactggaatgggtgtccagcatcagcggcagcggcgactacatctactacgccgatagcgtgaagggcagattcaccatcagccgggacatcagcaagaacaccctgtacctccagatgaacagcctgagagccgaggacaccgccgtgtactactgtgccaaagaaggcaccggcgctaacagcagcctggccgattatagaggccagggcacactggtcaccgtgtctagtggcggaggaagcggcggaggatctgaagtgcaggttttggagtctggcggaggactggttcagcctggcggatctctgagactgtcttgtgccgccagcggcttcaccttcagcaactttgccatgagctgggtccgacaggcccctggcaaaggacttgaatgggtgtccacaatcagcggcagcgccggcacaacagattacgccgattctgtgaagggcagattcaccatcagccgggacaacagcaagaaaaccctgtacctccagatgaacagcctgcgcgtggaagataccgccgtgtactactgtgccgatggcagaggccccttcttcgattatcgcggccagggcacactggtcaccgtttcttctctcgagggacagcctaaggccaatcctaccgtgacactgttccctccaagcagcgaagaactccaggccaacaaggccacacttgtgtgcctgatctccgacttctaccctggggctgtgacagtggcttggaaggccgatggatctcctgtgaaagccggcgtggaaaccaccaagccatccaagcagagcaacaacaaatacgccgccagctcctacctgagcctgacacctgagcagtggaagtcccacagatcctacagctgccaagtgacccacgaaggcagcaccgtggaaaagacagtggcccctacagagtgcagccccatcaagaccgatgtgattacaatggaccccaaggacaactgctccaaggacgccaacgataccctgctgctccagctgaccaacaccagcgcctactacatgtacttgttgctgctgctgaagtccgtggtgtacttcgccatcatcacatgctgcctgctgcggagaaccgccttctgctgcaacggcgagaagtctagggccaagcgatctggatctggagcaacaaacttctcactactcaaacaagcaggtgacgtggaggagaatcccgggcctactagtatggactggatttggcgcatccttttccttgtcggcgctgctaccggcgcgcattccgggcccgaagtgcagctggttgaatctggcggaggactggttcaggctggcggatctctgagactgtcttgtgccgccagcggcagaacctttagcatgggctggtttagacaggcccctggcaaagagagagagttcgtcgccgccatcacatactctggcggcagcccttactacgccgactctgtgaagggcagattcaccatcagccgggacaacgccaagaacaccgtgtacctccagatgaacagcctgaagcctgaggacaccgccgtgtactactgcgccgccaatccaacatacggcagcgactggaacgccgagaattggggccagggaacccaagtgacagtgtctagcacgcgtgcctctacaaagggaccctccgtgtttcctctggctcccagcagcaagtctacaagcggaggaacagccgctctgggctgcctggtcaaggattactttcccgagcctgtgaccgtgtcctggaatagcggagcactgacaagcggcgtgcacacctttccagccgtgctgcaaagcagcggcctgtactctctgagcagcgtggtcacagtgcctagctctagcctgggcacccagacctacatctgcaatgtgaaccacaagcctagcaacaccaaggtggacaagagagtggaacccaagagctgtgaagtgaaaaccgactccaccgaccacgtgaagcccaaagagacagagaacaccaagcagcccagcaagagctgccacaagcccaaggccatcgtgcacaccgagaaagtgaacatgatgagcctgaccgtgctgggcctgcggatgctgttcgccaaaaccgtggccgtgaacttcctgctgaccgccaagctgttcttcctccgcgccaagagaagcggatctggcgtgaagcagaccctgaatttcgacctgctgaagctggctggcgacgtggaatccaacccaggcccttctagaggccatatgaccgagtacaagcccacggtgcgcctcgccacccgcgacgacgtccccagggccgtacgcaccctcgccgccgcgttcgccgactaccccgccacgcgccacaccgtcgatccggaccgccacatcgagcgggtcaccgagctgcaagaactcttcctcacgcgcgtcgggctcgacatcggcaaggtgtgggtcgcggacgacggcgccgcggtggcggtctggaccacgccggagagcgtcgaagcgggggcggtgttcgccgagatcggcccgcgcatggccgagttgagcggttcccggctggccgcgcagcaacagatggaaggcctcctggcgccgcaccggcccaaggagcccgcgtggttcctggccaccgtcggcgtctcgcccgaccaccagggcaagggtctgggcagcgccgtcgtgctccccggagtggaggcggccgagcgcgccggggtgcccgccttcctggagacctccgcgccccgcaacctccccttctacgagcggctcggcttcaccgtcaccgccgacgtcgaggtgcccgaaggaccgcgcacctggtgcatgacccgcaagcccggtgcctga

SEQ ID NO: 6383 - DNA, 2349 bp, Artificial Sequence
  Synthetic Polynucloetide
atggccttaccagtgaccgccttgctcctgccgctggccttgctgctccacgccgccaggccggaggttcagctgcttgagtctggcggaggactggttcaacctggcggaagcctgagactgtcttgtgccgccagcggcttcacctttagcagctacgccatgagctgggtccgacaggctcctggcaaaggactggaatgggtgtccagcatcagcggcagcggcgactacatctactacgccgatagcgtgaagggcagattcaccatcagccgggacatcagcaagaacaccctgtacctccagatgaacagcctgagagccgaggacaccgccgtgtactactgtgccaaagaaggcaccggcgctaacagcagcctggccgattatagaggccagggcacactggtcaccgtgtctagtggcggaggaagcggcggaggatctgaagtgcaggttttggagtctggcggaggactggttcagcctggcggatctctgagactgtcttgtgccgccagcggcttcaccttcagcaactttgccatgagctgggtccgacaggcccctggcaaaggacttgaatgggtgtccacaatcagcggcagcgccggcacaacagattacgccgattctgtgaagggcagattcaccatcagccgggacaacagcaagaaaaccctgtacctccagatgaacagcctgcgcgtggaagataccgccgtgtactactgtgccgatggcagaggccccttcttcgattatcgcggccagggcacactggtcaccgtttcttctctcgagggacagcctaaggccaatcctaccgtgacactgttccctccaagcagcgaagaactccaggccaacaaggccacacttgtgtgcctgatctccgacttctaccctggggctgtgacagtggcttggaaggccgatggatctcctgtgaaagccggcgtggaaaccaccaagccatccaagcagagcaacaacaaatacgccgccagctcctacctgagcctgacacctgagcagtggaagtcccacagatcctacagctgccaagtgacccacgaaggcagcaccgtggaaaagacagtggcccctacagagtgcagccccatcaagaccgatgtgattacaatggaccccaaggacaactgctccaaggacgccaacgataccctgctgctccagctgaccaacaccagcgcctactacatgtacttgttgctgctgctgaagtccgtggtgtacttcgccatcatcacatgctgcctgctgcggagaaccgccttctgctgcaacggcgagaagtctagggccaagcgatctggatctggagcaacaaacttctcactactcaaacaagcaggtgacgtggaggagaatcccgggcctactagtatggactggatttggcgcatccttttccttgtcggcgctgctaccggcgcgcattccgggcccgaagtgcagctggttgaatctggcggaggactggttcaggctggcggatctctgagactgtcttgtgccgccagcggcagaacctttagcatgggctggtttagacaggcccctggcaaagagagagagttcgtcgccgccatcacatactctggcggcagcccttactacgccgactctgtgaagggcagattcaccatcagccgggacaacgccaagaacaccgtgtacctccagatgaacagcctgaagcctgaggacaccgccgtgtactactgcgccgccaatccaacatacggcagcgactggaacgccgagaattggggccagggaacccaagtgacagtgtctagcacgcgtgcctctacaaagggaccctccgtgtttcctctggctcccagcagcaagtctacaagcggaggaacagccgctctgggctgcctggtcaaggattactttcccgagcctgtgaccgtgtcctggaatagcggagcactgacaagcggcgtgcacacctttccagccgtgctgcaaagcagcggcctgtactctctgagcagcgtggtcacagtgcctagctctagcctgggcacccagacctacatctgcaatgtgaaccacaagcctagcaacaccaaggtggacaagagagtggaacccaagagctgtgaagtgaaaaccgactccaccgaccacgtgaagcccaaagagacagagaacaccaagcagcccagcaagagctgccacaagcccaaggccatcgtgcacaccgagaaagtgaacatgatgagcctgaccgtgctgggcctgcggatgctgttcgccaaaaccgtggccgtgaacttcctgctgaccgccaagctgttcttcctc

SEQ ID NO: 6384 - DNA, 2436 bp, Artificial Sequence
  Synthetic Polynucloetide
atggccttaccagtgaccgccttgctcctgccgctggccttgctgctccacgccgccaggccggaggttcagctgcttgagtctggcggaggactggttcaacctggcggaagcctgagactgtcttgtgccgccagcggcttcacctttagcagctacgccatgagctgggtccgacaggctcctggcaaaggactggaatgggtgtccagcatcagcggcagcggcgactacatctactacgccgatagcgtgaagggcagattcaccatcagccgggacatcagcaagaacaccctgtacctccagatgaacagcctgagagccgaggacaccgccgtgtactactgtgccaaagaaggcaccggcgctaacagcagcctggccgattatagaggccagggcacactggtcaccgtgtctagtggcggaggaagcggcggaggatctgaagtgcaggttttggagtctggcggaggactggttcagcctggcggatctctgagactgtcttgtgccgccagcggcttcaccttcagcaactttgccatgagctgggtccgacaggcccctggcaaaggacttgaatgggtgtccacaatcagcggcagcgccggcacaacagattacgccgattctgtgaagggcagattcaccatcagccgggacaacagcaagaaaaccctgtacctccagatgaacagcctgcgcgtggaagataccgccgtgtactactgtgccgatggcagaggccccttcttcgattatcgcggccagggcacactggtcaccgtttcttctctcgagggatctcccatcaagaccgatgtgattacaatggaccccaaggacaactgctccaaggacgccaacgataccctgctgctccagctgaccaacaccagcgcctactacatgtacttgttgctgctgctgaagtccgtggtgtacttcgccatcatcacatgctgcctgctgcggagaaccgccttctgctgcaacggcgagaagtctagggccaagcgatctggatctggagcaacaaacttctcactactcaaacaagcaggtgacgtggaggagaatcccgggcctactagtatggactggatttggcgcatccttttccttgtcggcgctgctaccggcgcgcattccgggcccgaagtgcagctggttgaatctggcggaggactggttcaggctggcggatctctgagactgtcttgtgccgccagcggcagaacctttagcatgggctggtttagacaggcccctggcaaagagagagagttcgtcgccgccatcacatactctggcggcagcccttactacgccgactctgtgaagggcagattcaccatcagccgggacaacgccaagaacaccgtgtacctccagatgaacagcctgaagcctgaggacaccgccgtgtactactgcgccgccaatccaacatacggcagcgactggaacgccgagaattggggccagggaacccaagtgacagtgtctagcacgcgtggcagcgaagtgaaaaccgactccaccgaccacgtgaagcccaaagagacagagaacaccaagcagcccagcaagagctgccacaagcccaaggccatcgtgcacaccgagaaagtgaacatgatgagcctgaccgtgctgggcctgcggatgctgttcgccaaaaccgtggccgtgaacttcctgctgaccgccaagctgttcttcctccgcgccaagagaagcggatctggcgtgaagcagaccctgaatttcgacctgctgaagctggctggcgacgtggaatccaacccaggcccttctagaggccatatgaccgagtacaagcccacggtgcgcctcgccacccgcgacgacgtccccagggccgtacgcaccctcgccgccgcgttcgccgactaccccgccacgcgccacaccgtcgatccggaccgccacatcgagcgggtcaccgagctgcaagaactcttcctcacgcgcgtcgggctcgacatcggcaaggtgtgggtcgcggacgacggcgccgcggtggcggtctggaccacgccggagagcgtcgaagcgggggcggtgttcgccgagatcggcccgcgcatggccgagttgagcggttcccggctggccgcgcagcaacagatggaaggcctcctggcgccgcaccggcccaaggagcccgcgtggttcctggccaccgtcggcgtctcgcccgaccaccagggcaagggtctgggcagcgccgtcgtgctccccggagtggaggcggccgagcgcgccggggtgcccgccttcctggagacctccgcgccccgcaacctccccttctacgagcggctcggcttcaccgtcaccgccgacgtcgaggtgcccgaaggaccgcgcacctggtgcatgacccgcaagcccggtgcctga

SEQ ID NO: 6385 - DNA, 1734 bp, Artificial Sequence
  Synthetic Polynucloetide
atggccttaccagtgaccgccttgctcctgccgctggccttgctgctccacgccgccaggccggaggttcagctgcttgagtctggcggaggactggttcaacctggcggaagcctgagactgtcttgtgccgccagcggcttcacctttagcagctacgccatgagctgggtccgacaggctcctggcaaaggactggaatgggtgtccagcatcagcggcagcggcgactacatctactacgccgatagcgtgaagggcagattcaccatcagccgggacatcagcaagaacaccctgtacctccagatgaacagcctgagagccgaggacaccgccgtgtactactgtgccaaagaaggcaccggcgctaacagcagcctggccgattatagaggccagggcacactggtcaccgtgtctagtggcggaggaagcggcggaggatctgaagtgcaggttttggagtctggcggaggactggttcagcctggcggatctctgagactgtcttgtgccgccagcggcttcaccttcagcaactttgccatgagctgggtccgacaggcccctggcaaaggacttgaatgggtgtccacaatcagcggcagcgccggcacaacagattacgccgattctgtgaagggcagattcaccatcagccgggacaacagcaagaaaaccctgtacctccagatgaacagcctgcgcgtggaagataccgccgtgtactactgtgccgatggcagaggccccttcttcgattatcgcggccagggcacactggtcaccgtttcttctctcgagggatctcccatcaagaccgatgtgattacaatggaccccaaggacaactgctccaaggacgccaacgataccctgctgctccagctgaccaacaccagcgcctactacatgtacttgttgctgctgctgaagtccgtggtgtacttcgccatcatcacatgctgcctgctgcggagaaccgccttctgctgcaacggcgagaagtctagggccaagcgatctggatctggagcaacaaacttctcactactcaaacaagcaggtgacgtggaggagaatcccgggcctactagtatggactggatttggcgcatccttttccttgtcggcgctgctaccggcgcgcattccgggcccgaagtgcagctggttgaatctggcggaggactggttcaggctggcggatctctgagactgtcttgtgccgccagcggcagaacctttagcatgggctggtttagacaggcccctggcaaagagagagagttcgtcgccgccatcacatactctggcggcagcccttactacgccgactctgtgaagggcagattcaccatcagccgggacaacgccaagaacaccgtgtacctccagatgaacagcctgaagcctgaggacaccgccgtgtactactgcgccgccaatccaacatacggcagcgactggaacgccgagaattggggccagggaacccaagtgacagtgtctagcacgcgtggcagcgaagtgaaaaccgactccaccgaccacgtgaagcccaaagagacagagaacaccaagcagcccagcaagagctgccacaagcccaaggccatcgtgcacaccgagaaagtgaacatgatgagcctgaccgtgctgggcctgcggatgctgttcgccaaaaccgtggccgtgaacttcctgctgaccgccaagctgttcttcctc

SEQ ID NO: 6386 - DNA, 2463 bp, Artificial Sequence
  Synthetic Polynucloetide
atggccttaccagtgaccgccttgctcctgccgctggccttgctgctccacgccgccaggccggaggttcagctgcttgagtctggcggaggactggttcaacctggcggaagcctgagactgtcttgtgccgccagcggcttcacctttagcagctacgccatgagctgggtccgacaggctcctggcaaaggactggaatgggtgtccagcatcagcggcagcggcgactacatctactacgccgatagcgtgaagggcagattcaccatcagccgggacatcagcaagaacaccctgtacctccagatgaacagcctgagagccgaggacaccgccgtgtactactgtgccaaagaaggcaccggcgctaacagcagcctggccgattatagaggccagggcacactggtcaccgtgtctagtggcggaggaagcggcggaggatctgaagtgcaggttttggagtctggcggaggactggttcagcctggcggatctctgagactgtcttgtgccgccagcggcttcaccttcagcaactttgccatgagctgggtccgacaggcccctggcaaaggacttgaatgggtgtccacaatcagcggcagcgccggcacaacagattacgccgattctgtgaagggcagattcaccatcagccgggacaacagcaagaaaaccctgtacctccagatgaacagcctgcgcgtggaagataccgccgtgtactactgtgccgatggcagaggccccttcttcgattatcgcggccagggcacactggtcaccgtttcttctctcgaggacaaaactcacacatgcccaccgtgcccagcacccatcaagaccgatgtgattacaatggaccccaaggacaactgctccaaggacgccaacgataccctgctgctccagctgaccaacaccagcgcctactacatgtacttgttgctgctgctgaagtccgtggtgtacttcgccatcatcacatgctgcctgctgcggagaaccgccttctgctgcaacggcgagaagtctagggccaagcgatctggatctggagcaacaaacttctcactactcaaacaagcaggtgacgtggaggagaatcccgggcctactagtatggactggatttggcgcatccttttccttgtcggcgctgctaccggcgcgcattccgggcccgaagtgcagctggttgaatctggcggaggactggttcaggctggcggatctctgagactgtcttgtgccgccagcggcagaacctttagcatgggctggtttagacaggcccctggcaaagagagagagttcgtcgccgccatcacatactctggcggcagcccttactacgccgactctgtgaagggcagattcaccatcagccgggacaacgccaagaacaccgtgtacctccagatgaacagcctgaagcctgaggacaccgccgtgtactactgcgccgccaatccaacatacggcagcgactggaacgccgagaattggggccagggaacccaagtgacagtgtctagcacgcgtggcagcgaagtgaaaaccgactccaccgaccacgtgaagcccaaagagacagagaacaccaagcagcccagcaagagctgccacaagcccaaggccatcgtgcacaccgagaaagtgaacatgatgagcctgaccgtgctgggcctgcggatgctgttcgccaaaaccgtggccgtgaacttcctgctgaccgccaagctgttcttcctccgcgccaagagaagcggatctggcgtgaagcagaccctgaatttcgacctgctgaagctggctggcgacgtggaatccaacccaggcccttctagaggccatatgaccgagtacaagcccacggtgcgcctcgccacccgcgacgacgtccccagggccgtacgcaccctcgccgccgcgttcgccgactaccccgccacgcgccacaccgtcgatccggaccgccacatcgagcgggtcaccgagctgcaagaactcttcctcacgcgcgtcgggctcgacatcggcaaggtgtgggtcgcggacgacggcgccgcggtggcggtctggaccacgccggagagcgtcgaagcgggggcggtgttcgccgagatcggcccgcgcatggccgagttgagcggttcccggctggccgcgcagcaacagatggaaggcctcctggcgccgcaccggcccaaggagcccgcgtggttcctggccaccgtcggcgtctcgcccgaccaccagggcaagggtctgggcagcgccgtcgtgctccccggagtggaggcggccgagcgcgccggggtgcccgccttcctggagacctccgcgccccgcaacctccccttctacgagcggctcggcttcaccgtcaccgccgacgtcgaggtgcccgaaggaccgcgcacctggtgcatgacccgcaagcccggtgcctga

SEQ ID NO: 6387 - DNA, 2463 bp, Artificial Sequence
  Synthetic Polynucloetide
atggccttaccagtgaccgccttgctcctgccgctggccttgctgctccacgccgccaggccggaggttcagctgcttgagtctggcggaggactggttcaacctggcggaagcctgagactgtcttgtgccgccagcggcttcacctttagcagctacgccatgagctgggtccgacaggctcctggcaaaggactggaatgggtgtccagcatcagcggcagcggcgactacatctactacgccgatagcgtgaagggcagattcaccatcagccgggacatcagcaagaacaccctgtacctccagatgaacagcctgagagccgaggacaccgccgtgtactactgtgccaaagaaggcaccggcgctaacagcagcctggccgattatagaggccagggcacactggtcaccgtgtctagtggcggaggaagcggcggaggatctgaagtgcaggttttggagtctggcggaggactggttcagcctggcggatctctgagactgtcttgtgccgccagcggcttcaccttcagcaactttgccatgagctgggtccgacaggcccctggcaaaggacttgaatgggtgtccacaatcagcggcagcgccggcacaacagattacgccgattctgtgaagggcagattcaccatcagccgggacaacagcaagaaaaccctgtacctccagatgaacagcctgcgcgtggaagataccgccgtgtactactgtgccgatggcagaggccccttcttcgattatcgcggccagggcacactggtcaccgtttcttctctcgagggatctcccatcaagaccgatgtgattacaatggaccccaaggacaactgctccaaggacgccaacgataccctgctgctccagctgaccaacaccagcgcctactacatgtacttgttgctgctgctgaagtccgtggtgtacttcgccatcatcacatgctgcctgctgcggagaaccgccttctgctgcaacggcgagaagtctagggccaagcgatctggatctggagcaacaaacttctcactactcaaacaagcaggtgacgtggaggagaatcccgggcctactagtatggactggatttggcgcatccttttccttgtcggcgctgctaccggcgcgcattccgggcccgaagtgcagctggttgaatctggcggaggactggttcaggctggcggatctctgagactgtcttgtgccgccagcggcagaacctttagcatgggctggtttagacaggcccctggcaaagagagagagttcgtcgccgccatcacatactctggcggcagcccttactacgccgactctgtgaagggcagattcaccatcagccgggacaacgccaagaacaccgtgtacctccagatgaacagcctgaagcctgaggacaccgccgtgtactactgcgccgccaatccaacatacggcagcgactggaacgccgagaattggggccagggaacccaagtgacagtgtctagcacgcgtgataaaactcatacctgtccgccatgcccggcagaagtgaaaaccgactccaccgaccacgtgaagcccaaagagacagagaacaccaagcagcccagcaagagctgccacaagcccaaggccatcgtgcacaccgagaaagtgaacatgatgagcctgaccgtgctgggcctgcggatgctgttcgccaaaaccgtggccgtgaacttcctgctgaccgccaagctgttcttcctccgcgccaagagaagcggatctggcgtgaagcagaccctgaatttcgacctgctgaagctggctggcgacgtggaatccaacccaggcccttctagaggccatatgaccgagtacaagcccacggtgcgcctcgccacccgcgacgacgtccccagggccgtacgcaccctcgccgccgcgttcgccgactaccccgccacgcgccacaccgtcgatccggaccgccacatcgagcgggtcaccgagctgcaagaactcttcctcacgcgcgtcgggctcgacatcggcaaggtgtgggtcgcggacgacggcgccgcggtggcggtctggaccacgccggagagcgtcgaagcgggggcggtgttcgccgagatcggcccgcgcatggccgagttgagcggttcccggctggccgcgcagcaacagatggaaggcctcctggcgccgcaccggcccaaggagcccgcgtggttcctggccaccgtcggcgtctcgcccgaccaccagggcaagggtctgggcagcgccgtcgtgctccccggagtggaggcggccgagcgcgccggggtgcccgccttcctggagacctccgcgccccgcaacctccccttctacgagcggctcggcttcaccgtcaccgccgacgtcgaggtgcccgaaggaccgcgcacctggtgcatgacccgcaagcccggtgcctga

SEQ ID NO: 6388 - DNA, 2490 bp, Artificial Sequence
  Synthetic Polynucloetide
atggccttaccagtgaccgccttgctcctgccgctggccttgctgctccacgccgccaggccggaggttcagctgcttgagtctggcggaggactggttcaacctggcggaagcctgagactgtcttgtgccgccagcggcttcacctttagcagctacgccatgagctgggtccgacaggctcctggcaaaggactggaatgggtgtccagcatcagcggcagcggcgactacatctactacgccgatagcgtgaagggcagattcaccatcagccgggacatcagcaagaacaccctgtacctccagatgaacagcctgagagccgaggacaccgccgtgtactactgtgccaaagaaggcaccggcgctaacagcagcctggccgattatagaggccagggcacactggtcaccgtgtctagtggcggaggaagcggcggaggatctgaagtgcaggttttggagtctggcggaggactggttcagcctggcggatctctgagactgtcttgtgccgccagcggcttcaccttcagcaactttgccatgagctgggtccgacaggcccctggcaaaggacttgaatgggtgtccacaatcagcggcagcgccggcacaacagattacgccgattctgtgaagggcagattcaccatcagccgggacaacagcaagaaaaccctgtacctccagatgaacagcctgcgcgtggaagataccgccgtgtactactgtgccgatggcagaggccccttcttcgattatcgcggccagggcacactggtcaccgtttcttctctcgaggacaaaactcacacatgcccaccgtgcccagcacccatcaagaccgatgtgattacaatggaccccaaggacaactgctccaaggacgccaacgataccctgctgctccagctgaccaacaccagcgcctactacatgtacttgttgctgctgctgaagtccgtggtgtacttcgccatcatcacatgctgcctgctgcggagaaccgccttctgctgcaacggcgagaagtctagggccaagcgatctggatctggagcaacaaacttctcactactcaaacaagcaggtgacgtggaggagaatcccgggcctactagtatggactggatttggcgcatccttttccttgtcggcgctgctaccggcgcgcattccgggcccgaagtgcagctggttgaatctggcggaggactggttcaggctggcggatctctgagactgtcttgtgccgccagcggcagaacctttagcatgggctggtttagacaggcccctggcaaagagagagagttcgtcgccgccatcacatactctggcggcagcccttactacgccgactctgtgaagggcagattcaccatcagccgggacaacgccaagaacaccgtgtacctccagatgaacagcctgaagcctgaggacaccgccgtgtactactgcgccgccaatccaacatacggcagcgactggaacgccgagaattggggccagggaacccaagtgacagtgtctagcacgcgtgataaaactcatacctgtccgccatgcccggcagaagtgaaaaccgactccaccgaccacgtgaagcccaaagagacagagaacaccaagcagcccagcaagagctgccacaagcccaaggccatcgtgcacaccgagaaagtgaacatgatgagcctgaccgtgctgggcctgcggatgctgttcgccaaaaccgtggccgtgaacttcctgctgaccgccaagctgttcttcctccgcgccaagagaagcggatctggcgtgaagcagaccctgaatttcgacctgctgaagctggctggcgacgtggaatccaacccaggcccttctagaggccatatgaccgagtacaagcccacggtgcgcctcgccacccgcgacgacgtccccagggccgtacgcaccctcgccgccgcgttcgccgactaccccgccacgcgccacaccgtcgatccggaccgccacatcgagcgggtcaccgagctgcaagaactcttcctcacgcgcgtcgggctcgacatcggcaaggtgtgggtcgcggacgacggcgccgcggtggcggtctggaccacgccggagagcgtcgaagcgggggcggtgttcgccgagatcggcccgcgcatggccgagttgagcggttcccggctggccgcgcagcaacagatggaaggcctcctggcgccgcaccggcccaaggagcccgcgtggttcctggccaccgtcggcgtctcgcccgaccaccagggcaagggtctgggcagcgccgtcgtgctccccggagtggaggcggccgagcgcgccggggtgcccgccttcctggagacctccgcgccccgcaacctccccttctacgagcggctcggcttcaccgtcaccgccgacgtcgaggtgcccgaaggaccgcgcacctggtgcatgacccgcaagcccggtgcctga

SEQ ID NO: 6389 - DNA, 1788 bp, Artificial Sequence
  Synthetic Polynucloetide
atggccttaccagtgaccgccttgctcctgccgctggccttgctgctccacgccgccaggccggaggttcagctgcttgagtctggcggaggactggttcaacctggcggaagcctgagactgtcttgtgccgccagcggcttcacctttagcagctacgccatgagctgggtccgacaggctcctggcaaaggactggaatgggtgtccagcatcagcggcagcggcgactacatctactacgccgatagcgtgaagggcagattcaccatcagccgggacatcagcaagaacaccctgtacctccagatgaacagcctgagagccgaggacaccgccgtgtactactgtgccaaagaaggcaccggcgctaacagcagcctggccgattatagaggccagggcacactggtcaccgtgtctagtggcggaggaagcggcggaggatctgaagtgcaggttttggagtctggcggaggactggttcagcctggcggatctctgagactgtcttgtgccgccagcggcttcaccttcagcaactttgccatgagctgggtccgacaggcccctggcaaaggacttgaatgggtgtccacaatcagcggcagcgccggcacaacagattacgccgattctgtgaagggcagattcaccatcagccgggacaacagcaagaaaaccctgtacctccagatgaacagcctgcgcgtggaagataccgccgtgtactactgtgccgatggcagaggccccttcttcgattatcgcggccagggcacactggtcaccgtttcttctctcgaggacaaaactcacacatgcccaccgtgcccagcacccatcaagaccgatgtgattacaatggaccccaaggacaactgctccaaggacgccaacgataccctgctgctccagctgaccaacaccagcgcctactacatgtacttgttgctgctgctgaagtccgtggtgtacttcgccatcatcacatgctgcctgctgcggagaaccgccttctgctgcaacggcgagaagtctagggccaagcgatctggatctggagcaacaaacttctcactactcaaacaagcaggtgacgtggaggagaatcccgggcctactagtatggactggatttggcgcatccttttccttgtcggcgctgctaccggcgcgcattccgggcccgaagtgcagctggttgaatctggcggaggactggttcaggctggcggatctctgagactgtcttgtgccgccagcggcagaacctttagcatgggctggtttagacaggcccctggcaaagagagagagttcgtcgccgccatcacatactctggcggcagcccttactacgccgactctgtgaagggcagattcaccatcagccgggacaacgccaagaacaccgtgtacctccagatgaacagcctgaagcctgaggacaccgccgtgtactactgcgccgccaatccaacatacggcagcgactggaacgccgagaattggggccagggaacccaagtgacagtgtctagcacgcgtgataaaactcatacctgtccgccatgcccggcagaagtgaaaaccgactccaccgaccacgtgaagcccaaagagacagagaacaccaagcagcccagcaagagctgccacaagcccaaggccatcgtgcacaccgagaaagtgaacatgatgagcctgaccgtgctgggcctgcggatgctgttcgccaaaaccgtggccgtgaacttcctgctgaccgccaagctgttcttcctc

SEQ ID NO: 6390 - DNA, 1761 bp, Artificial Sequence
  Synthetic Polynucloetide
atggccttaccagtgaccgccttgctcctgccgctggccttgctgctccacgccgccaggccggaggttcagctgcttgagtctggcggaggactggttcaacctggcggaagcctgagactgtcttgtgccgccagcggcttcacctttagcagctacgccatgagctgggtccgacaggctcctggcaaaggactggaatgggtgtccagcatcagcggcagcggcgactacatctactacgccgatagcgtgaagggcagattcaccatcagccgggacatcagcaagaacaccctgtacctccagatgaacagcctgagagccgaggacaccgccgtgtactactgtgccaaagaaggcaccggcgctaacagcagcctggccgattatagaggccagggcacactggtcaccgtgtctagtggcggaggaagcggcggaggatctgaagtgcaggttttggagtctggcggaggactggttcagcctggcggatctctgagactgtcttgtgccgccagcggcttcaccttcagcaactttgccatgagctgggtccgacaggcccctggcaaaggacttgaatgggtgtccacaatcagcggcagcgccggcacaacagattacgccgattctgtgaagggcagattcaccatcagccgggacaacagcaagaaaaccctgtacctccagatgaacagcctgcgcgtggaagataccgccgtgtactactgtgccgatggcagaggccccttcttcgattatcgcggccagggcacactggtcaccgtttcttctctcgagggatctcccatcaagaccgatgtgattacaatggaccccaaggacaactgctccaaggacgccaacgataccctgctgctccagctgaccaacaccagcgcctactacatgtacttgttgctgctgctgaagtccgtggtgtacttcgccatcatcacatgctgcctgctgcggagaaccgccttctgctgcaacggcgagaagtctagggccaagcgatctggatctggagcaacaaacttctcactactcaaacaagcaggtgacgtggaggagaatcccgggcctactagtatggactggatttggcgcatccttttccttgtcggcgctgctaccggcgcgcattccgggcccgaagtgcagctggttgaatctggcggaggactggttcaggctggcggatctctgagactgtcttgtgccgccagcggcagaacctttagcatgggctggtttagacaggcccctggcaaagagagagagttcgtcgccgccatcacatactctggcggcagcccttactacgccgactctgtgaagggcagattcaccatcagccgggacaacgccaagaacaccgtgtacctccagatgaacagcctgaagcctgaggacaccgccgtgtactactgcgccgccaatccaacatacggcagcgactggaacgccgagaattggggccagggaacccaagtgacagtgtctagcacgcgtgataaaactcatacctgtccgccatgcccggcagaagtgaaaaccgactccaccgaccacgtgaagcccaaagagacagagaacaccaagcagcccagcaagagctgccacaagcccaaggccatcgtgcacaccgagaaagtgaacatgatgagcctgaccgtgctgggcctgcggatgctgttcgccaaaaccgtggccgtgaacttcctgctgaccgccaagctgttcttcctc

SEQ ID NO: 6391 - DNA, 2412 bp, Artificial Sequence
  Synthetic Polynucloetide
atggccttaccagtgaccgccttgctcctgccgctggccttgctgctccacgccgccaggccggaggttcagctgcttgagtctggcggaggactggttcaacctggcggaagcctgagactgtcttgtgccgccagcggcttcacctttagcagctacgccatgagctgggtccgacaggctcctggcaaaggactggaatgggtgtccagcatcagcggcagcggcgactacatctactacgccgatagcgtgaagggcagattcaccatcagccgggacatcagcaagaacaccctgtacctccagatgaacagcctgagagccgaggacaccgccgtgtactactgtgccaaagaaggcaccggcgctaacagcagcctggccgattatagaggccagggcacactggtcaccgtgtctagtggcggaggaagcggcggaggatctgaagtgcaggttttggagtctggcggaggactggttcagcctggcggatctctgagactgtcttgtgccgccagcggcttcaccttcagcaactttgccatgagctgggtccgacaggcccctggcaaaggacttgaatgggtgtccacaatcagcggcagcgccggcacaacagattacgccgattctgtgaagggcagattcaccatcagccgggacaacagcaagaaaaccctgtacctccagatgaacagcctgcgcgtggaagataccgccgtgtactactgtgccgatggcagaggccccttcttcgattatcgcggccagggcacactggtcaccgtttcttctctcgagggatctatggaccccaaggacaactgctccaaggacgccaacgataccctgctgctccagctgaccaacaccagcgcctactacatgtacttgttgctgctgctgaagtccgtggtgtacttcgccatcatcacatgctgcctgctgcggagaaccgccttctgctgcaacggcgagaagtctagggccaagcgatctggatctggagcaacaaacttctcactactcaaacaagcaggtgacgtggaggagaatcccgggcctactagtatggactggatttggcgcatccttttccttgtcggcgctgctaccggcgcgcattccgggcccgaagtgcagctggttgaatctggcggaggactggttcaggctggcggatctctgagactgtcttgtgccgccagcggcagaacctttagcatgggctggtttagacaggcccctggcaaagagagagagttcgtcgccgccatcacatactctggcggcagcccttactacgccgactctgtgaagggcagattcaccatcagccgggacaacgccaagaacaccgtgtacctccagatgaacagcctgaagcctgaggacaccgccgtgtactactgcgccgccaatccaacatacggcagcgactggaacgccgagaattggggccagggaacccaagtgacagtgtctagcacgcgtggcagcgaagtgaaaaccgactccaccgaccacgtgaagcccaaagagacagagaacaccaagcagcccagcaagagctgccacaagcccaaggccatcgtgcacaccgagaaagtgaacatgatgagcctgaccgtgctgggcctgcggatgctgttcgccaaaaccgtggccgtgaacttcctgctgaccgccaagctgttcttcctccgcgccaagagaagcggatctggcgtgaagcagaccctgaatttcgacctgctgaagctggctggcgacgtggaatccaacccaggcccttctagaggccatatgaccgagtacaagcccacggtgcgcctcgccacccgcgacgacgtccccagggccgtacgcaccctcgccgccgcgttcgccgactaccccgccacgcgccacaccgtcgatccggaccgccacatcgagcgggtcaccgagctgcaagaactcttcctcacgcgcgtcgggctcgacatcggcaaggtgtgggtcgcggacgacggcgccgcggtggcggtctggaccacgccggagagcgtcgaagcgggggcggtgttcgccgagatcggcccgcgcatggccgagttgagcggttcccggctggccgcgcagcaacagatggaaggcctcctggcgccgcaccggcccaaggagcccgcgtggttcctggccaccgtcggcgtctcgcccgaccaccagggcaagggtctgggcagcgccgtcgtgctccccggagtggaggcggccgagcgcgccggggtgcccgccttcctggagacctccgcgccccgcaacctccccttctacgagcggctcggcttcaccgtcaccgccgacgtcgaggtgcccgaaggaccgcgcacctggtgcatgacccgcaagcccggtgcctga

SEQ ID NO: 6392 - DNA, 2415 bp, Artificial Sequence
  Synthetic Polynucloetide
atggccttaccagtgaccgccttgctcctgccgctggccttgctgctccacgccgccaggccggaggttcagctgcttgagtctggcggaggactggttcaacctggcggaagcctgagactgtcttgtgccgccagcggcttcacctttagcagctacgccatgagctgggtccgacaggctcctggcaaaggactggaatgggtgtccagcatcagcggcagcggcgactacatctactacgccgatagcgtgaagggcagattcaccatcagccgggacatcagcaagaacaccctgtacctccagatgaacagcctgagagccgaggacaccgccgtgtactactgtgccaaagaaggcaccggcgctaacagcagcctggccgattatagaggccagggcacactggtcaccgtgtctagtggcggaggaagcggcggaggatctgaagtgcaggttttggagtctggcggaggactggttcagcctggcggatctctgagactgtcttgtgccgccagcggcttcaccttcagcaactttgccatgagctgggtccgacaggcccctggcaaaggacttgaatgggtgtccacaatcagcggcagcgccggcacaacagattacgccgattctgtgaagggcagattcaccatcagccgggacaacagcaagaaaaccctgtacctccagatgaacagcctgcgcgtggaagataccgccgtgtactactgtgccgatggcagaggccccttcttcgattatcgcggccagggcacactggtcaccgtttcttctctcgagggatctcccatcaagaccgatgtgattacaatggaccccaaggacaactgctccaaggacgccaacgataccctgctgctccagctgaccaacaccagcgcctactacatgtacttgttgctgctgctgaagtccgtggtgtacttcgccatcatcacatgctgcctgctgcggagaaccgccttctgctgcaacggcgagaagtctagggccaagcgatctggatctggagcaacaaacttctcactactcaaacaagcaggtgacgtggaggagaatcccgggcctactagtatggactggatttggcgcatccttttccttgtcggcgctgctaccggcgcgcattccgggcccgaagtgcagctggttgaatctggcggaggactggttcaggctggcggatctctgagactgtcttgtgccgccagcggcagaacctttagcatgggctggtttagacaggcccctggcaaagagagagagttcgtcgccgccatcacatactctggcggcagcccttactacgccgactctgtgaagggcagattcaccatcagccgggacaacgccaagaacaccgtgtacctccagatgaacagcctgaagcctgaggacaccgccgtgtactactgcgccgccaatccaacatacggcagcgactggaacgccgagaattggggccagggaacccaagtgacagtgtctagcacgcgtggcagcgaccacgtgaagcccaaagagacagagaacaccaagcagcccagcaagagctgccacaagcccaaggccatcgtgcacaccgagaaagtgaacatgatgagcctgaccgtgctgggcctgcggatgctgttcgccaaaaccgtggccgtgaacttcctgctgaccgccaagctgttcttcctccgcgccaagagaagcggatctggcgtgaagcagaccctgaatttcgacctgctgaagctggctggcgacgtggaatccaacccaggcccttctagaggccatatgaccgagtacaagcccacggtgcgcctcgccacccgcgacgacgtccccagggccgtacgcaccctcgccgccgcgttcgccgactaccccgccacgcgccacaccgtcgatccggaccgccacatcgagcgggtcaccgagctgcaagaactcttcctcacgcgcgtcgggctcgacatcggcaaggtgtgggtcgcggacgacggcgccgcggtggcggtctggaccacgccggagagcgtcgaagcgggggcggtgttcgccgagatcggcccgcgcatggccgagttgagcggttcccggctggccgcgcagcaacagatggaaggcctcctggcgccgcaccggcccaaggagcccgcgtggttcctggccaccgtcggcgtctcgcccgaccaccagggcaagggtctgggcagcgccgtcgtgctccccggagtggaggcggccgagcgcgccggggtgcccgccttcctggagacctccgcgccccgcaacctccccttctacgagcggctcggcttcaccgtcaccgccgacgtcgaggtgcccgaaggaccgcgcacctggtgcatgacccgcaagcccggtgcctga

SEQ ID NO: 6393 - DNA, 2391 bp, Artificial Sequence
  Synthetic Polynucloetide
atggccttaccagtgaccgccttgctcctgccgctggccttgctgctccacgccgccaggccggaggttcagctgcttgagtctggcggaggactggttcaacctggcggaagcctgagactgtcttgtgccgccagcggcttcacctttagcagctacgccatgagctgggtccgacaggctcctggcaaaggactggaatgggtgtccagcatcagcggcagcggcgactacatctactacgccgatagcgtgaagggcagattcaccatcagccgggacatcagcaagaacaccctgtacctccagatgaacagcctgagagccgaggacaccgccgtgtactactgtgccaaagaaggcaccggcgctaacagcagcctggccgattatagaggccagggcacactggtcaccgtgtctagtggcggaggaagcggcggaggatctgaagtgcaggttttggagtctggcggaggactggttcagcctggcggatctctgagactgtcttgtgccgccagcggcttcaccttcagcaactttgccatgagctgggtccgacaggcccctggcaaaggacttgaatgggtgtccacaatcagcggcagcgccggcacaacagattacgccgattctgtgaagggcagattcaccatcagccgggacaacagcaagaaaaccctgtacctccagatgaacagcctgcgcgtggaagataccgccgtgtactactgtgccgatggcagaggccccttcttcgattatcgcggccagggcacactggtcaccgtttcttctctcgagggatctatggaccccaaggacaactgctccaaggacgccaacgataccctgctgctccagctgaccaacaccagcgcctactacatgtacttgttgctgctgctgaagtccgtggtgtacttcgccatcatcacatgctgcctgctgcggagaaccgccttctgctgcaacggcgagaagtctagggccaagcgatctggatctggagcaacaaacttctcactactcaaacaagcaggtgacgtggaggagaatcccgggcctactagtatggactggatttggcgcatccttttccttgtcggcgctgctaccggcgcgcattccgggcccgaagtgcagctggttgaatctggcggaggactggttcaggctggcggatctctgagactgtcttgtgccgccagcggcagaacctttagcatgggctggtttagacaggcccctggcaaagagagagagttcgtcgccgccatcacatactctggcggcagcccttactacgccgactctgtgaagggcagattcaccatcagccgggacaacgccaagaacaccgtgtacctccagatgaacagcctgaagcctgaggacaccgccgtgtactactgcgccgccaatccaacatacggcagcgactggaacgccgagaattggggccagggaacccaagtgacagtgtctagcacgcgtggcagcgaccacgtgaagcccaaagagacagagaacaccaagcagcccagcaagagctgccacaagcccaaggccatcgtgcacaccgagaaagtgaacatgatgagcctgaccgtgctgggcctgcggatgctgttcgccaaaaccgtggccgtgaacttcctgctgaccgccaagctgttcttcctccgcgccaagagaagcggatctggcgtgaagcagaccctgaatttcgacctgctgaagctggctggcgacgtggaatccaacccaggcccttctagaggccatatgaccgagtacaagcccacggtgcgcctcgccacccgcgacgacgtccccagggccgtacgcaccctcgccgccgcgttcgccgactaccccgccacgcgccacaccgtcgatccggaccgccacatcgagcgggtcaccgagctgcaagaactcttcctcacgcgcgtcgggctcgacatcggcaaggtgtgggtcgcggacgacggcgccgcggtggcggtctggaccacgccggagagcgtcgaagcgggggcggtgttcgccgagatcggcccgcgcatggccgagttgagcggttcccggctggccgcgcagcaacagatggaaggcctcctggcgccgcaccggcccaaggagcccgcgtggttcctggccaccgtcggcgtctcgcccgaccaccagggcaagggtctgggcagcgccgtcgtgctccccggagtggaggcggccgagcgcgccggggtgcccgccttcctggagacctccgcgccccgcaacctccccttctacgagcggctcggcttcaccgtcaccgccgacgtcgaggtgcccgaaggaccgcgcacctggtgcatgacccgcaagcccggtgcctga

SEQ ID NO: 6394 - DNA, 1326 bp, Artificial Sequence
  Synthetic Polynucloetide
atggccttaccagtgaccgccttgctcctgccgctggccttgctgctccacgccgccaggccggaggttcagctgcttgagtctggcggaggactggttcaacctggcggaagcctgagactgtcttgtgccgccagcggcttcacctttagcagctacgccatgagctgggtccgacaggctcctggcaaaggactggaatgggtgtccagcatcagcggcagcggcgactacatctactacgccgatagcgtgaagggcagattcaccatcagccgggacatcagcaagaacaccctgtacctccagatgaacagcctgagagccgaggacaccgccgtgtactactgtgccaaagaaggcaccggcgctaacagcagcctggccgattatagaggccagggcacactggtcaccgtgtctagtggcggaggaagcggcggaggatctgaagtgcaggttttggagtctggcggaggactggttcagcctggcggatctctgagactgtcttgtgccgccagcggcttcaccttcagcaactttgccatgagctgggtccgacaggcccctggcaaaggacttgaatgggtgtccacaatcagcggcagcgccggcacaacagattacgccgattctgtgaagggcagattcaccatcagccgggacaacagcaagaaaaccctgtacctccagatgaacagcctgcgcgtggaagataccgccgtgtactactgtgccgatggcagaggccccttcttcgattatcgcggccagggcacactggtcaccgtttcttctctcgagggacagcctaaggccaatcctaccgtgacactgttccctccaagcagcgaagaactccaggccaacaaggccacacttgtgtgcctgatctccgacttctaccctggggctgtgacagtggcttggaaggccgatggatctcctgtgaaagccggcgtggaaaccaccaagccatccaagcagagcaacaacaaatacgccgccagctcctacctgagcctgacacctgagcagtggaagtcccacagatcctacagctgccaagtgacccacgaaggcagcaccgtggaaaagacagtggcccctacagagtgcagccccatcaagaccgatgtgattacaatggaccccaaggacaactgctccaaggacgccaacgataccctgctgctccagctgaccaacaccagcgcctactacatgtacttgttgctgctgctgaagtccgtggtgtacttcgccatcatcacatgctgcctgctgcggagaaccgccttctgctgcaacggcgagaagtct

SEQ ID NO: 6395 - DNA, 2304 bp, Artificial Sequence
  Synthetic Polynucloetide
atggactggatttggcgcatccttttccttgtcggcgctgctaccggcgcccattcccaactgcaactgcaagagtctggccctggcctggtcaagccttctgaaaccctgagcctgacctgtaccgtgtccggcggctctatcagcagcggcgattactactggggctggatcagacagcctccaggcaagggactcgaatggatcggcagcatcagctacagcggctccacctactacaacccaagcctgaagtccagagtgaccatcagcgtggacaccagcagaaaccagttctccctgaagctgagcagcgtgacagccgccgatacagccgtgtattattgcaccagagaggacagcagcaactggcggagtagaggacagggcacactggtcacagtgtcctcttctggaggcggtggaagcggtggaggaggatctgaagtgcagctggttgaatctggcggaggactggttcaggctggcggatctctgagactgtcttgtgccgccagcggcagaacctttagcatgggctggtttagacaggcccctggcaaagagagagagttcgtcgccgccatcacatactctggcggcagcccttactacgccgactctgtgaagggcagattcaccatcagccgggacaacgccaagaacaccgtgtacctccagatgaacagcctgaagcctgaggacaccgccgtgtactactgcgccgccaatccaacatacggcagcgactggaacgccgagaattggggccagggaacccaagtgacagtgtctagcggatccggcggcggaggatctggcggaggcggatctgggggcggaggctctttcgaacaagttcagcttcaacagcctggcgctgagctggtcaaacctggcgcttctgtgaagatgagctgcaaagccagcggctacgccttcagcagctactggatcaactggatgaagcagaaacccggccagggactcgaatggatcggccaaatctatcccggcgacggcgacaccaactacaacggcaagttcaagggcagagccacactgaccgccgatacctctagcagcacagcctacatgcagctgagcagcctgaccagcgaagatagcgccgtgtacttctgtgcccggtccatcacaacagtcgtgggctgcgctatggactattggggccagggaacaagcgtgaccgtgtctagtggcggaggcggaagtggaggcggaggatctggcggcggaggctctgacatccagatgacacagagccctagcagcctgtctgccagcgtgggagacagagtgaccatcacatgcaaggccagcgaccacatcaacaactggctggcctggtatcagcagaagcctggacaggcccctaagctgctgatctacggcgctaccacactggaaacaggcgtgcccagcagattttctggcagcggctctggcaccgactacaccctgacaatatccagcctccagcctgaggacttcgccacctactactgtcagcagagctggaacaccccttggacattcggccagggcaccaagctggaaatcaagagaacgcgtgagcagaaactgatctcggaagaggatctggcgaagcccaccacgacgccagcgccgcgaccaccaacaccggcgcccaccatcgcgtcgcagcccctgtccctgcgcccagaggcgtgccggccagcggcggggggcgcagtgcacacgagggggctggacttcgcctgtgacatctacatctgggcgcccttggccgggacttgtggggtccttctcctgtcactggttatcaccctttactgcaaacggggcagaaagaaactcctgtatatattcaaacaaccatttatgagaccagtacaaactactcaagaggaagatggctgtagctgccgatttccagaagaagaagaaggaggatgtgaactgagagtgaagttcagcaggagcgcagacgcccccgcgtaccagcagggccagaaccagctctataacgagctgaatctaggacgaagagaggagtacgatgttttggacaagagacgtggccgggaccctgagatggggggaaagccgagaaggaagaaccctcaggaaggcctgtacaatgaactgcagaaagataagatggcggaggcctacagtgagattgggatgaaaggcgagcgccggaggggcaaggggcacgatggcctttaccagggtctcagtacagccaccaaggacacctacgacgcccttcacatgcaggccctgccccctcgctga

SEQ ID NO: 6396 - DNA, 3363 bp, Artificial Sequence
  Synthetic Polynucloetide
atggccttaccagtgaccgccttgctcctgccgctggccttgctgctccacgccgccaggccggacatccagatgacacagagccctagcagcctgtctgccagcgtgggagacagagtgaccatcacatgcaaggccagcgaccacatcaacaactggctggcctggtatcagcagaagcctggacaggcccctaagctgctgatctacggcgctaccacactggaaacaggcgtgcccagcagattttctggcagcggctctggcaccgactacaccctgacaatatccagcctccagcctgaggacttcgccacctactactgtcagcagagctggaacaccccttggacattcggccagggcaccaagctggaaatcaagagactcgagatccagaaccctgatcctgccgtgtaccagctgcgggatagcaagagcagcgacaagagcgtgtgtctgttcaccgacttcgacagccagaccaacgtgtcccagagcaaggactccgacgtgtacatcaccgataagtgcgtgctggacatgcggagcatggacttcaagagcaactccgccgtggcctggtccaacaagtccgatttcgcctgcgccaacgccttcaacaacagcattatccccgaggacacattcttcccaagcagcgacgtgccctgcgacgtgaagctggtggaaaagagcttcgagacagacaccaacctgaacttccagaacctgagcgtgatcggcttcagaatcctgctgctgaaagtggccggctttaacctgctgatgaccctgcggctgtggtccagccgcgccaagagaagcggatctggcgtgaagcagaccctgaatttcgacctgctgaagctggctggcgacgtggaatccaacccaggccctactagtatggactggatttggcgcatccttttccttgtcggcgctgctaccggcgcccattcccaactgcaactgcaagagtctggccctggcctggtcaagccttctgaaaccctgagcctgacctgtaccgtgtccggcggctctatcagcagcggcgattactactggggctggatcagacagcctccaggcaagggactcgaatggatcggcagcatcagctacagcggctccacctactacaacccaagcctgaagtccagagtgaccatcagcgtggacaccagcagaaaccagttctccctgaagctgagcagcgtgacagccgccgatacagccgtgtattattgcaccagagaggacagcagcaactggcggagtagaggacagggcacactggtcacagtgtcctcttctggaggcggtggaagcggtggaggaggatctgaagtgcagctggttgaatctggcggaggactggttcaggctggcggatctctgagactgtcttgtgccgccagcggcagaacctttagcatgggctggtttagacaggcccctggcaaagagagagagttcgtcgccgccatcacatactctggcggcagcccttactacgccgactctgtgaagggcagattcaccatcagccgggacaacgccaagaacaccgtgtacctccagatgaacagcctgaagcctgaggacaccgccgtgtactactgcgccgccaatccaacatacggcagcgactggaacgccgagaattggggccagggaacccaagtgacagtgtctagcggatccggcggcggaggatctggcggaggcggatctgggggcggaggctctttcgaacaagttcagcttcaacagcctggcgctgagctggtcaaacctggcgcttctgtgaagatgagctgcaaagccagcggctacgccttcagcagctactggatcaactggatgaagcagaaacccggccagggactcgaatggatcggccaaatctatcccggcgacggcgacaccaactacaacggcaagttcaagggcagagccacactgaccgccgatacctctagcagcacagcctacatgcagctgagcagcctgaccagcgaagatagcgccgtgtacttctgtgcccggtccatcacaacagtcgtgggctgcgctatggactattggggccagggaacaagcgtgaccgtgtctagtacgcgtgaggacctgaagaacgtgttcccacctgaggtggccgtgttcgagcctagcaaggccgagatcgcccacacccagaaagccaccctcgtgtgcctggctaccggcttctaccccgaccatgtggaactgtcttggtgggtcaacggcaaagaggtgcacagcggcgtgtgtaccgacccccagccactgaaagaacagcccgccctgaacgacagccggtactgcctgagcagcagactgagagtgtccgccaccttctggcagaacccccggaaccacttcagatgccaggtgcagttctacggcctgagcgagaacgacgagtggacccaggacagagccaagcccgtgacccagatcgtgtctgccgaagcctggggcagagccgattgcggcatcaccagcgccagctaccaccagggcgtgctgagcgccaccatcctgtacgagatcctgctgggcaaggccaccctgtacgccgtgctggtgtctgccctggtgctgatggctatggtcaagcggaaggacagccggggaagggccaagcgatctggatctggagcaacaaacttctcactactcaaacaagcaggtgacgtggaggagaatcccgggccttctagaggccatatgaccgagtacaagcccacggtgcgcctcgccacccgcgacgacgtccccagggccgtacgcaccctcgccgccgcgttcgccgactaccccgccacgcgccacaccgtcgatccggaccgccacatcgagcgggtcaccgagctgcaagaactcttcctcacgcgcgtcgggctcgacatcggcaaggtgtgggtcgcggacgacggcgccgcggtggcggtctggaccacgccggagagcgtcgaagcgggggcggtgttcgccgagatcggcccgcgcatggccgagttgagcggttcccggctggccgcgcagcaacagatggaaggcctcctggcgccgcaccggcccaaggagcccgcgtggttcctggccaccgtcggcgtctcgcccgaccaccagggcaagggtctgggcagcgccgtcgtgctccccggagtggaggcggccgagcgcgccggggtgcccgccttcctggagacctccgcgccccgcaacctccccttctacgagcggctcggcttcaccgtcaccgccgacgtcgaggtgcccgaaggaccgcgcacctggtgcatgacccgcaagcccggtgcctga

SEQ ID NO: 6397 - DNA, 3360 bp, Artificial Sequence
  Synthetic Polynucloetide
atggccttaccagtgaccgccttgctcctgccgctggccttgctgctccacgccgccaggccggacatccagatgacacagagccctagcagcctgtctgccagcgtgggagacagagtgaccatcacatgcaaggccagcgaccacatcaacaactggctggcctggtatcagcagaagcctggacaggcccctaagctgctgatctacggcgctaccacactggaaacaggcgtgcccagcagattttctggcagcggctctggcaccgactacaccctgacaatatccagcctccagcctgaggacttcgccacctactactgtcagcagagctggaacaccccttggacattcggccagggcaccaagctggaaatcaagagactcgaggacctgaagaacgtgttcccacctgaggtggccgtgttcgagcctagcaaggccgagatcgcccacacccagaaagccaccctcgtgtgcctggctaccggcttctaccccgaccatgtggaactgtcttggtgggtcaacggcaaagaggtgcacagcggcgtgtgtaccgacccccagccactgaaagaacagcccgccctgaacgacagccggtactgcctgagcagcagactgagagtgtccgccaccttctggcagaacccccggaaccacttcagatgccaggtgcagttctacggcctgagcgagaacgacgagtggacccaggacagagccaagcccgtgacccagatcgtgtctgccgaagcctggggcagagccgattgcggcatcaccagcgccagctaccaccagggcgtgctgagcgccaccatcctgtacgagatcctgctgggcaaggccaccctgtacgccgtgctggtgtctgccctggtgctgatggctatggtcaagcggaaggacagccggggaagggccaagcgatctggatctggagcaacaaacttctcactactcaaacaagcaggtgacgtggaggagaatcccgggcctactagtatggactggatttggcgcatccttttccttgtcggcgctgctaccggcgcccattcccaactgcaactgcaagagtctggccctggcctggtcaagccttctgaaaccctgagcctgacctgtaccgtgtccggcggctctatcagcagcggcgattactactggggctggatcagacagcctccaggcaagggactcgaatggatcggcagcatcagctacagcggctccacctactacaacccaagcctgaagtccagagtgaccatcagcgtggacaccagcagaaaccagttctccctgaagctgagcagcgtgacagccgccgatacagccgtgtattattgcaccagagaggacagcagcaactggcggagtagaggacagggcacactggtcacagtgtcctcttctggaggcggtggaagcggtggaggaggatctgaagtgcagctggttgaatctggcggaggactggttcaggctggcggatctctgagactgtcttgtgccgccagcggcagaacctttagcatgggctggtttagacaggcccctggcaaagagagagagttcgtcgccgccatcacatactctggcggcagcccttactacgccgactctgtgaagggcagattcaccatcagccgggacaacgccaagaacaccgtgtacctccagatgaacagcctgaagcctgaggacaccgccgtgtactactgcgccgccaatccaacatacggcagcgactggaacgccgagaattggggccagggaacccaagtgacagtgtctagcggatccggcggcggaggatctggcggaggcggatctgggggcggaggctctttcgaacaagttcagcttcaacagcctggcgctgagctggtcaaacctggcgcttctgtgaagatgagctgcaaagccagcggctacgccttcagcagctactggatcaactggatgaagcagaaacccggccagggactcgaatggatcggccaaatctatcccggcgacggcgacaccaactacaacggcaagttcaagggcagagccacactgaccgccgatacctctagcagcacagcctacatgcagctgagcagcctgaccagcgaagatagcgccgtgtacttctgtgcccggtccatcacaacagtcgtgggctgcgctatggactattggggccagggaacaagcgtgaccgtgtctagtacgcgtatccagaaccctgatcctgccgtgtaccagctgcgggatagcaagagcagcgacaagagcgtgtgtctgttcaccgacttcgacagccagaccaacgtgtcccagagcaaggactccgacgtgtacatcaccgataagtgcgtgctggacatgcggagcatggacttcaagagcaactccgccgtggcctggtccaacaagtccgatttcgcctgcgccaacgccttcaacaacagcattatccccgaggacacattcttcccaagcagcgacgtgccctgcgacgtgaagctggtggaaaagagcttcgagacagacaccaacctgaacttccagaacctgagcgtgatcggcttcagaatcctgctgctgaaagtggccggctttaacctgctgatgaccctgcggctgtggtccagccgcgccaagagaagcggatctggcgtgaagcagaccctgaatttcgacctgctgaagctggctggcgacgtggaatccaacccaggcccttctagaggccatatgaccgagtacaagcccacggtgcgcctcgccacccgcgacgacgtccccagggccgtacgcaccctcgccgccgcgttcgccgactaccccgccacgcgccacaccgtcgatccggaccgccacatcgagcgggtcaccgagctgcaagaactcttcctcacgcgcgtcgggctcgacatcggcaaggtgtgggtcgcggacgacggcgccgcggtggcggtctggaccacgccggagagcgtcgaagcgggggcggtgttcgccgagatcggcccgcgcatggccgagttgagcggttcccggctggccgcgcagcaacagatggaaggcctcctggcgccgcaccggcccaaggagcccgcgtggttcctggccaccgtcggcgtctcgcccgaccaccagggcaagggtctgggcagcgccgtcgtgctccccggagtggaggcggccgagcgcgccggggtgcccgccttcctggagacctccgcgccccgcaacctccccttctacgagcggctcggcttcaccgtcaccgccgacgtcgaggtgcccgaaggaccgcgcacctggtgcatgacccgcaagcccggtgcctga

SEQ ID NO: 6398 - DNA, 3360 bp, Artificial Sequence
  Synthetic Polynucloetide
atggccttaccagtgaccgccttgctcctgccgctggccttgctgctccacgccgccaggccggacatccagatgacacagagccctagcagcctgtctgccagcgtgggagacagagtgaccatcacatgcaaggccagcgaccacatcaacaactggctggcctggtatcagcagaagcctggacaggcccctaagctgctgatctacggcgctaccacactggaaacaggcgtgcccagcagattttctggcagcggctctggcaccgactacaccctgacaatatccagcctccagcctgaggacttcgccacctactactgtcagcagagctggaacaccccttggacattcggccagggcaccaagctggaaatcaagagactcgaggacctgaagaacgtgttcccacctgaggtggccgtgttcgagcctagcgaggccgagatcagccacacccagaaagccaccctcgtgtgcctggctaccggcttctaccccgaccatgtggaactgtcttggtgggtcaacggcaaagaggtgcacagcggcgtgtgtaccgacccccagccactgaaagaacagcccgccctgaacgacagccggtactgcctgagcagcagactgagagtgtccgccaccttctggcagaacccccggaaccacttcagatgccaggtgcagttctacggcctgagcgagaacgacgagtggacccaggacagagccaagcccgtgacccagatcgtgtctgccgaagcctggggcagagccgattgcggctttaccagcgagagctaccagcagggcgtgctgagcgccaccatcctgtacgagatcctgctgggcaaggccaccctgtacgccgtgctggtgtctgccctggtgctgatggctatggtcaagcggaaggacagccggggaagggccaagcgatctggatctggagcaacaaacttctcactactcaaacaagcaggtgacgtggaggagaatcccgggcctactagtatggactggatttggcgcatccttttccttgtcggcgctgctaccggcgcccattcccaactgcaactgcaagagtctggccctggcctggtcaagccttctgaaaccctgagcctgacctgtaccgtgtccggcggctctatcagcagcggcgattactactggggctggatcagacagcctccaggcaagggactcgaatggatcggcagcatcagctacagcggctccacctactacaacccaagcctgaagtccagagtgaccatcagcgtggacaccagcagaaaccagttctccctgaagctgagcagcgtgacagccgccgatacagccgtgtattattgcaccagagaggacagcagcaactggcggagtagaggacagggcacactggtcacagtgtcctcttctggaggcggtggaagcggtggaggaggatctgaagtgcagctggttgaatctggcggaggactggttcaggctggcggatctctgagactgtcttgtgccgccagcggcagaacctttagcatgggctggtttagacaggcccctggcaaagagagagagttcgtcgccgccatcacatactctggcggcagcccttactacgccgactctgtgaagggcagattcaccatcagccgggacaacgccaagaacaccgtgtacctccagatgaacagcctgaagcctgaggacaccgccgtgtactactgcgccgccaatccaacatacggcagcgactggaacgccgagaattggggccagggaacccaagtgacagtgtctagcggatccggcggcggaggatctggcggaggcggatctgggggcggaggctctttcgaacaagttcagcttcaacagcctggcgctgagctggtcaaacctggcgcttctgtgaagatgagctgcaaagccagcggctacgccttcagcagctactggatcaactggatgaagcagaaacccggccagggactcgaatggatcggccaaatctatcccggcgacggcgacaccaactacaacggcaagttcaagggcagagccacactgaccgccgatacctctagcagcacagcctacatgcagctgagcagcctgaccagcgaagatagcgccgtgtacttctgtgcccggtccatcacaacagtcgtgggctgcgctatggactattggggccagggaacaagcgtgaccgtgtctagtacgcgtatccagaaccctgatcctgccgtgtaccagctgcgggatagcaagagcagcgacaagagcgtgtgtctgttcaccgacttcgacagccagaccaacgtgtcccagagcaaggactccgacgtgtacatcaccgataagtgcgtgctggacatgcggagcatggacttcaagagcaactccgccgtggcctggtccaacaagtccgatttcgcctgcgccaacgccttcaacaacagcattatccccgaggacacattcttcccaagccccgagagcagctgcgacgtgaagctggtggaaaagagcttcgagacagacaccaacctgaacttccagaacctgagcgtgatcggcttcagaatcctgctgctgaaagtggccggctttaacctgctgatgaccctgcggctgtggtccagccgcgccaagagaagcggatctggcgtgaagcagaccctgaatttcgacctgctgaagctggctggcgacgtggaatccaacccaggcccttctagaggccatatgaccgagtacaagcccacggtgcgcctcgccacccgcgacgacgtccccagggccgtacgcaccctcgccgccgcgttcgccgactaccccgccacgcgccacaccgtcgatccggaccgccacatcgagcgggtcaccgagctgcaagaactcttcctcacgcgcgtcgggctcgacatcggcaaggtgtgggtcgcggacgacggcgccgcggtggcggtctggaccacgccggagagcgtcgaagcgggggcggtgttcgccgagatcggcccgcgcatggccgagttgagcggttcccggctggccgcgcagcaacagatggaaggcctcctggcgccgcaccggcccaaggagcccgcgtggttcctggccaccgtcggcgtctcgcccgaccaccagggcaagggtctgggcagcgccgtcgtgctccccggagtggaggcggccgagcgcgccggggtgcccgccttcctggagacctccgcgccccgcaacctccccttctacgagcggctcggcttcaccgtcaccgccgacgtcgaggtgcccgaaggaccgcgcacctggtgcatgacccgcaagcccggtgcctga

SEQ ID NO: 6399 - DNA, 2658 bp, Artificial Sequence
  Synthetic Polynucloetide
atggccttaccagtgaccgccttgctcctgccgctggccttgctgctccacgccgccaggccggacatccagatgacacagagccctagcagcctgtctgccagcgtgggagacagagtgaccatcacatgcaaggccagcgaccacatcaacaactggctggcctggtatcagcagaagcctggacaggcccctaagctgctgatctacggcgctaccacactggaaacaggcgtgcccagcagattttctggcagcggctctggcaccgactacaccctgacaatatccagcctccagcctgaggacttcgccacctactactgtcagcagagctggaacaccccttggacattcggccagggcaccaagctggaaatcaagagactcgaggacctgaagaacgtgttcccacctgaggtggccgtgttcgagcctagcgaggccgagatcagccacacccagaaagccaccctcgtgtgcctggctaccggcttctaccccgaccatgtggaactgtcttggtgggtcaacggcaaagaggtgcacagcggcgtgtgtaccgacccccagccactgaaagaacagcccgccctgaacgacagccggtactgcctgagcagcagactgagagtgtccgccaccttctggcagaacccccggaaccacttcagatgccaggtgcagttctacggcctgagcgagaacgacgagtggacccaggacagagccaagcccgtgacccagatcgtgtctgccgaagcctggggcagagccgattgcggctttaccagcgagagctaccagcagggcgtgctgagcgccaccatcctgtacgagatcctgctgggcaaggccaccctgtacgccgtgctggtgtctgccctggtgctgatggctatggtcaagcggaaggacagccggggaagggccaagcgatctggatctggagcaacaaacttctcactactcaaacaagcaggtgacgtggaggagaatcccgggcctactagtatggactggatttggcgcatccttttccttgtcggcgctgctaccggcgcccattcccaactgcaactgcaagagtctggccctggcctggtcaagccttctgaaaccctgagcctgacctgtaccgtgtccggcggctctatcagcagcggcgattactactggggctggatcagacagcctccaggcaagggactcgaatggatcggcagcatcagctacagcggctccacctactacaacccaagcctgaagtccagagtgaccatcagcgtggacaccagcagaaaccagttctccctgaagctgagcagcgtgacagccgccgatacagccgtgtattattgcaccagagaggacagcagcaactggcggagtagaggacagggcacactggtcacagtgtcctcttctggaggcggtggaagcggtggaggaggatctgaagtgcagctggttgaatctggcggaggactggttcaggctggcggatctctgagactgtcttgtgccgccagcggcagaacctttagcatgggctggtttagacaggcccctggcaaagagagagagttcgtcgccgccatcacatactctggcggcagcccttactacgccgactctgtgaagggcagattcaccatcagccgggacaacgccaagaacaccgtgtacctccagatgaacagcctgaagcctgaggacaccgccgtgtactactgcgccgccaatccaacatacggcagcgactggaacgccgagaattggggccagggaacccaagtgacagtgtctagcggatccggcggcggaggatctggcggaggcggatctgggggcggaggctctttcgaacaagttcagcttcaacagcctggcgctgagctggtcaaacctggcgcttctgtgaagatgagctgcaaagccagcggctacgccttcagcagctactggatcaactggatgaagcagaaacccggccagggactcgaatggatcggccaaatctatcccggcgacggcgacaccaactacaacggcaagttcaagggcagagccacactgaccgccgatacctctagcagcacagcctacatgcagctgagcagcctgaccagcgaagatagcgccgtgtacttctgtgcccggtccatcacaacagtcgtgggctgcgctatggactattggggccagggaacaagcgtgaccgtgtctagtacgcgtatccagaaccctgatcctgccgtgtaccagctgcgggatagcaagagcagcgacaagagcgtgtgtctgttcaccgacttcgacagccagaccaacgtgtcccagagcaaggactccgacgtgtacatcaccgataagtgcgtgctggacatgcggagcatggacttcaagagcaactccgccgtggcctggtccaacaagtccgatttcgcctgcgccaacgccttcaacaacagcattatccccgaggacacattcttcccaagccccgagagcagctgcgacgtgaagctggtggaaaagagcttcgagacagacaccaacctgaacttccagaacctgagcgtgatcggcttcagaatcctgctgctgaaagtggccggctttaacctgctgatgaccctgcggctgtggtccagc

SEQ ID NO: 6400 - DNA, 3333 bp, Artificial Sequence
  Synthetic Polynucloetide
atggccttaccagtgaccgccttgctcctgccgctggccttgctgctccacgccgccaggccggacatccagatgacacagagccctagcagcctgtctgccagcgtgggagacagagtgaccatcacatgcaaggccagcgaccacatcaacaactggctggcctggtatcagcagaagcctggacaggcccctaagctgctgatctacggcgctaccacactggaaacaggcgtgcccagcagattttctggcagcggctctggcaccgactacaccctgacaatatccagcctccagcctgaggacttcgccacctactactgtcagcagagctggaacaccccttggacattcggccagggcaccaagctggaaatcaagagactcgaggacctgaagaacgtgttcccacctgaggtggccgtgttcgagcctagcgaggccgagatcagccacacccagaaagccaccctcgtgtgcctggctaccggcttctaccccgaccatgtggaactgtcttggtgggtcaacggcaaagaggtgcacagcggcgtgtgtaccgacccccagccactgaaagaacagcccgccctgaacgacagccggtactgcctgagcagcagactgagagtgtccgccaccttctggcagaacccccggaaccacttcagatgccaggtgcagttctacggcctgagcgagaacgacgagtggacccaggacagagccaagcccgtgacccagatcgtgtctgccgaagcctggggcagagccgattgcggctttaccagcgagagctaccagcagggcgtgctgagcgccaccatcctgtacgagatcctgctgggcaaggccaccctgtacgccgtgctggtgtctgccctggtgctgatggctatggtcaagcggaaggacagccggggaagggccaagcgatctggatctggagcaacaaacttctcactactcaaacaagcaggtgacgtggaggagaatcccgggcctactagtatggactggatttggcgcatccttttccttgtcggcgctgctaccggcgcccattcccaactgcaactgcaagagtctggccctggcctggtcaagccttctgaaaccctgagcctgacctgtaccgtgtccggcggctctatcagcagcggcgattactactggggctggatcagacagcctccaggcaagggactcgaatggatcggcagcatcagctacagcggctccacctactacaacccaagcctgaagtccagagtgaccatcagcgtggacaccagcagaaaccagttctccctgaagctgagcagcgtgacagccgccgatacagccgtgtattattgcaccagagaggacagcagcaactggcggagtagaggacagggcacactggtcacagtgtcctcttctggaggcggtggaagcggtggaggaggatctgaagtgcagctggttgaatctggcggaggactggttcaggctggcggatctctgagactgtcttgtgccgccagcggcagaacctttagcatgggctggtttagacaggcccctggcaaagagagagagttcgtcgccgccatcacatactctggcggcagcccttactacgccgactctgtgaagggcagattcaccatcagccgggacaacgccaagaacaccgtgtacctccagatgaacagcctgaagcctgaggacaccgccgtgtactactgcgccgccaatccaacatacggcagcgactggaacgccgagaattggggccagggaacccaagtgacagtgtctagcggatccggcggcggaggatctggcggaggcggatctgggggcggaggctctttcgaacaagttcagcttcaacagcctggcgctgagctggtcaaacctggcgcttctgtgaagatgagctgcaaagccagcggctacgccttcagcagctactggatcaactggatgaagcagaaacccggccagggactcgaatggatcggccaaatctatcccggcgacggcgacaccaactacaacggcaagttcaagggcagagccacactgaccgccgatacctctagcagcacagcctacatgcagctgagcagcctgaccagcgaagatagcgccgtgtacttctgtgcccggtccatcacaacagtcgtgggctgcgctatggactattggggccagggaacaagcgtgaccgtgtctagtacgcgtatccagaaccctgatcctgccgtgtaccagctgcgggatagcaagagcagcgacaagagcgtgtgtctgttcaccgacttcgacagccagaccaacgtgtcccagagcaaggactccgacgtgtacatcaccgataagtgcgtgctggacatgcggagcatggacttcaagagcaactccgccgtggcctggtccaacaagtccgatttcgcctgcgccaacgccttcaacaacagcattatccccgaggacacattcttcccaagccccgagagcagctgcgacgtgaagctggtggaaaagagcttcgagacagacaccaacctgaacttccagaacctgagcgtgatcggcttcagaatcctgctgctgaaagtggccggctttaacctgctgatgaccctgcggctgtggtccagccgcgccaagagaagcggatctggcgtgaagcagaccctgaatttcgacctgctgaagctggctggcgacgtggaatccaacccaggcccttctagaggcgggatccacaccatggctacctacgaggtgctgtgcgaggtggcaagaaagctgggcaccgacgacagagaagtggtgctgttcctgctgaacgtgttcatccctcagcctacactggcccagctgatcggtgcactgagagccctgaaagaggaaggccggctgacctttcctctgctggccgaatgcctgttcagagccggaagaagggatctgctgcgggacctgctgcatctggaccccagatttctggaaagacacctggccggcaccatgagctacttcagcccttaccagctgaccgtgctgcacgttgacggcgaactgtgcgccagagatattcggagcctgatcttcctgagcaaggacaccatcggcagccggtctacccctcagacatttctgcactgggtgtactgcatggaaaacctggacctgctcggccccacagatgtggatgccctgatgtccatgctgagaagcctgagcagagtggacctccagagacaggtgcagacactgatgggactgcacctgagcggacctagccacagccagcactacagacacacccct

SEQ ID NO: 6401 - DNA, 2670 bp, Artificial Sequence
  Synthetic Polynucloetide
atggccttaccagtgaccgccttgctcctgccgctggccttgctgctccacgccgccaggccggacatccagatgacacagagccctagcagcctgtctgccagcgtgggagacagagtgaccatcacatgcaaggccagcgaccacatcaacaactggctggcctggtatcagcagaagcctggacaggcccctaagctgctgatctacggcgctaccacactggaaacaggcgtgcccagcagattttctggcagcggctctggcaccgactacaccctgacaatatccagcctccagcctgaggacttcgccacctactactgtcagcagagctggaacaccccttggacattcggccagggcaccaagctggaaatcaagagactcgagatccagaaccctgatcctgccgtgtaccagctgcgggatagcaagagcagcgacaagagcgtgtgtctgttcaccgacttcgacagccagaccaacgtgtcccagagcaaggactccgacgtgtacatcaccgataagtgcgtgctggacatgcggagcatggacttcaagagcaactccgccgtggcctggtccaacaagtccgatttcgcctgcgccaacgccttcaacaacagcattatccccgaggacacattcttcccaagccccgagagcagctgcgacgtgaagctggtggaaaagagcttcgagacagacaccaacctgaacttccagaacctgagcgtgatcggcttcagaatcctgctgctgaaagtggccggctttaacctgctgatgaccctgcggctgtggtccagccgcgccaagagaagcggatctggcgtgaagcagaccctgaatttcgacctgctgaagctggctggcgacgtggaatccaacccaggccctactagtatggactggatttggcgcatccttttccttgtcggcgctgctaccggcgcccattcccaactgcaactgcaagagtctggccctggcctggtcaagccttctgaaaccctgagcctgacctgtaccgtgtccggcggctctatcagcagcggcgattactactggggctggatcagacagcctccaggcaagggactcgaatggatcggcagcatcagctacagcggctccacctactacaacccaagcctgaagtccagagtgaccatcagcgtggacaccagcagaaaccagttctccctgaagctgagcagcgtgacagccgccgatacagccgtgtattattgcaccagagaggacagcagcaactggcggagtagaggacagggcacactggtcacagtgtcctcttctggaggcggtggaagcggtggaggaggatctgaagtgcagctggttgaatctggcggaggactggttcaggctggcggatctctgagactgtcttgtgccgccagcggcagaacctttagcatgggctggtttagacaggcccctggcaaagagagagagttcgtcgccgccatcacatactctggcggcagcccttactacgccgactctgtgaagggcagattcaccatcagccgggacaacgccaagaacaccgtgtacctccagatgaacagcctgaagcctgaggacaccgccgtgtactactgcgccgccaatccaacatacggcagcgactggaacgccgagaattggggccagggaacccaagtgacagtgtctagcggatccggcggcggaggatctggcggaggcggatctgggggcggaggctctttcgaacaagttcagcttcaacagcctggcgctgagctggtcaaacctggcgcttctgtgaagatgagctgcaaagccagcggctacgccttcagcagctactggatcaactggatgaagcagaaacccggccagggactcgaatggatcggccaaatctatcccggcgacggcgacaccaactacaacggcaagttcaagggcagagccacactgaccgccgatacctctagcagcacagcctacatgcagctgagcagcctgaccagcgaagatagcgccgtgtacttctgtgcccggtccatcacaacagtcgtgggctgcgctatggactattggggccagggaacaagcgtgaccgtgtctagtacgcgtgaggacctgaagaacgtgttcccacctgaggtggccgtgttcgagcctagcgaggccgagatcagccacacccagaaagccaccctcgtgtgcctggctaccggcttctaccccgaccatgtggaactgtcttggtgggtcaacggcaaagaggtgcacagcggcgtgtgtaccgacccccagccactgaaagaacagcccgccctgaacgacagccggtactgcctgagcagcagactgagagtgtccgccaccttctggcagaacccccggaaccacttcagatgccaggtgcagttctacggcctgagcgagaacgacgagtggacccaggacagagccaagcccgtgacccagatcgtgtctgccgaagcctggggcagagccgattgcggctttaccagcgagagctaccagcagggcgtgctgagcgccaccatcctgtacgagatcctgctgggcaaggccaccctgtacgccgtgctggtgtctgccctggtgctgatggctatggtcaagcggaaggacagccgggga

SEQ ID NO: 6402 - DNA, 3336 bp, Artificial Sequence
  Synthetic Polynucloetide
atggccttaccagtgaccgccttgctcctgccgctggccttgctgctccacgccgccaggccggacatccagatgacacagagccctagcagcctgtctgccagcgtgggagacagagtgaccatcacatgcaaggccagcgaccacatcaacaactggctggcctggtatcagcagaagcctggacaggcccctaagctgctgatctacggcgctaccacactggaaacaggcgtgcccagcagattttctggcagcggctctggcaccgactacaccctgacaatatccagcctccagcctgaggacttcgccacctactactgtcagcagagctggaacaccccttggacattcggccagggcaccaagctggaaatcaagagactcgagatccagaaccctgatcctgccgtgtaccagctgcgggatagcaagagcagcgacaagagcgtgtgtctgttcaccgacttcgacagccagaccaacgtgtcccagagcaaggactccgacgtgtacatcaccgataagtgcgtgctggacatgcggagcatggacttcaagagcaactccgccgtggcctggtccaacaagtccgatttcgcctgcgccaacgccttcaacaacagcattatccccgaggacacattcttcccaagccccgagagcagctgcgacgtgaagctggtggaaaagagcttcgagacagacaccaacctgaacttccagaacctgagcgtgatcggcttcagaatcctgctgctgaaagtggccggctttaacctgctgatgaccctgcggctgtggtccagccgcgccaagagaagcggatctggcgtgaagcagaccctgaatttcgacctgctgaagctggctggcgacgtggaatccaacccaggccctactagtatggactggatttggcgcatccttttccttgtcggcgctgctaccggcgcccattcccaactgcaactgcaagagtctggccctggcctggtcaagccttctgaaaccctgagcctgacctgtaccgtgtccggcggctctatcagcagcggcgattactactggggctggatcagacagcctccaggcaagggactcgaatggatcggcagcatcagctacagcggctccacctactacaacccaagcctgaagtccagagtgaccatcagcgtggacaccagcagaaaccagttctccctgaagctgagcagcgtgacagccgccgatacagccgtgtattattgcaccagagaggacagcagcaactggcggagtagaggacagggcacactggtcacagtgtcctcttctggaggcggtggaagcggtggaggaggatctgaagtgcagctggttgaatctggcggaggactggttcaggctggcggatctctgagactgtcttgtgccgccagcggcagaacctttagcatgggctggtttagacaggcccctggcaaagagagagagttcgtcgccgccatcacatactctggcggcagcccttactacgccgactctgtgaagggcagattcaccatcagccgggacaacgccaagaacaccgtgtacctccagatgaacagcctgaagcctgaggacaccgccgtgtactactgcgccgccaatccaacatacggcagcgactggaacgccgagaattggggccagggaacccaagtgacagtgtctagcggatccggcggcggaggatctggcggaggcggatctgggggcggaggctctttcgaacaagttcagcttcaacagcctggcgctgagctggtcaaacctggcgcttctgtgaagatgagctgcaaagccagcggctacgccttcagcagctactggatcaactggatgaagcagaaacccggccagggactcgaatggatcggccaaatctatcccggcgacggcgacaccaactacaacggcaagttcaagggcagagccacactgaccgccgatacctctagcagcacagcctacatgcagctgagcagcctgaccagcgaagatagcgccgtgtacttctgtgcccggtccatcacaacagtcgtgggctgcgctatggactattggggccagggaacaagcgtgaccgtgtctagtacgcgtgaggacctgaagaacgtgttcccacctgaggtggccgtgttcgagcctagcgaggccgagatcagccacacccagaaagccaccctcgtgtgcctggctaccggcttctaccccgaccatgtggaactgtcttggtgggtcaacggcaaagaggtgcacagcggcgtgtgtaccgacccccagccactgaaagaacagcccgccctgaacgacagccggtactgcctgagcagcagactgagagtgtccgccaccttctggcagaacccccggaaccacttcagatgccaggtgcagttctacggcctgagcgagaacgacgagtggacccaggacagagccaagcccgtgacccagatcgtgtctgccgaagcctggggcagagccgattgcggctttaccagcgagagctaccagcagggcgtgctgagcgccaccatcctgtacgagatcctgctgggcaaggccaccctgtacgccgtgctggtgtctgccctggtgctgatggctatggtcaagcggaaggacagccggggaagggccaagcgatctggatctggagcaacaaacttctcactactcaaacaagcaggtgacgtggaggagaatcccgggccttctagaggcgggatccacaccatggctacctacgaggtgctgtgcgaggtggcaagaaagctgggcaccgacgacagagaagtggtgctgttcctgctgaacgtgttcatccctcagcctacactggcccagctgatcggtgcactgagagccctgaaagaggaaggccggctgacctttcctctgctggccgaatgcctgttcagagccggaagaagggatctgctgcgggacctgctgcatctggaccccagatttctggaaagacacctggccggcaccatgagctacttcagcccttaccagctgaccgtgctgcacgttgacggcgaactgtgcgccagagatattcggagcctgatcttcctgagcaaggacaccatcggcagccggtctacccctcagacatttctgcactgggtgtactgcatggaaaacctggacctgctcggccccacagatgtggatgccctgatgtccatgctgagaagcctgagcagagtggacctccagagacaggtgcagacactgatgggactgcacctgagcggacctagccacagccagcactacagacacacccct

SEQ ID NO: 6403 - DNA, 3360 bp, Artificial Sequence
  Synthetic Polynucloetide
atggccttaccagtgaccgccttgctcctgccgctggccttgctgctccacgccgccaggccggacatccagatgacacagagccctagcagcctgtctgccagcgtgggagacagagtgaccatcacatgcaaggccagcgaccacatcaacaactggctggcctggtatcagcagaagcctggacaggcccctaagctgctgatctacggcgctaccacactggaaacaggcgtgcccagcagattttctggcagcggctctggcaccgactacaccctgacaatatccagcctccagcctgaggacttcgccacctactactgtcagcagagctggaacaccccttggacattcggccagggcaccaagctggaaatcaagagactcgaggacctgaagaacgtgttcccacctgaggtggccgtgttcgagcctagcgaggccgagatcagccacacccagaaagccaccctcgtgtgcctggctaccggcttctaccccgaccatgtggaactgtcttggtgggtcaacggcaaagaggtgcacagcggcgtgtctaccgacccccagccactgaaagaacagcccgccctgaacgacagccggtactgcctgagcagcagactgagagtgtccgccaccttctggcagaacccccggaaccacttcagatgccaggtgcagttctacggcctgagcgagaacgacgagtggacccaggacagagccaagcccgtgacccagatcgtgtctgccgaagcctggggcagagccgattgcggctttaccagcgagagctaccagcagggcgtgctgagcgccaccatcctgtacgagatcctgctgggcaaggccaccctgtacgccgtgctggtgtctgccctggtgctgatggctatggtcaagcggaaggacagccggggaagggccaagcgatctggatctggagcaacaaacttctcactactcaaacaagcaggtgacgtggaggagaatcccgggcctactagtatggactggatttggcgcatccttttccttgtcggcgctgctaccggcgcccattcccaactgcaactgcaagagtctggccctggcctggtcaagccttctgaaaccctgagcctgacctgtaccgtgtccggcggctctatcagcagcggcgattactactggggctggatcagacagcctccaggcaagggactcgaatggatcggcagcatcagctacagcggctccacctactacaacccaagcctgaagtccagagtgaccatcagcgtggacaccagcagaaaccagttctccctgaagctgagcagcgtgacagccgccgatacagccgtgtattattgcaccagagaggacagcagcaactggcggagtagaggacagggcacactggtcacagtgtcctcttctggaggcggtggaagcggtggaggaggatctgaagtgcagctggttgaatctggcggaggactggttcaggctggcggatctctgagactgtcttgtgccgccagcggcagaacctttagcatgggctggtttagacaggcccctggcaaagagagagagttcgtcgccgccatcacatactctggcggcagcccttactacgccgactctgtgaagggcagattcaccatcagccgggacaacgccaagaacaccgtgtacctccagatgaacagcctgaagcctgaggacaccgccgtgtactactgcgccgccaatccaacatacggcagcgactggaacgccgagaattggggccagggaacccaagtgacagtgtctagcggatccggcggcggaggatctggcggaggcggatctgggggcggaggctctttcgaacaagttcagcttcaacagcctggcgctgagctggtcaaacctggcgcttctgtgaagatgagctgcaaagccagcggctacgccttcagcagctactggatcaactggatgaagcagaaacccggccagggactcgaatggatcggccaaatctatcccggcgacggcgacaccaactacaacggcaagttcaagggcagagccacactgaccgccgatacctctagcagcacagcctacatgcagctgagcagcctgaccagcgaagatagcgccgtgtacttctgtgcccggtccatcacaacagtcgtgggctgcgctatggactattggggccagggaacaagcgtgaccgtgtctagtacgcgtatccagaaccctgatcctgccgtgtaccagctgcgggatagcaagagcagcgacaagagcgtgtgtctgttcaccgacttcgacagccagaccaacgtgtcccagagcaaggactccgacgtgtacatcaccgataagaccgtgctggacatgcggagcatggacttcaagagcaactccgccgtggcctggtccaacaagtccgatttcgcctgcgccaacgccttcaacaacagcattatccccgaggacacattcttcccaagccccgagagcagctgcgacgtgaagctggtggaaaagagcttcgagacagacaccaacctgaacttccagaacctgagcgtgatcggcttcagaatcctgctgctgaaagtggccggctttaacctgctgatgaccctgcggctgtggtccagccgcgccaagagaagcggatctggcgtgaagcagaccctgaatttcgacctgctgaagctggctggcgacgtggaatccaacccaggcccttctagaggccatatgaccgagtacaagcccacggtgcgcctcgccacccgcgacgacgtccccagggccgtacgcaccctcgccgccgcgttcgccgactaccccgccacgcgccacaccgtcgatccggaccgccacatcgagcgggtcaccgagctgcaagaactcttcctcacgcgcgtcgggctcgacatcggcaaggtgtgggtcgcggacgacggcgccgcggtggcggtctggaccacgccggagagcgtcgaagcgggggcggtgttcgccgagatcggcccgcgcatggccgagttgagcggttcccggctggccgcgcagcaacagatggaaggcctcctggcgccgcaccggcccaaggagcccgcgtggttcctggccaccgtcggcgtctcgcccgaccaccagggcaagggtctgggcagcgccgtcgtgctccccggagtggaggcggccgagcgcgccggggtgcccgccttcctggagacctccgcgccccgcaacctccccttctacgagcggctcggcttcaccgtcaccgccgacgtcgaggtgcccgaaggaccgcgcacctggtgcatgacccgcaagcccggtgcctga

SEQ ID NO: 6404 - DNA, 3606 bp, Artificial Sequence
  Synthetic Polynucloetide
atggccttaccagtgaccgccttgctcctgccgctggccttgctgctccacgccgccaggccggacatccagatgacacagagccctagcagcctgtctgccagcgtgggagacagagtgaccatcacatgcaaggccagcgaccacatcaacaactggctggcctggtatcagcagaagcctggacaggcccctaagctgctgatctacggcgctaccacactggaaacaggcgtgcccagcagattttctggcagcggctctggcaccgactacaccctgacaatatccagcctccagcctgaggacttcgccacctactactgtcagcagagctggaacaccccttggacattcggccagggcaccaagctggaaatcaagagactcgaggacctgaagaacgtgttcccacctgaggtggccgtgttcgagcctagcgaggccgagatcagccacacccagaaagccaccctcgtgtgcctggctaccggcttctaccccgaccatgtggaactgtcttggtgggtcaacggcaaagaggtgcacagcggcgtgtctaccgacccccagccactgaaagaacagcccgccctgaacgacagccggtactgcctgagcagcagactgagagtgtccgccaccttctggcagaacccccggaaccacttcagatgccaggtgcagttctacggcctgagcgagaacgacgagtggacccaggacagagccaagcccgtgacccagatcgtgtctgccgaagcctggggcagagccgattgcggctttaccagcgagagctaccagcagggcgtgctgagcgccaccatcctgtacgagatcctgctgggcaaggccaccctgtacgccgtgctggtgtctgccctggtgctgatggctatggtcaagcggaaggacagccggggaagggccaagcgatctggatctggagcaacaaacttctcactactcaaacaagcaggtgacgtggaggagaatcccgggcctactagtatggactggatttggcgcatccttttccttgtcggcgctgctaccggcgcccattcccaactgcaactgcaagagtctggccctggcctggtcaagccttctgaaaccctgagcctgacctgtaccgtgtccggcggctctatcagcagcggcgattactactggggctggatcagacagcctccaggcaagggactcgaatggatcggcagcatcagctacagcggctccacctactacaacccaagcctgaagtccagagtgaccatcagcgtggacaccagcagaaaccagttctccctgaagctgagcagcgtgacagccgccgatacagccgtgtattattgcaccagagaggacagcagcaactggcggagtagaggacagggcacactggtcacagtgtcctcttctggaggcggtggaagcggtggaggaggatctgaagtgcagctggttgaatctggcggaggactggttcaggctggcggatctctgagactgtcttgtgccgccagcggcagaacctttagcatgggctggtttagacaggcccctggcaaagagagagagttcgtcgccgccatcacatactctggcggcagcccttactacgccgactctgtgaagggcagattcaccatcagccgggacaacgccaagaacaccgtgtacctccagatgaacagcctgaagcctgaggacaccgccgtgtactactgcgccgccaatccaacatacggcagcgactggaacgccgagaattggggccagggaacccaagtgacagtgtctagcggatccggcggcggaggatctggcggaggcggatctgggggcggaggctctttcgaacaagttcagcttcaacagcctggcgctgagctggtcaaacctggcgcttctgtgaagatgagctgcaaagccagcggctacgccttcagcagctactggatcaactggatgaagcagaaacccggccagggactcgaatggatcggccaaatctatcccggcgacggcgacaccaactacaacggcaagttcaagggcagagccacactgaccgccgatacctctagcagcacagcctacatgcagctgagcagcctgaccagcgaagatagcgccgtgtacttctgtgcccggtccatcacaacagtcgtgggctgcgctatggactattggggccagggaacaagcgtgaccgtgtctagtacgcgtgagcagaaactgatctcggaagaggatgggagcggcaccccattcccttctctggcccctcccatcatgctgctggtggacggcaagcagcagatggtggtcgtgtgcctggtgctggatgtggccccacctggactggacagccccatctggtttagcgccggcaatggctctgccctggacgcctttacctacggcccaagccctgccaccgatggcacctggacaaatctggcccacctgagcctgcccagcgaggaactggcttcttgggagcctctcgtgtgccacacaggacctggcgctgagggacacagcagatccacccagcctatgcacctgtctggcgaggccagcaccgccagaacctgtcctcaggaacctctgagaggcacccctggcggagcactgtggctgggagtgctgagactgctgctgttcaagctgctgctgtttgacctgctgctgacctgctcctgtctgtgcgatcctgccggccctctgccttctcctgccaccaccacaagactgagagccctgggcagccacagactgcaccctgccacagagacaggcggcagagaggccacaagcagccctagaccccagcccagagacagaagatggggcgataccccccctggcagaaagcctggatctccagtccgcgccaagagaagcggatctggcgtgaagcagaccctgaatttcgacctgctgaagctggctggcgacgtggaatccaacccaggcccttctagaggccatatgaccgagtacaagcccacggtgcgcctcgccacccgcgacgacgtccccagggccgtacgcaccctcgccgccgcgttcgccgactaccccgccacgcgccacaccgtcgatccggaccgccacatcgagcgggtcaccgagctgcaagaactcttcctcacgcgcgtcgggctcgacatcggcaaggtgtgggtcgcggacgacggcgccgcggtggcggtctggaccacgccggagagcgtcgaagcgggggcggtgttcgccgagatcggcccgcgcatggccgagttgagcggttcccggctggccgcgcagcaacagatggaaggcctcctggcgccgcaccggcccaaggagcccgcgtggttcctggccaccgtcggcgtctcgcccgaccaccagggcaagggtctgggcagcgccgtcgtgctccccggagtggaggcggccgagcgcgccggggtgcccgccttcctggagacctccgcgccccgcaacctccccttctacgagcggctcggcttcaccgtcaccgccgacgtcgaggtgcccgaaggaccgcgcacctggtgcatgacccgcaagcccggtgcctga

SEQ ID NO: 6405 - DNA, 3471 bp, Artificial Sequence
  Synthetic Polynucloetide
atggccttaccagtgaccgccttgctcctgccgctggccttgctgctccacgccgccaggccggacatccagatgacacagagccctagcagcctgtctgccagcgtgggagacagagtgaccatcacatgcaaggccagcgaccacatcaacaactggctggcctggtatcagcagaagcctggacaggcccctaagctgctgatctacggcgctaccacactggaaacaggcgtgcccagcagattttctggcagcggctctggcaccgactacaccctgacaatatccagcctccagcctgaggacttcgccacctactactgtcagcagagctggaacaccccttggacattcggccagggcaccaagctggaaatcaagagactcgaggggaaaccaattcccaaccctcttctgggactggattcaaccggcagcggcgacaagcagctggacgccgacgtgtcccccaagcctaccatcttcctgccctctatcgccgagacaaagctccagaaggccggcacctacctgtgcctgctggaaaagttcttcccagatgtgattaagatccactggcaggaaaagaagtccaacaccatcctgggcagccaggaaggcaacaccatgaagaccaacgacacctacatgaagttcagctggctgaccgtgcccgagaagtccctggacaaagaacacagatgcatcgtgcggcacgaaaacaacaagaacggcgtggaccaggaaatcatcttcccacccatcaagaccgatgtgattacaatggaccccaaggacaactgctccaaggacgccaacgataccctgctgctccagctgaccaacaccagcgcctactacatgtacttgttgctgctgctgaagtccgtggtgtacttcgccatcatcacatgctgcctgctgcggagaaccgccttctgctgcaacggcgagaagtctagggccaagcgatctggatctggagcaacaaacttctcactactcaaacaagcaggtgacgtggaggagaatcccgggcctactagtatggactggatttggcgcatccttttccttgtcggcgctgctaccggcgcccattcccaactgcaactgcaagagtctggccctggcctggtcaagccttctgaaaccctgagcctgacctgtaccgtgtccggcggctctatcagcagcggcgattactactggggctggatcagacagcctccaggcaagggactcgaatggatcggcagcatcagctacagcggctccacctactacaacccaagcctgaagtccagagtgaccatcagcgtggacaccagcagaaaccagttctccctgaagctgagcagcgtgacagccgccgatacagccgtgtattattgcaccagagaggacagcagcaactggcggagtagaggacagggcacactggtcacagtgtcctcttctggaggcggtggaagcggtggaggaggatctgaagtgcagctggttgaatctggcggaggactggttcaggctggcggatctctgagactgtcttgtgccgccagcggcagaacctttagcatgggctggtttagacaggcccctggcaaagagagagagttcgtcgccgccatcacatactctggcggcagcccttactacgccgactctgtgaagggcagattcaccatcagccgggacaacgccaagaacaccgtgtacctccagatgaacagcctgaagcctgaggacaccgccgtgtactactgcgccgccaatccaacatacggcagcgactggaacgccgagaattggggccagggaacccaagtgacagtgtctagcggatccggcggcggaggatctggcggaggcggatctgggggcggaggctctttcgaacaagttcagcttcaacagcctggcgctgagctggtcaaacctggcgcttctgtgaagatgagctgcaaagccagcggctacgccttcagcagctactggatcaactggatgaagcagaaacccggccagggactcgaatggatcggccaaatctatcccggcgacggcgacaccaactacaacggcaagttcaagggcagagccacactgaccgccgatacctctagcagcacagcctacatgcagctgagcagcctgaccagcgaagatagcgccgtgtacttctgtgcccggtccatcacaacagtcgtgggctgcgctatggactattggggccagggaacaagcgtgaccgtgtctagtacgcgtgagcagaaactgatctcggaagaggatgggagcggcagccagcctcacaccaagcccagcgtgttcgtgatgaagaacggcaccaacgtggcctgcctcgtgaaagagttctaccccaaggacatcaggatcaacctggtgtccagcaagaagatcaccgagttcgaccccgccatcgtgatctcccccagcggcaagtacaacgccgtgaagctggggaagtacgaggacagcaacagcgtgacctgctccgtgcagcacgacaacaagaccgtgcacagcaccgactttgaagtgaaaaccgactccaccgaccacgtgaagcccaaagagacagagaacaccaagcagcccagcaagagctgccacaagcccaaggccatcgtgcacaccgagaaagtgaacatgatgagcctgaccgtgctgggcctgcggatgctgttcgccaaaaccgtggccgtgaacttcctgctgaccgccaagctgttcttcctccgcgccaagagaagcggatctggcgtgaagcagaccctgaatttcgacctgctgaagctggctggcgacgtggaatccaacccaggcccttctagaggccatatgaccgagtacaagcccacggtgcgcctcgccacccgcgacgacgtccccagggccgtacgcaccctcgccgccgcgttcgccgactaccccgccacgcgccacaccgtcgatccggaccgccacatcgagcgggtcaccgagctgcaagaactcttcctcacgcgcgtcgggctcgacatcggcaaggtgtgggtcgcggacgacggcgccgcggtggcggtctggaccacgccggagagcgtcgaagcgggggcggtgttcgccgagatcggcccgcgcatggccgagttgagcggttcccggctggccgcgcagcaacagatggaaggcctcctggcgccgcaccggcccaaggagcccgcgtggttcctggccaccgtcggcgtctcgcccgaccaccagggcaagggtctgggcagcgccgtcgtgctccccggagtggaggcggccgagcgcgccggggtgcccgccttcctggagacctccgcgccccgcaacctccccttctacgagcggctcggcttcaccgtcaccgccgacgtcgaggtgcccgaaggaccgcgcacctggtgcatgacccgcaagcccggtgcctga

SEQ ID NO: 6406 - DNA, 2682 bp, Artificial Sequence
  Synthetic Polynucloetide
atggccttaccagtgaccgccttgctcctgccgctggccttgctgctccacgccgccaggccggacatccagatgacacagagccctagcagcctgtctgccagcgtgggagacagagtgaccatcacatgcaaggccagcgaccacatcaacaactggctggcctggtatcagcagaagcctggacaggcccctaagctgctgatctacggcgctaccacactggaaacaggcgtgcccagcagattttctggcagcggctctggcaccgactacaccctgacaatatccagcctccagcctgaggacttcgccacctactactgtcagcagagctggaacaccccttggacattcggccagggcaccaagctggaaatcaagagactcgagagccagcctcacaccaagcccagcgtgttcgtgatgaagaacggcaccaacgtggcctgcctcgtgaaagagttctaccccaaggacatcaggatcaacctggtgtccagcaagaagatcaccgagttcgaccccgccatcgtgatctcccccagcggcaagtacaacgccgtgaagctggggaagtacgaggacagcaacagcgtgacctgctccgtgcagcacgacaacaagaccgtgcacagcaccgactttgaagtgaaaaccgactccaccgaccacgtgaagcccaaagagacagagaacaccaagcagcccagcaagagctgccacaagcccaaggccatcgtgcacaccgagaaagtgaacatgatgagcctgaccgtgctgggcctgcggatgctgttcgccaaaaccgtggccgtgaacttcctgctgaccgccaagctgttcttcctcagggccaagcgatctggatctggagcaacaaacttctcactactcaaacaagcaggtgacgtggaggagaatcccgggcctactagtatggactggatttggcgcatccttttccttgtcggcgctgctaccggcgcccattcccaactgcaactgcaagagtctggccctggcctggtcaagccttctgaaaccctgagcctgacctgtaccgtgtccggcggctctatcagcagcggcgattactactggggctggatcagacagcctccaggcaagggactcgaatggatcggcagcatcagctacagcggctccacctactacaacccaagcctgaagtccagagtgaccatcagcgtggacaccagcagaaaccagttctccctgaagctgagcagcgtgacagccgccgatacagccgtgtattattgcaccagagaggacagcagcaactggcggagtagaggacagggcacactggtcacagtgtcctcttctggaggcggtggaagcggtggaggaggatctgaagtgcagctggttgaatctggcggaggactggttcaggctggcggatctctgagactgtcttgtgccgccagcggcagaacctttagcatgggctggtttagacaggcccctggcaaagagagagagttcgtcgccgccatcacatactctggcggcagcccttactacgccgactctgtgaagggcagattcaccatcagccgggacaacgccaagaacaccgtgtacctccagatgaacagcctgaagcctgaggacaccgccgtgtactactgcgccgccaatccaacatacggcagcgactggaacgccgagaattggggccagggaacccaagtgacagtgtctagcggatccggcggcggaggatctggcggaggcggatctgggggcggaggctctttcgaacaagttcagcttcaacagcctggcgctgagctggtcaaacctggcgcttctgtgaagatgagctgcaaagccagcggctacgccttcagcagctactggatcaactggatgaagcagaaacccggccagggactcgaatggatcggccaaatctatcccggcgacggcgacaccaactacaacggcaagttcaagggcagagccacactgaccgccgatacctctagcagcacagcctacatgcagctgagcagcctgaccagcgaagatagcgccgtgtacttctgtgcccggtccatcacaacagtcgtgggctgcgctatggactattggggccagggaacaagcgtgaccgtgtctagtacgcgtgacaagcagctggacgccgacgtgtcccccaagcctaccatcttcctgccctctatcgccgagacaaagctccagaaggccggcacctacctgtgcctgctggaaaagttcttcccagatgtgattaagatccactggcaggaaaagaagtccaacaccatcctgggcagccaggaaggcaacaccatgaagaccaacgacacctacatgaagttcagctggctgaccgtgcccgagaagtccctggacaaagaacacagatgcatcgtgcggcacgaaaacaacaagaacggcgtggaccaggaaatcatcttcccacccatcaagaccgatgtgattacaatggaccccaaggacaactgctccaaggacgccaacgataccctgctgctccagctgaccaacaccagcgcctactacatgtacttgttgctgctgctgaagtccgtggtgtacttcgccatcatcacatgctgcctgctgcggagaaccgccttctgctgcaacggcgagaagtct

SEQ ID NO: 6407 - DNA, 3891 bp, Artificial Sequence
  Synthetic Polynucloetide
atggccttaccagtgaccgccttgctcctgccgctggccttgctgctccacgccgccaggccggacatccagatgacacagagccctagcagcctgtctgccagcgtgggagacagagtgaccatcacatgcaaggccagcgaccacatcaacaactggctggcctggtatcagcagaagcctggacaggcccctaagctgctgatctacggcgctaccacactggaaacaggcgtgcccagcagattttctggcagcggctctggcaccgactacaccctgacaatatccagcctccagcctgaggacttcgccacctactactgtcagcagagctggaacaccccttggacattcggccagggcaccaagctggaaatcaagagaggacagcctaaggccaatcctaccgtgacactgttccctccaagcagcgaagaactccaggccaacaaggccacacttgtgtgcctgatctccgacttctaccctggggctgtgacagtggcttggaaggccgatggatctcctgtgaaagccggcgtggaaaccaccaagccatccaagcagagcaacaacaaatacgccgccagctcctacctgagcctgacacctgagcagtggaagtcccacagatcctacagctgccaagtgacccacgaaggcagcaccgtggaaaagacagtggcccctacagagtgcagcggatcccagagcttcggcctgctggaccccaagctgtgctacctgctggatggcatcctgttcatctacggcgtgatcctgaccgccctgttcctgagagtgaagttcagcagaagcgccgacgcccctgcctaccagcagggacagaaccaactgtacaacgagctgaacctgggcagacgggaagagtacgacgtgctggacaagcggagaggcagggaccctgagatgggcggaaagccccagcggagaaagaacccccaggaaggactgtataacgaactccagaaagacaagatggccgaagcctacagcgagatcggcatgaagggcgagcggagaagaggcaagggccacgatggcctgtaccagggcctgagcaccgccaccaaggacacctatgacgccctgcacatgcaggccctgcctccaagaagggccaagcgatctggatctggagcaacaaacttctcactactcaaacaagcaggtgacgtggaggagaatcccgggcctactagtatggactggatttggcgcatccttttccttgtcggcgctgctaccggcgcccattcccaactgcaactgcaagagtctggccctggcctggtcaagccttctgaaaccctgagcctgacctgtaccgtgtccggcggctctatcagcagcggcgattactactggggctggatcagacagcctccaggcaagggactcgaatggatcggcagcatcagctacagcggctccacctactacaacccaagcctgaagtccagagtgaccatcagcgtggacaccagcagaaaccagttctccctgaagctgagcagcgtgacagccgccgatacagccgtgtattattgcaccagagaggacagcagcaactggcggagtagaggacagggcacactggtcacagtgtcctcttctggaggcggtggaagcggtggaggaggatctgaagtgcagctggttgaatctggcggaggactggttcaggctggcggatctctgagactgtcttgtgccgccagcggcagaacctttagcatgggctggtttagacaggcccctggcaaagagagagagttcgtcgccgccatcacatactctggcggcagcccttactacgccgactctgtgaagggcagattcaccatcagccgggacaacgccaagaacaccgtgtacctccagatgaacagcctgaagcctgaggacaccgccgtgtactactgcgccgccaatccaacatacggcagcgactggaacgccgagaattggggccagggaacccaagtgacagtgtctagcggatccggcggcggaggatctggcggaggcggatctgggggcggaggctctttcgaacaagttcagcttcaacagcctggcgctgagctggtcaaacctggcgcttctgtgaagatgagctgcaaagccagcggctacgccttcagcagctactggatcaactggatgaagcagaaacccggccagggactcgaatggatcggccaaatctatcccggcgacggcgacaccaactacaacggcaagttcaagggcagagccacactgaccgccgatacctctagcagcacagcctacatgcagctgagcagcctgaccagcgaagatagcgccgtgtacttctgtgcccggtccatcacaacagtcgtgggctgcgctatggactattggggccagggaacaagcgtgaccgtgtctagtgcctctacaaagggaccctccgtgtttcctctggctcccagcagcaagtctacaagcggaggaacagccgctctgggctgcctggtcaaggattactttcccgagcctgtgaccgtgtcctggaatagcggagcactgacaagcggcgtgcacacctttccagccgtgctgcaaagcagcggcctgtactctctgagcagcgtggtcacagtgcctagctctagcctgggcacccagacctacatctgcaatgtgaaccacaagcctagcaacaccaaggtggacaagagagtggaacccaagagctgtggtacccagagttttgggttgttggaccctaaattgtgctatctgttggacggaatcctgttcatttacggagtgatcctgaccgcattgttcctgcgggttaagttttccagatccgcagacgcacccgcttaccaacaagggcagaaccaactctacaatgaacttaatttggggcggagggaagagtacgacgttctggacaaaaggaggggacgagatcccgagatgggcggaaagcctcagcgaaggaagaatccgcaagaggggctttataacgaactccagaaagataaaatggcagaagcctatagtgagattgggatgaagggagaaaggaggaggggtaaaggtcacgatgggttgtaccaaggattgagcacagccactaaagatacctatgatgcgctccacatgcaggccctgccgccaagacgcgccaagagaagcggatctggcgtgaagcagaccctgaatttcgacctgctgaagctggctggcgacgtggaatccaacccaggcccttctagaggccatatgaccgagtacaagcccacggtgcgcctcgccacccgcgacgacgtccccagggccgtacgcaccctcgccgccgcgttcgccgactaccccgccacgcgccacaccgtcgatccggaccgccacatcgagcgggtcaccgagctgcaagaactcttcctcacgcgcgtcgggctcgacatcggcaaggtgtgggtcgcggacgacggcgccgcggtggcggtctggaccacgccggagagcgtcgaagcgggggcggtgttcgccgagatcggcccgcgcatggccgagttgagcggttcccggctggccgcgcagcaacagatggaaggcctcctggcgccgcaccggcccaaggagcccgcgtggttcctggccaccgtcggcgtctcgcccgaccaccagggcaagggtctgggcagcgccgtcgtgctccccggagtggaggcggccgagcgcgccggggtgcccgccttcctggagacctccgcgccccgcaacctccccttctacgagcggctcggcttcaccgtcaccgccgacgtcgaggtgcccgaaggaccgcgcacctggtgcatgacccgcaagcccggtgcctga

SEQ ID NO: 6408 - DNA, 3246 bp, Artificial Sequence
  Synthetic Polynucloetide
atggccttaccagtgaccgccttgctcctgccgctggccttgctgctccacgccgccaggccggacatccagatgacacagagccctagcagcctgtctgccagcgtgggagacagagtgaccatcacatgcaaggccagcgaccacatcaacaactggctggcctggtatcagcagaagcctggacaggcccctaagctgctgatctacggcgctaccacactggaaacaggcgtgcccagcagattttctggcagcggctctggcaccgactacaccctgacaatatccagcctccagcctgaggacttcgccacctactactgtcagcagagctggaacaccccttggacattcggccagggcaccaagctggaaatcaagagactcgaggacctgaagaacgtgttcccacctgaggtggccgtgttcgagcctagcgaggccgagatcagccacacccagaaagccaccctcgtgtgcctggctaccggcttctaccccgaccatgtggaactgtcttggtgggtcaacggcaaagaggtgcacagcggcgtgtctaccgacccccagccactgaaagaacagcccgccctgaacgacagccggtactgcctgagcagcagactgagagtgtccgccaccttctggcagaacccccggaaccacttcagatgccaggtgcagttctacggcctgagcgagaacgacgagtggacccaggacagagccaagcccgtgacccagatcgtgtctgccgaagcctggggcagagccgattgcggatcccagagcttcggcctgctggaccccaagctgtgctacctgctggatggcatcctgttcatctacggcgtgatcctgaccgccctgttcctgagagtgaagttcagcagaagcgccgacgcccctgcctaccagcagggacagaaccaactgtacaacgagctgaacctgggcagacgggaagagtacgacgtgctggacaagcggagaggcagggaccctgagatgggcggaaagccccagcggagaaagaacccccaggaaggactgtataacgaactccagaaagacaagatggccgaagcctacagcgagatcggcatgaagggcgagcggagaagaggcaagggccacgatggcctgtaccagggcctgagcaccgccaccaaggacacctatgacgccctgcacatgcaggccctgcctccaagaagggccaagcgatctggatctggagcaacaaacttctcactactcaaacaagcaggtgacgtggaggagaatcccgggcctactagtatggactggatttggcgcatccttttccttgtcggcgctgctaccggcgcccattcccaactgcaactgcaagagtctggccctggcctggtcaagccttctgaaaccctgagcctgacctgtaccgtgtccggcggctctatcagcagcggcgattactactggggctggatcagacagcctccaggcaagggactcgaatggatcggcagcatcagctacagcggctccacctactacaacccaagcctgaagtccagagtgaccatcagcgtggacaccagcagaaaccagttctccctgaagctgagcagcgtgacagccgccgatacagccgtgtattattgcaccagagaggacagcagcaactggcggagtagaggacagggcacactggtcacagtgtcctcttctggaggcggtggaagcggtggaggaggatctgaagtgcagctggttgaatctggcggaggactggttcaggctggcggatctctgagactgtcttgtgccgccagcggcagaacctttagcatgggctggtttagacaggcccctggcaaagagagagagttcgtcgccgccatcacatactctggcggcagcccttactacgccgactctgtgaagggcagattcaccatcagccgggacaacgccaagaacaccgtgtacctccagatgaacagcctgaagcctgaggacaccgccgtgtactactgcgccgccaatccaacatacggcagcgactggaacgccgagaattggggccagggaacccaagtgacagtgtctagcggatccggcggcggaggatctggcggaggcggatctgggggcggaggctctttcgaacaagttcagcttcaacagcctggcgctgagctggtcaaacctggcgcttctgtgaagatgagctgcaaagccagcggctacgccttcagcagctactggatcaactggatgaagcagaaacccggccagggactcgaatggatcggccaaatctatcccggcgacggcgacaccaactacaacggcaagttcaagggcagagccacactgaccgccgatacctctagcagcacagcctacatgcagctgagcagcctgaccagcgaagatagcgccgtgtacttctgtgcccggtccatcacaacagtcgtgggctgcgctatggactattggggccagggaacaagcgtgaccgtgtctagtacgcgtatccagaaccctgatcctgccgtgtaccagctgcgggatagcaagagcagcgacaagagcgtgtgtctgttcaccgacttcgacagccagaccaacgtgtcccagagcaaggactccgacgtgtacatcaccgataagaccgtgctggacatgcggagcatggacttcaagagcaactccgccgtggcctggtccaacaagtccgatttcgcctgcgccaacgccttcaacaacagcattatccccgaggacacattcttcccaagccccgagagcagctgcggtacccagagttttgggttgttggaccctaaattgtgctatctgttggacggaatcctgttcatttacggagtgatcctgaccgcattgttcctgcgggttaagttttccagatccgcagacgcacccgcttaccaacaagggcagaaccaactctacaatgaacttaatttggggcggagggaagagtacgacgttctggacaaaaggaggggacgagatcccgagatgggcggaaagcctcagcgaaggaagaatccgcaagaggggctttataacgaactccagaaagataaaatggcagaagcctatagtgagattgggatgaagggagaaaggaggaggggtaaaggtcacgatgggttgtaccaaggattgagcacagccactaaagatacctatgatgcgctccacatgcaggccctgccgccaaga

SEQ ID NO: 6409 - DNA, 3246 bp, Artificial Sequence
  Synthetic Polynucloetide
atggccttaccagtgaccgccttgctcctgccgctggccttgctgctccacgccgccaggccggacatccagatgacacagagccctagcagcctgtctgccagcgtgggagacagagtgaccatcacatgcaaggccagcgaccacatcaacaactggctggcctggtatcagcagaagcctggacaggcccctaagctgctgatctacggcgctaccacactggaaacaggcgtgcccagcagattttctggcagcggctctggcaccgactacaccctgacaatatccagcctccagcctgaggacttcgccacctactactgtcagcagagctggaacaccccttggacattcggccagggcaccaagctggaaatcaagagactcgaggacctgaagaacgtgttcccacctgaggtggccgtgttcgagcctagcaaggccgagatcgcccacacccagaaagccaccctcgtgtgcctggctaccggcttctaccccgaccatgtggaactgtcttggtgggtcaacggcaaagaggtgcacagcggcgtgtgtaccgacccccagccactgaaagaacagcccgccctgaacgacagccggtactgcctgagcagcagactgagagtgtccgccaccttctggcagaacccccggaaccacttcagatgccaggtgcagttctacggcctgagcgagaacgacgagtggacccaggacagagccaagcccgtgacccagatcgtgtctgccgaagcctggggcagagccgattgcggatcccagagcttcggcctgctggaccccaagctgtgctacctgctggatggcatcctgttcatctacggcgtgatcctgaccgccctgttcctgagagtgaagttcagcagaagcgccgacgcccctgcctaccagcagggacagaaccaactgtacaacgagctgaacctgggcagacgggaagagtacgacgtgctggacaagcggagaggcagggaccctgagatgggcggaaagccccagcggagaaagaacccccaggaaggactgtataacgaactccagaaagacaagatggccgaagcctacagcgagatcggcatgaagggcgagcggagaagaggcaagggccacgatggcctgtaccagggcctgagcaccgccaccaaggacacctatgacgccctgcacatgcaggccctgcctccaagaagggccaagcgatctggatctggagcaacaaacttctcactactcaaacaagcaggtgacgtggaggagaatcccgggcctactagtatggactggatttggcgcatccttttccttgtcggcgctgctaccggcgcccattcccaactgcaactgcaagagtctggccctggcctggtcaagccttctgaaaccctgagcctgacctgtaccgtgtccggcggctctatcagcagcggcgattactactggggctggatcagacagcctccaggcaagggactcgaatggatcggcagcatcagctacagcggctccacctactacaacccaagcctgaagtccagagtgaccatcagcgtggacaccagcagaaaccagttctccctgaagctgagcagcgtgacagccgccgatacagccgtgtattattgcaccagagaggacagcagcaactggcggagtagaggacagggcacactggtcacagtgtcctcttctggaggcggtggaagcggtggaggaggatctgaagtgcagctggttgaatctggcggaggactggttcaggctggcggatctctgagactgtcttgtgccgccagcggcagaacctttagcatgggctggtttagacaggcccctggcaaagagagagagttcgtcgccgccatcacatactctggcggcagcccttactacgccgactctgtgaagggcagattcaccatcagccgggacaacgccaagaacaccgtgtacctccagatgaacagcctgaagcctgaggacaccgccgtgtactactgcgccgccaatccaacatacggcagcgactggaacgccgagaattggggccagggaacccaagtgacagtgtctagcggatccggcggcggaggatctggcggaggcggatctgggggcggaggctctttcgaacaagttcagcttcaacagcctggcgctgagctggtcaaacctggcgcttctgtgaagatgagctgcaaagccagcggctacgccttcagcagctactggatcaactggatgaagcagaaacccggccagggactcgaatggatcggccaaatctatcccggcgacggcgacaccaactacaacggcaagttcaagggcagagccacactgaccgccgatacctctagcagcacagcctacatgcagctgagcagcctgaccagcgaagatagcgccgtgtacttctgtgcccggtccatcacaacagtcgtgggctgcgctatggactattggggccagggaacaagcgtgaccgtgtctagtacgcgtatccagaaccctgatcctgccgtgtaccagctgcgggatagcaagagcagcgacaagagcgtgtgtctgttcaccgacttcgacagccagaccaacgtgtcccagagcaaggactccgacgtgtacatcaccgataagtgcgtgctggacatgcggagcatggacttcaagagcaactccgccgtggcctggtccaacaagtccgatttcgcctgcgccaacgccttcaacaacagcattatccccgaggacacattcttcccaagcagcgacgtgccctgcggtacccagagttttgggttgttggaccctaaattgtgctatctgttggacggaatcctgttcatttacggagtgatcctgaccgcattgttcctgcgggttaagttttccagatccgcagacgcacccgcttaccaacaagggcagaaccaactctacaatgaacttaatttggggcggagggaagagtacgacgttctggacaaaaggaggggacgagatcccgagatgggcggaaagcctcagcgaaggaagaatccgcaagaggggctttataacgaactccagaaagataaaatggcagaagcctatagtgagattgggatgaagggagaaaggaggaggggtaaaggtcacgatgggttgtaccaaggattgagcacagccactaaagatacctatgatgcgctccacatgcaggccctgccgccaaga

SEQ ID NO: 6410 - DNA, 3459 bp, Artificial Sequence
  Synthetic Polynucloetide
atggccttaccagtgaccgccttgctcctgccgctggccttgctgctccacgccgccaggccggacatccagatgacacagagccctagcagcctgtctgccagcgtgggagacagagtgaccatcacatgcaaggccagcgaccacatcaacaactggctggcctggtatcagcagaagcctggacaggcccctaagctgctgatctacggcgctaccacactggaaacaggcgtgcccagcagattttctggcagcggctctggcaccgactacaccctgacaatatccagcctccagcctgaggacttcgccacctactactgtcagcagagctggaacaccccttggacattcggccagggcaccaagctggaaatcaagagactcgaggggaaaccaattcccaaccctcttctgggactggattcaaccggcagcggcgaggacctgaagaacgtgttcccacctgaggtggccgtgttcgagcctagcgaggccgagatcagccacacccagaaagccaccctcgtgtgcctggctaccggcttctaccccgaccatgtggaactgtcttggtgggtcaacggcaaagaggtgcacagcggcgtgtctaccgacccccagccactgaaagaacagcccgccctgaacgacagccggtactgcctgagcagcagactgagagtgtccgccaccttctggcagaacccccggaaccacttcagatgccaggtgcagttctacggcctgagcgagaacgacgagtggacccaggacagagccaagcccgtgacccagatcgtgtctgccgaagcctggggcagagccgattgcggatcccagagcttcggcctgctggaccccaagctgtgctacctgctggatggcatcctgttcatctacggcgtgatcctgaccgccctgttcctgagagtgaagttcagcagaagcgccgacgcccctgcctaccagcagggacagaaccaactgtacaacgagctgaacctgggcagacgggaagagtacgacgtgctggacaagcggagaggcagggaccctgagatgggcggaaagccccagcggagaaagaacccccaggaaggactgtataacgaactccagaaagacaagatggccgaagcctacagcgagatcggcatgaagggcgagcggagaagaggcaagggccacgatggcctgtaccagggcctgagcaccgccaccaaggacacctatgacgccctgcacatgcaggccctgcctccaagaagggccaagcgatctggatctggagcaacaaacttctcactactcaaacaagcaggtgacgtggaggagaatcccgggcctactagtatggactggatttggcgcatccttttccttgtcggcgctgctaccggcgcccattcccaactgcaactgcaagagtctggccctggcctggtcaagccttctgaaaccctgagcctgacctgtaccgtgtccggcggctctatcagcagcggcgattactactggggctggatcagacagcctccaggcaagggactcgaatggatcggcagcatcagctacagcggctccacctactacaacccaagcctgaagtccagagtgaccatcagcgtggacaccagcagaaaccagttctccctgaagctgagcagcgtgacagccgccgatacagccgtgtattattgcaccagagaggacagcagcaactggcggagtagaggacagggcacactggtcacagtgtcctcttctggaggcggtggaagcggtggaggaggatctgaagtgcagctggttgaatctggcggaggactggttcaggctggcggatctctgagactgtcttgtgccgccagcggcagaacctttagcatgggctggtttagacaggcccctggcaaagagagagagttcgtcgccgccatcacatactctggcggcagcccttactacgccgactctgtgaagggcagattcaccatcagccgggacaacgccaagaacaccgtgtacctccagatgaacagcctgaagcctgaggacaccgccgtgtactactgcgccgccaatccaacatacggcagcgactggaacgccgagaattggggccagggaacccaagtgacagtgtctagcggatccggcggcggaggatctggcggaggcggatctgggggcggaggctctttcgaacaagttcagcttcaacagcctggcgctgagctggtcaaacctggcgcttctgtgaagatgagctgcaaagccagcggctacgccttcagcagctactggatcaactggatgaagcagaaacccggccagggactcgaatggatcggccaaatctatcccggcgacggcgacaccaactacaacggcaagttcaagggcagagccacactgaccgccgatacctctagcagcacagcctacatgcagctgagcagcctgaccagcgaagatagcgccgtgtacttctgtgcccggtccatcacaacagtcgtgggctgcgctatggactattggggccagggaacaagcgtgaccgtgtctagtacgcgtgagcagaaactgatctcggaagaggatgggagcggcatccagaaccctgatcctgccgtgtaccagctgcgggatagcaagagcagcgacaagagcgtgtgtctgttcaccgacttcgacagccagaccaacgtgtcccagagcaaggactccgacgtgtacatcaccgataagaccgtgctggacatgcggagcatggacttcaagagcaactccgccgtggcctggtccaacaagtccgatttcgcctgcgccaacgccttcaacaacagcattatccccgaggacacattcttcccaagccccgagagcagctgcggtacccagagttttgggttgttggaccctaaattgtgctatctgttggacggaatcctgttcatttacggagtgatcctgaccgcattgttcctgaggagcaagcggtcacggctgctccacagcgattacatgaatatgacaccacgaagaccgggtcctactcgcaaacactaccaaccctacgcacctccccgcgactttgcagcgtaccgatctcgggttaagttttccagatccgcagacgcacccgcttaccaacaagggcagaaccaactctacaatgaacttaatttggggcggagggaagagtacgacgttctggacaaaaggaggggacgagatcccgagatgggcggaaagcctcagcgaaggaagaatccgcaagaggggctttataacgaactccagaaagataaaatggcagaagcctatagtgagattgggatgaagggagaaaggaggaggggtaaaggtcacgatgggttgtaccaaggattgagcacagccactaaagatacctatgatgcgctccacatgcaggccctgccgccaaga

SEQ ID NO: 6411 - DNA, 3582 bp, Artificial Sequence
  Synthetic Polynucloetide
atggccttaccagtgaccgccttgctcctgccgctggccttgctgctccacgccgccaggccggacatccagatgacacagagccctagcagcctgtctgccagcgtgggagacagagtgaccatcacatgcaaggccagcgaccacatcaacaactggctggcctggtatcagcagaagcctggacaggcccctaagctgctgatctacggcgctaccacactggaaacaggcgtgcccagcagattttctggcagcggctctggcaccgactacaccctgacaatatccagcctccagcctgaggacttcgccacctactactgtcagcagagctggaacaccccttggacattcggccagggcaccaagctggaaatcaagagactcgaggggaaaccaattcccaaccctcttctgggactggattcaaccggcagcggcgaggacctgaagaacgtgttcccacctgaggtggccgtgttcgagcctagcgaggccgagatcagccacacccagaaagccaccctcgtgtgcctggctaccggcttctaccccgaccatgtggaactgtcttggtgggtcaacggcaaagaggtgcacagcggcgtgtctaccgacccccagccactgaaagaacagcccgccctgaacgacagccggtactgcctgagcagcagactgagagtgtccgccaccttctggcagaacccccggaaccacttcagatgccaggtgcagttctacggcctgagcgagaacgacgagtggacccaggacagagccaagcccgtgacccagatcgtgtctgccgaagcctggggcagagccgattgcggatcccagagcttcggcctgctggaccccaagctgtgctacctgctggatggcatcctgttcatctacggcgtgatcctgaccgccctgttcctgaggagtaagaggagcaggctcctgcacagtgactacatgaacatgactccacgccgccccggacccacccgcaagcattaccagccctatgccccaccacgcgacttcgcagcctatcgctccagagtgaagttcagcagaagcgccgacgcccctgcctaccagcagggacagaaccaactgtacaacgagctgaacctgggcagacgggaagagtacgacgtgctggacaagcggagaggcagggaccctgagatgggcggaaagccccagcggagaaagaacccccaggaaggactgtataacgaactccagaaagacaagatggccgaagcctacagcgagatcggcatgaagggcgagcggagaagaggcaagggccacgatggcctgtaccagggcctgagcaccgccaccaaggacacctatgacgccctgcacatgcaggccctgcctccaagaagggccaagcgatctggatctggagcaacaaacttctcactactcaaacaagcaggtgacgtggaggagaatcccgggcctactagtatggactggatttggcgcatccttttccttgtcggcgctgctaccggcgcccattcccaactgcaactgcaagagtctggccctggcctggtcaagccttctgaaaccctgagcctgacctgtaccgtgtccggcggctctatcagcagcggcgattactactggggctggatcagacagcctccaggcaagggactcgaatggatcggcagcatcagctacagcggctccacctactacaacccaagcctgaagtccagagtgaccatcagcgtggacaccagcagaaaccagttctccctgaagctgagcagcgtgacagccgccgatacagccgtgtattattgcaccagagaggacagcagcaactggcggagtagaggacagggcacactggtcacagtgtcctcttctggaggcggtggaagcggtggaggaggatctgaagtgcagctggttgaatctggcggaggactggttcaggctggcggatctctgagactgtcttgtgccgccagcggcagaacctttagcatgggctggtttagacaggcccctggcaaagagagagagttcgtcgccgccatcacatactctggcggcagcccttactacgccgactctgtgaagggcagattcaccatcagccgggacaacgccaagaacaccgtgtacctccagatgaacagcctgaagcctgaggacaccgccgtgtactactgcgccgccaatccaacatacggcagcgactggaacgccgagaattggggccagggaacccaagtgacagtgtctagcggatccggcggcggaggatctggcggaggcggatctgggggcggaggctctttcgaacaagttcagcttcaacagcctggcgctgagctggtcaaacctggcgcttctgtgaagatgagctgcaaagccagcggctacgccttcagcagctactggatcaactggatgaagcagaaacccggccagggactcgaatggatcggccaaatctatcccggcgacggcgacaccaactacaacggcaagttcaagggcagagccacactgaccgccgatacctctagcagcacagcctacatgcagctgagcagcctgaccagcgaagatagcgccgtgtacttctgtgcccggtccatcacaacagtcgtgggctgcgctatggactattggggccagggaacaagcgtgaccgtgtctagtacgcgtgagcagaaactgatctcggaagaggatgggagcggcatccagaaccctgatcctgccgtgtaccagctgcgggatagcaagagcagcgacaagagcgtgtgtctgttcaccgacttcgacagccagaccaacgtgtcccagagcaaggactccgacgtgtacatcaccgataagaccgtgctggacatgcggagcatggacttcaagagcaactccgccgtggcctggtccaacaagtccgatttcgcctgcgccaacgccttcaacaacagcattatccccgaggacacattcttcccaagccccgagagcagctgcggtacccagagttttgggttgttggaccctaaattgtgctatctgttggacggaatcctgttcatttacggagtgatcctgaccgcattgttcctgaggagcaagcggtcacggctgctccacagcgattacatgaatatgacaccacgaagaccgggtcctactcgcaaacactaccaaccctacgcacctccccgcgactttgcagcgtaccgatctcgggttaagttttccagatccgcagacgcacccgcttaccaacaagggcagaaccaactctacaatgaacttaatttggggcggagggaagagtacgacgttctggacaaaaggaggggacgagatcccgagatgggcggaaagcctcagcgaaggaagaatccgcaagaggggctttataacgaactccagaaagataaaatggcagaagcctatagtgagattgggatgaagggagaaaggaggaggggtaaaggtcacgatgggttgtaccaaggattgagcacagccactaaagatacctatgatgcgctccacatgcaggccctgccgccaaga

SEQ ID NO: 6412 - DNA, 3465 bp, Artificial Sequence
  Synthetic Polynucloetide
atggccttaccagtgaccgccttgctcctgccgctggccttgctgctccacgccgccaggccggacatccagatgacacagagccctagcagcctgtctgccagcgtgggagacagagtgaccatcacatgcaaggccagcgaccacatcaacaactggctggcctggtatcagcagaagcctggacaggcccctaagctgctgatctacggcgctaccacactggaaacaggcgtgcccagcagattttctggcagcggctctggcaccgactacaccctgacaatatccagcctccagcctgaggacttcgccacctactactgtcagcagagctggaacaccccttggacattcggccagggcaccaagctggaaatcaagagactcgaggggaaaccaattcccaaccctcttctgggactggattcaaccggcagcggcgaggacctgaagaacgtgttcccacctgaggtggccgtgttcgagcctagcgaggccgagatcagccacacccagaaagccaccctcgtgtgcctggctaccggcttctaccccgaccatgtggaactgtcttggtgggtcaacggcaaagaggtgcacagcggcgtgtctaccgacccccagccactgaaagaacagcccgccctgaacgacagccggtactgcctgagcagcagactgagagtgtccgccaccttctggcagaacccccggaaccacttcagatgccaggtgcagttctacggcctgagcgagaacgacgagtggacccaggacagagccaagcccgtgacccagatcgtgtctgccgaagcctggggcagagccgattgcggatcccagagcttcggcctgctggaccccaagctgtgctacctgctggatggcatcctgttcatctacggcgtgatcctgaccgccctgttcctgagagtgaagttcagcagaagcgccgacgcccctgcctaccagcagggacagaaccaactgtacaacgagctgaacctgggcagacgggaagagtacgacgtgctggacaagcggagaggcagggaccctgagatgggcggaaagccccagcggagaaagaacccccaggaaggactgtataacgaactccagaaagacaagatggccgaagcctacagcgagatcggcatgaagggcgagcggagaagaggcaagggccacgatggcctgtaccagggcctgagcaccgccaccaaggacacctatgacgccctgcacatgcaggccctgcctccaagaagggccaagcgatctggatctggagcaacaaacttctcactactcaaacaagcaggtgacgtggaggagaatcccgggcctactagtatggactggatttggcgcatccttttccttgtcggcgctgctaccggcgcccattcccaactgcaactgcaagagtctggccctggcctggtcaagccttctgaaaccctgagcctgacctgtaccgtgtccggcggctctatcagcagcggcgattactactggggctggatcagacagcctccaggcaagggactcgaatggatcggcagcatcagctacagcggctccacctactacaacccaagcctgaagtccagagtgaccatcagcgtggacaccagcagaaaccagttctccctgaagctgagcagcgtgacagccgccgatacagccgtgtattattgcaccagagaggacagcagcaactggcggagtagaggacagggcacactggtcacagtgtcctcttctggaggcggtggaagcggtggaggaggatctgaagtgcagctggttgaatctggcggaggactggttcaggctggcggatctctgagactgtcttgtgccgccagcggcagaacctttagcatgggctggtttagacaggcccctggcaaagagagagagttcgtcgccgccatcacatactctggcggcagcccttactacgccgactctgtgaagggcagattcaccatcagccgggacaacgccaagaacaccgtgtacctccagatgaacagcctgaagcctgaggacaccgccgtgtactactgcgccgccaatccaacatacggcagcgactggaacgccgagaattggggccagggaacccaagtgacagtgtctagcggatccggcggcggaggatctggcggaggcggatctgggggcggaggctctttcgaacaagttcagcttcaacagcctggcgctgagctggtcaaacctggcgcttctgtgaagatgagctgcaaagccagcggctacgccttcagcagctactggatcaactggatgaagcagaaacccggccagggactcgaatggatcggccaaatctatcccggcgacggcgacaccaactacaacggcaagttcaagggcagagccacactgaccgccgatacctctagcagcacagcctacatgcagctgagcagcctgaccagcgaagatagcgccgtgtacttctgtgcccggtccatcacaacagtcgtgggctgcgctatggactattggggccagggaacaagcgtgaccgtgtctagtacgcgtgagcagaaactgatctcggaagaggatctggggagcggcatccagaaccctgatcctgccgtgtaccagctgcgggatagcaagagcagcgacaagagcgtgtgtctgttcaccgacttcgacagccagaccaacgtgtcccagagcaaggactccgacgtgtacatcaccgataagaccgtgctggacatgcggagcatggacttcaagagcaactccgccgtggcctggtccaacaagtccgatttcgcctgcgccaacgccttcaacaacagcattatccccgaggacacattcttcccaagccccgagagcagctgcggtacccagagttttgggttgttggaccctaaattgtgctatctgttggacggaatcctgttcatttacggagtgatcctgaccgcattgttcctgaagagaggccggaagaagctgctgtacatcttcaagcagcctttcatgcggcccgtgcagaccacccaggaagaggacggctgctcctgccggttccccgaggaagaagaaggcggctgcgagctgcgggttaagttttccagatccgcagacgcacccgcttaccaacaagggcagaaccaactctacaatgaacttaatttggggcggagggaagagtacgacgttctggacaaaaggaggggacgagatcccgagatgggcggaaagcctcagcgaaggaagaatccgcaagaggggctttataacgaactccagaaagataaaatggcagaagcctatagtgagattgggatgaagggagaaaggaggaggggtaaaggtcacgatgggttgtaccaaggattgagcacagccactaaagatacctatgatgcgctccacatgcaggccctgccgccaaga

SEQ ID NO: 6413 - DNA, 3591 bp, Artificial Sequence
  Synthetic Polynucloetide
atggccttaccagtgaccgccttgctcctgccgctggccttgctgctccacgccgccaggccggacatccagatgacacagagccctagcagcctgtctgccagcgtgggagacagagtgaccatcacatgcaaggccagcgaccacatcaacaactggctggcctggtatcagcagaagcctggacaggcccctaagctgctgatctacggcgctaccacactggaaacaggcgtgcccagcagattttctggcagcggctctggcaccgactacaccctgacaatatccagcctccagcctgaggacttcgccacctactactgtcagcagagctggaacaccccttggacattcggccagggcaccaagctggaaatcaagagactcgaggggaaaccaattcccaaccctcttctgggactggattcaaccggcagcggcgaggacctgaagaacgtgttcccacctgaggtggccgtgttcgagcctagcgaggccgagatcagccacacccagaaagccaccctcgtgtgcctggctaccggcttctaccccgaccatgtggaactgtcttggtgggtcaacggcaaagaggtgcacagcggcgtgtctaccgacccccagccactgaaagaacagcccgccctgaacgacagccggtactgcctgagcagcagactgagagtgtccgccaccttctggcagaacccccggaaccacttcagatgccaggtgcagttctacggcctgagcgagaacgacgagtggacccaggacagagccaagcccgtgacccagatcgtgtctgccgaagcctggggcagagccgattgcggatcccagagcttcggcctgctggaccccaagctgtgctacctgctggatggcatcctgttcatctacggcgtgatcctgaccgccctgttcctgaaacggggcagaaagaaactcctgtatatattcaaacaaccatttatgagaccagtacaaactactcaagaggaagatggctgtagctgccgatttccagaagaagaagaaggaggatgtgaactgagagtgaagttcagcagaagcgccgacgcccctgcctaccagcagggacagaaccaactgtacaacgagctgaacctgggcagacgggaagagtacgacgtgctggacaagcggagaggcagggaccctgagatgggcggaaagccccagcggagaaagaacccccaggaaggactgtataacgaactccagaaagacaagatggccgaagcctacagcgagatcggcatgaagggcgagcggagaagaggcaagggccacgatggcctgtaccagggcctgagcaccgccaccaaggacacctatgacgccctgcacatgcaggccctgcctccaagaagggccaagcgatctggatctggagcaacaaacttctcactactcaaacaagcaggtgacgtggaggagaatcccgggcctactagtatggactggatttggcgcatccttttccttgtcggcgctgctaccggcgcccattcccaactgcaactgcaagagtctggccctggcctggtcaagccttctgaaaccctgagcctgacctgtaccgtgtccggcggctctatcagcagcggcgattactactggggctggatcagacagcctccaggcaagggactcgaatggatcggcagcatcagctacagcggctccacctactacaacccaagcctgaagtccagagtgaccatcagcgtggacaccagcagaaaccagttctccctgaagctgagcagcgtgacagccgccgatacagccgtgtattattgcaccagagaggacagcagcaactggcggagtagaggacagggcacactggtcacagtgtcctcttctggaggcggtggaagcggtggaggaggatctgaagtgcagctggttgaatctggcggaggactggttcaggctggcggatctctgagactgtcttgtgccgccagcggcagaacctttagcatgggctggtttagacaggcccctggcaaagagagagagttcgtcgccgccatcacatactctggcggcagcccttactacgccgactctgtgaagggcagattcaccatcagccgggacaacgccaagaacaccgtgtacctccagatgaacagcctgaagcctgaggacaccgccgtgtactactgcgccgccaatccaacatacggcagcgactggaacgccgagaattggggccagggaacccaagtgacagtgtctagcggatccggcggcggaggatctggcggaggcggatctgggggcggaggctctttcgaacaagttcagcttcaacagcctggcgctgagctggtcaaacctggcgcttctgtgaagatgagctgcaaagccagcggctacgccttcagcagctactggatcaactggatgaagcagaaacccggccagggactcgaatggatcggccaaatctatcccggcgacggcgacaccaactacaacggcaagttcaagggcagagccacactgaccgccgatacctctagcagcacagcctacatgcagctgagcagcctgaccagcgaagatagcgccgtgtacttctgtgcccggtccatcacaacagtcgtgggctgcgctatggactattggggccagggaacaagcgtgaccgtgtctagtacgcgtgagcagaaactgatctcggaagaggatctggggagcggcatccagaaccctgatcctgccgtgtaccagctgcgggatagcaagagcagcgacaagagcgtgtgtctgttcaccgacttcgacagccagaccaacgtgtcccagagcaaggactccgacgtgtacatcaccgataagaccgtgctggacatgcggagcatggacttcaagagcaactccgccgtggcctggtccaacaagtccgatttcgcctgcgccaacgccttcaacaacagcattatccccgaggacacattcttcccaagccccgagagcagctgcggtacccagagttttgggttgttggaccctaaattgtgctatctgttggacggaatcctgttcatttacggagtgatcctgaccgcattgttcctgaagagaggccggaagaagctgctgtacatcttcaagcagcctttcatgcggcccgtgcagaccacccaggaagaggacggctgctcctgccggttccccgaggaagaagaaggcggctgcgagctgcgggttaagttttccagatccgcagacgcacccgcttaccaacaagggcagaaccaactctacaatgaacttaatttggggcggagggaagagtacgacgttctggacaaaaggaggggacgagatcccgagatgggcggaaagcctcagcgaaggaagaatccgcaagaggggctttataacgaactccagaaagataaaatggcagaagcctatagtgagattgggatgaagggagaaaggaggaggggtaaaggtcacgatgggttgtaccaaggattgagcacagccactaaagatacctatgatgcgctccacatgcaggccctgccgccaaga

SEQ ID NO: 6414 - DNA, 3264 bp, Artificial Sequence
  Synthetic Polynucloetide
atggccttaccagtgaccgccttgctcctgccgctggccttgctgctccacgccgccaggccggacatccagatgacacagagccctagcagcctgtctgccagcgtgggagacagagtgaccatcacatgcaaggccagcgaccacatcaacaactggctggcctggtatcagcagaagcctggacaggcccctaagctgctgatctacggcgctaccacactggaaacaggcgtgcccagcagattttctggcagcggctctggcaccgactacaccctgacaatatccagcctccagcctgaggacttcgccacctactactgtcagcagagctggaacaccccttggacattcggccagggcaccaagctggaaatcaagagactcgagcagagcttcggcctgctggaccccaagctgtgctacctgctggatggcatcctgttcatctacggcgtgatcctgaccgccctgttcctgagagtgaagttcagcagaagcgccgacgcccctgcctaccagcagggacagaaccaactgtacaacgagctgaacctgggcagacgggaagagtacgacgtgctggacaagcggagaggcagggaccctgagatgggcggaaagccccagcggagaaagaacccccaggaaggactgtataacgaactccagaaagacaagatggccgaagcctacagcgagatcggcatgaagggcgagcggagaagaggcaagggccacgatggcctgtaccagggcctgagcaccgccaccaaggacacctatgacgccctgcacatgcaggccctgcctccaagaagggccaagcgatctggatctggagcaacaaacttctcactactcaaacaagcaggtgacgtggaggagaatcccgggcctactagtatggactggatttggcgcatccttttccttgtcggcgctgctaccggcgcccattcccaactgcaactgcaagagtctggccctggcctggtcaagccttctgaaaccctgagcctgacctgtaccgtgtccggcggctctatcagcagcggcgattactactggggctggatcagacagcctccaggcaagggactcgaatggatcggcagcatcagctacagcggctccacctactacaacccaagcctgaagtccagagtgaccatcagcgtggacaccagcagaaaccagttctccctgaagctgagcagcgtgacagccgccgatacagccgtgtattattgcaccagagaggacagcagcaactggcggagtagaggacagggcacactggtcacagtgtcctcttctggaggcggtggaagcggtggaggaggatctgaagtgcagctggttgaatctggcggaggactggttcaggctggcggatctctgagactgtcttgtgccgccagcggcagaacctttagcatgggctggtttagacaggcccctggcaaagagagagagttcgtcgccgccatcacatactctggcggcagcccttactacgccgactctgtgaagggcagattcaccatcagccgggacaacgccaagaacaccgtgtacctccagatgaacagcctgaagcctgaggacaccgccgtgtactactgcgccgccaatccaacatacggcagcgactggaacgccgagaattggggccagggaacccaagtgacagtgtctagcggatccggcggcggaggatctggcggaggcggatctgggggcggaggctctttcgaacaagttcagcttcaacagcctggcgctgagctggtcaaacctggcgcttctgtgaagatgagctgcaaagccagcggctacgccttcagcagctactggatcaactggatgaagcagaaacccggccagggactcgaatggatcggccaaatctatcccggcgacggcgacaccaactacaacggcaagttcaagggcagagccacactgaccgccgatacctctagcagcacagcctacatgcagctgagcagcctgaccagcgaagatagcgccgtgtacttctgtgcccggtccatcacaacagtcgtgggctgcgctatggactattggggccagggaacaagcgtgaccgtgtctagtacgcgtcagagttttgggttgttggaccctaaattgtgctatctgttggacggaatcctgttcatttacggagtgatcctgaccgcattgttcctgcgggttaagttttccagatccgcagacgcacccgcttaccaacaagggcagaaccaactctacaatgaacttaatttggggcggagggaagagtacgacgttctggacaaaaggaggggacgagatcccgagatgggcggaaagcctcagcgaaggaagaatccgcaagaggggctttataacgaactccagaaagataaaatggcagaagcctatagtgagattgggatgaagggagaaaggaggaggggtaaaggtcacgatgggttgtaccaaggattgagcacagccactaaagatacctatgatgcgctccacatgcaggccctgccgccaagacgcgccaagagaagcggatctggcgtgaagcagaccctgaatttcgacctgctgaagctggctggcgacgtggaatccaacccaggcccttctagaggccatatgaccgagtacaagcccacggtgcgcctcgccacccgcgacgacgtccccagggccgtacgcaccctcgccgccgcgttcgccgactaccccgccacgcgccacaccgtcgatccggaccgccacatcgagcgggtcaccgagctgcaagaactcttcctcacgcgcgtcgggctcgacatcggcaaggtgtgggtcgcggacgacggcgccgcggtggcggtctggaccacgccggagagcgtcgaagcgggggcggtgttcgccgagatcggcccgcgcatggccgagttgagcggttcccggctggccgcgcagcaacagatggaaggcctcctggcgccgcaccggcccaaggagcccgcgtggttcctggccaccgtcggcgtctcgcccgaccaccagggcaagggtctgggcagcgccgtcgtgctccccggagtggaggcggccgagcgcgccggggtgcccgccttcctggagacctccgcgccccgcaacctccccttctacgagcggctcggcttcaccgtcaccgccgacgtcgaggtgcccgaaggaccgcgcacctggtgcatgacccgcaagcccggtgcctga

SEQ ID NO: 6415 - DNA, 2736 bp, Artificial Sequence
  Synthetic Polynucloetide
atggccttaccagtgaccgccttgctcctgccgctggccttgctgctccacgccgccaggccggacatccagatgacacagagccctagcagcctgtctgccagcgtgggagacagagtgaccatcacatgcaaggccagcgaccacatcaacaactggctggcctggtatcagcagaagcctggacaggcccctaagctgctgatctacggcgctaccacactggaaacaggcgtgcccagcagattttctggcagcggctctggcaccgactacaccctgacaatatccagcctccagcctgaggacttcgccacctactactgtcagcagagctggaacaccccttggacattcggccagggcaccaagctggaaatcaagagactcgagggacagcctaaggccaatcctaccgtgacactgttccctccaagcagcgaagaactccaggccaacaaggccacacttgtgtgcctgatctccgacttctaccctggggctgtgacagtggcttggaaggccgatggatctcctgtgaaagccggcgtggaaaccaccaagccatccaagcagagcaacaacaaatacgccgccagctcctacctgagcctgacacctgagcagtggaagtcccacagatcctacagctgccaagtgacccacgaaggcagcaccgtggaaaagacagtggcccctacagagtgcagccccatcaagaccgatgtgattacaatggaccccaaggacaactgctccaaggacgccaacgataccctgctgctccagctgaccaacaccagcgcctactacatgtacttgttgctgctgctgaagtccgtggtgtacttcgccatcatcacatgctgcctgctgcggagaaccgccttctgctgcaacggcgagaagtctagggccaagcgatctggatctggagcaacaaacttctcactactcaaacaagcaggtgacgtggaggagaatcccgggcctactagtatggactggatttggcgcatccttttccttgtcggcgctgctaccggcgcccattcccaactgcaactgcaagagtctggccctggcctggtcaagccttctgaaaccctgagcctgacctgtaccgtgtccggcggctctatcagcagcggcgattactactggggctggatcagacagcctccaggcaagggactcgaatggatcggcagcatcagctacagcggctccacctactacaacccaagcctgaagtccagagtgaccatcagcgtggacaccagcagaaaccagttctccctgaagctgagcagcgtgacagccgccgatacagccgtgtattattgcaccagagaggacagcagcaactggcggagtagaggacagggcacactggtcacagtgtcctcttctggaggcggtggaagcggtggaggaggatctgaagtgcagctggttgaatctggcggaggactggttcaggctggcggatctctgagactgtcttgtgccgccagcggcagaacctttagcatgggctggtttagacaggcccctggcaaagagagagagttcgtcgccgccatcacatactctggcggcagcccttactacgccgactctgtgaagggcagattcaccatcagccgggacaacgccaagaacaccgtgtacctccagatgaacagcctgaagcctgaggacaccgccgtgtactactgcgccgccaatccaacatacggcagcgactggaacgccgagaattggggccagggaacccaagtgacagtgtctagcggatccggcggcggaggatctggcggaggcggatctgggggcggaggctctttcgaacaagttcagcttcaacagcctggcgctgagctggtcaaacctggcgcttctgtgaagatgagctgcaaagccagcggctacgccttcagcagctactggatcaactggatgaagcagaaacccggccagggactcgaatggatcggccaaatctatcccggcgacggcgacaccaactacaacggcaagttcaagggcagagccacactgaccgccgatacctctagcagcacagcctacatgcagctgagcagcctgaccagcgaagatagcgccgtgtacttctgtgcccggtccatcacaacagtcgtgggctgcgctatggactattggggccagggaacaagcgtgaccgtgtctagtacgcgtgcctctacaaagggaccctccgtgtttcctctggctcccagcagcaagtctacaagcggaggaacagccgctctgggctgcctggtcaaggattactttcccgagcctgtgaccgtgtcctggaatagcggagcactgacaagcggcgtgcacacctttccagccgtgctgcaaagcagcggcctgtactctctgagcagcgtggtcacagtgcctagctctagcctgggcacccagacctacatctgcaatgtgaaccacaagcctagcaacaccaaggtggacaagagagtggaacccaagagctgtgaagtgaaaaccgactccaccgaccacgtgaagcccaaagagacagagaacaccaagcagcccagcaagagctgccacaagcccaaggccatcgtgcacaccgagaaagtgaacatgatgagcctgaccgtgctgggcctgcggatgctgttcgccaaaaccgtggccgtgaacttcctgctgaccgccaagctgttcttcctc

SEQ ID NO: 6416 - DNA, 2670 bp, Artificial Sequence
  Synthetic Polynucloetide
atggccttaccagtgaccgccttgctcctgccgctggccttgctgctccacgccgccaggccggacatccagatgacacagagccctagcagcctgtctgccagcgtgggagacagagtgaccatcacatgcaaggccagcgaccacatcaacaactggctggcctggtatcagcagaagcctggacaggcccctaagctgctgatctacggcgctaccacactggaaacaggcgtgcccagcagattttctggcagcggctctggcaccgactacaccctgacaatatccagcctccagcctgaggacttcgccacctactactgtcagcagagctggaacaccccttggacattcggccagggcaccaagctggaaatcaagagactcgagggacagcctaaggccaatcctaccgtgacactgttccctccaagcagcgaagaactccaggccaacaaggccacacttgtgtgcctgatctccgacttctaccctggggctgtgacagtggcttggaaggccgatggatctcctgtgaaagccggcgtggaaaccaccaagccatccaagcagagcaacaacaaatacgccgccagctcctacctgagcctgacacctgagcagtggaagtcccacagatcctacagctgccaagtgacccacgaaggcagcaccgtggaaaagacagtggcccctacagagtgcagcggcagagccgattgcggcatcaccagcgccagctaccaccagggcgtgctgagcgccaccatcctgtacgagatcctgctgggcaaggccaccctgtacgccgtgctggtgtctgccctggtgctgatggctatggtcaagcggaaggacagccggggaagggccaagcgatctggatctggagcaacaaacttctcactactcaaacaagcaggtgacgtggaggagaatcccgggcctactagtatggactggatttggcgcatccttttccttgtcggcgctgctaccggcgcccattcccaactgcaactgcaagagtctggccctggcctggtcaagccttctgaaaccctgagcctgacctgtaccgtgtccggcggctctatcagcagcggcgattactactggggctggatcagacagcctccaggcaagggactcgaatggatcggcagcatcagctacagcggctccacctactacaacccaagcctgaagtccagagtgaccatcagcgtggacaccagcagaaaccagttctccctgaagctgagcagcgtgacagccgccgatacagccgtgtattattgcaccagagaggacagcagcaactggcggagtagaggacagggcacactggtcacagtgtcctcttctggaggcggtggaagcggtggaggaggatctgaagtgcagctggttgaatctggcggaggactggttcaggctggcggatctctgagactgtcttgtgccgccagcggcagaacctttagcatgggctggtttagacaggcccctggcaaagagagagagttcgtcgccgccatcacatactctggcggcagcccttactacgccgactctgtgaagggcagattcaccatcagccgggacaacgccaagaacaccgtgtacctccagatgaacagcctgaagcctgaggacaccgccgtgtactactgcgccgccaatccaacatacggcagcgactggaacgccgagaattggggccagggaacccaagtgacagtgtctagcggatccggcggcggaggatctggcggaggcggatctgggggcggaggctctttcgaacaagttcagcttcaacagcctggcgctgagctggtcaaacctggcgcttctgtgaagatgagctgcaaagccagcggctacgccttcagcagctactggatcaactggatgaagcagaaacccggccagggactcgaatggatcggccaaatctatcccggcgacggcgacaccaactacaacggcaagttcaagggcagagccacactgaccgccgatacctctagcagcacagcctacatgcagctgagcagcctgaccagcgaagatagcgccgtgtacttctgtgcccggtccatcacaacagtcgtgggctgcgctatggactattggggccagggaacaagcgtgaccgtgtctagtacgcgtgcctctacaaagggaccctccgtgtttcctctggctcccagcagcaagtctacaagcggaggaacagccgctctgggctgcctggtcaaggattactttcccgagcctgtgaccgtgtcctggaatagcggagcactgacaagcggcgtgcacacctttccagccgtgctgcaaagcagcggcctgtactctctgagcagcgtggtcacagtgcctagctctagcctgggcacccagacctacatctgcaatgtgaaccacaagcctagcaacaccaaggtggacaagagagtggaacccaagagctgtatccccgaggacacattcttcccaagcagcgacgtgccctgcgacgtgaagctggtggaaaagagcttcgagacagacaccaacctgaacttccagaacctgagcgtgatcggcttcagaatcctgctgctgaaagtggccggctttaacctgctgatgaccctgcggctgtggtccagc

SEQ ID NO: 6417 - DNA, 2670 bp, Artificial Sequence
  Synthetic Polynucloetide
atggccttaccagtgaccgccttgctcctgccgctggccttgctgctccacgccgccaggccggacatccagatgacacagagccctagcagcctgtctgccagcgtgggagacagagtgaccatcacatgcaaggccagcgaccacatcaacaactggctggcctggtatcagcagaagcctggacaggcccctaagctgctgatctacggcgctaccacactggaaacaggcgtgcccagcagattttctggcagcggctctggcaccgactacaccctgacaatatccagcctccagcctgaggacttcgccacctactactgtcagcagagctggaacaccccttggacattcggccagggcaccaagctggaaatcaagagactcgagggacagcctaaggccaatcctaccgtgacactgttccctccaagcagcgaagaactccaggccaacaaggccacacttgtgtgcctgatctccgacttctaccctggggctgtgacagtggcttggaaggccgatggatctcctgtgaaagccggcgtggaaaccaccaagccatccaagcagagcaacaacaaatacgccgccagctcctacctgagcctgacacctgagcagtggaagtcccacagatcctacagctgccaagtgacccacgaaggcagcaccgtggaaaagacagtggcccctacagagtgcagcggcagagccgattgcggctttaccagcgagagctaccagcagggcgtgctgagcgccaccatcctgtacgagatcctgctgggcaaggccaccctgtacgccgtgctggtgtctgccctggtgctgatggctatggtcaagcggaaggacagccggggaagggccaagcgatctggatctggagcaacaaacttctcactactcaaacaagcaggtgacgtggaggagaatcccgggcctactagtatggactggatttggcgcatccttttccttgtcggcgctgctaccggcgcccattcccaactgcaactgcaagagtctggccctggcctggtcaagccttctgaaaccctgagcctgacctgtaccgtgtccggcggctctatcagcagcggcgattactactggggctggatcagacagcctccaggcaagggactcgaatggatcggcagcatcagctacagcggctccacctactacaacccaagcctgaagtccagagtgaccatcagcgtggacaccagcagaaaccagttctccctgaagctgagcagcgtgacagccgccgatacagccgtgtattattgcaccagagaggacagcagcaactggcggagtagaggacagggcacactggtcacagtgtcctcttctggaggcggtggaagcggtggaggaggatctgaagtgcagctggttgaatctggcggaggactggttcaggctggcggatctctgagactgtcttgtgccgccagcggcagaacctttagcatgggctggtttagacaggcccctggcaaagagagagagttcgtcgccgccatcacatactctggcggcagcccttactacgccgactctgtgaagggcagattcaccatcagccgggacaacgccaagaacaccgtgtacctccagatgaacagcctgaagcctgaggacaccgccgtgtactactgcgccgccaatccaacatacggcagcgactggaacgccgagaattggggccagggaacccaagtgacagtgtctagcggatccggcggcggaggatctggcggaggcggatctgggggcggaggctctttcgaacaagttcagcttcaacagcctggcgctgagctggtcaaacctggcgcttctgtgaagatgagctgcaaagccagcggctacgccttcagcagctactggatcaactggatgaagcagaaacccggccagggactcgaatggatcggccaaatctatcccggcgacggcgacaccaactacaacggcaagttcaagggcagagccacactgaccgccgatacctctagcagcacagcctacatgcagctgagcagcctgaccagcgaagatagcgccgtgtacttctgtgcccggtccatcacaacagtcgtgggctgcgctatggactattggggccagggaacaagcgtgaccgtgtctagtacgcgtgcctctacaaagggaccctccgtgtttcctctggctcccagcagcaagtctacaagcggaggaacagccgctctgggctgcctggtcaaggattactttcccgagcctgtgaccgtgtcctggaatagcggagcactgacaagcggcgtgcacacctttccagccgtgctgcaaagcagcggcctgtactctctgagcagcgtggtcacagtgcctagctctagcctgggcacccagacctacatctgcaatgtgaaccacaagcctagcaacaccaaggtggacaagagagtggaacccaagagctgtatccccgaggacacattcttcccaagccccgagagcagctgcgacgtgaagctggtggaaaagagcttcgagacagacaccaacctgaacttccagaacctgagcgtgatcggcttcagaatcctgctgctgaaagtggccggctttaacctgctgatgaccctgcggctgtggtccagc

SEQ ID NO: 6418 - DNA, 2160 bp, Artificial Sequence
  Synthetic Polynucloetide
atggactggatttggcgcatccttttccttgtcggcgctgctaccggcgcccattcccaactgcaactgcaagagtctggccctggcctggtcaagccttctgaaaccctgagcctgacctgtaccgtgtccggcggctctatcagcagcggcgattactactggggctggatcagacagcctccaggcaagggactcgaatggatcggcagcatcagctacagcggctccacctactacaacccaagcctgaagtccagagtgaccatcagcgtggacaccagcagaaaccagttctccctgaagctgagcagcgtgacagccgccgatacagccgtgtattattgcaccagagaggacagcagcaactggcggagtagaggacagggcacactggtcacagtgtcctcttctggaggcggtggaagcggtggaggaggatctgaagtgcagctggttgaatctggcggaggactggttcaggctggcggatctctgagactgtcttgtgccgccagcggcagaacctttagcatgggctggtttagacaggcccctggcaaagagagagagttcgtcgccgccatcacatactctggcggcagcccttactacgccgactctgtgaagggcagattcaccatcagccgggacaacgccaagaacaccgtgtacctccagatgaacagcctgaagcctgaggacaccgccgtgtactactgcgccgccaatccaacatacggcagcgactggaacgccgagaattggggccagggaacccaagtgacagtgtctagcggatccggcggcggaggatctggcggaggcggatctgggggcggaggctctttcgaacaagttcagcttcaacagcctggcgctgagctggtcaaacctggcgcttctgtgaagatgagctgcaaagccagcggctacgccttcagcagctactggatcaactggatgaagcagaaacccggccagggactcgaatggatcggccaaatctatcccggcgacggcgacaccaactacaacggcaagttcaagggcagagccacactgaccgccgatacctctagcagcacagcctacatgcagctgagcagcctgaccagcgaagatagcgccgtgtacttctgtgcccggtccatcacaacagtcgtgggctgcgctatggactattggggccagggaacaagcgtgaccgtgtctagtggcggaggcggaagtggaggcggaggatctggcggcggaggctctgacatccagatgacacagagccctagcagcctgtctgccagcgtgggagacagagtgaccatcacatgcaaggccagcgaccacatcaacaactggctggcctggtatcagcagaagcctggacaggcccctaagctgctgatctacggcgctaccacactggaaacaggcgtgcccagcagattttctggcagcggctctggcaccgactacaccctgacaatatccagcctccagcctgaggacttcgccacctactactgtcagcagagctggaacaccccttggacattcggccagggcaccaagctggaaatcaagagaacgcgtggcggaggcagcgacggtaacgaggagatgggaggaatcactcaaaccccttacaaagtctcaatttcaggaacaactgttatccttacatgtccccagtatcctggcagcgagatcctttggcagcataacgacaagaatatagggggagatgaagacgataagaatatcggatctgacgaggatcacttgagcctgaaagagttctccgagcttgaacaaagcggatattatgtgtgctatccgcgcgggtcaaagccggaagacgctaacttttacctttatctccgagccagagtgtgcgaaaattgcatggaaatggacgttatgtccgttgctacaatagttatcgtagatatatgcatcacgggtggactgcttctgctggtttattattggtccaagaatagaaaggccaaagctaaacccgtgaccagaggcgctggcgcaggcggaaggcaaaggggacaaaacaaagaacggccaccaccagtgccaaatccagattatgagcctattcggaaaggacagagggacctgtactctggcctgaatcagagaagaatc

SEQ ID NO: 6419 - DNA, 2055 bp, Artificial Sequence
  Synthetic Polynucloetide
atggactggatttggcgcatccttttccttgtcggcgctgctaccggcgcccattcccaactgcaactgcaagagtctggccctggcctggtcaagccttctgaaaccctgagcctgacctgtaccgtgtccggcggctctatcagcagcggcgattactactggggctggatcagacagcctccaggcaagggactcgaatggatcggcagcatcagctacagcggctccacctactacaacccaagcctgaagtccagagtgaccatcagcgtggacaccagcagaaaccagttctccctgaagctgagcagcgtgacagccgccgatacagccgtgtattattgcaccagagaggacagcagcaactggcggagtagaggacagggcacactggtcacagtgtcctcttctggaggcggtggaagcggtggaggaggatctgaagtgcagctggttgaatctggcggaggactggttcaggctggcggatctctgagactgtcttgtgccgccagcggcagaacctttagcatgggctggtttagacaggcccctggcaaagagagagagttcgtcgccgccatcacatactctggcggcagcccttactacgccgactctgtgaagggcagattcaccatcagccgggacaacgccaagaacaccgtgtacctccagatgaacagcctgaagcctgaggacaccgccgtgtactactgcgccgccaatccaacatacggcagcgactggaacgccgagaattggggccagggaacccaagtgacagtgtctagcggatccggcggcggaggatctggcggaggcggatctgggggcggaggctctttcgaacaagttcagcttcaacagcctggcgctgagctggtcaaacctggcgcttctgtgaagatgagctgcaaagccagcggctacgccttcagcagctactggatcaactggatgaagcagaaacccggccagggactcgaatggatcggccaaatctatcccggcgacggcgacaccaactacaacggcaagttcaagggcagagccacactgaccgccgatacctctagcagcacagcctacatgcagctgagcagcctgaccagcgaagatagcgccgtgtacttctgtgcccggtccatcacaacagtcgtgggctgcgctatggactattggggccagggaacaagcgtgaccgtgtctagtggcggaggcggaagtggaggcggaggatctggcggcggaggctctgacatccagatgacacagagccctagcagcctgtctgccagcgtgggagacagagtgaccatcacatgcaaggccagcgaccacatcaacaactggctggcctggtatcagcagaagcctggacaggcccctaagctgctgatctacggcgctaccacactggaaacaggcgtgcccagcagattttctggcagcggctctggcaccgactacaccctgacaatatccagcctccagcctgaggacttcgccacctactactgtcagcagagctggaacaccccttggacattcggccagggcaccaagctggaaatcaagagaacgcgtggcggaggcagcttcaagatccccatcgaggaactggaagatcgggtgttcgtgaactgcaacacctctatcacctgggtggaaggcaccgtgggaacactgctgagcgacatcaccagactggacctcggcaagcggattctggaccctcggggcatctacagatgcaacggcaccgacatctacaaggacaaagaaagcaccgtgcaggtccactacagaatgtgccagtcctgcgtggaactggaccctgctacagtggccggcatcatcgtgaccgatgtgatcgctactctgctgctggctctgggagtgttctgcttcgccggacacgaaacaggcagactgtctggcgctgccgatacacaggccctgctgagaaacgaccaagtgtatcagcccctgcgcgacagagatgatgcccagtattctcacctcggcggcaactgggctagaaacaag

SEQ ID NO: 6420 - DNA, 2085 bp, Artificial Sequence
  Synthetic Polynucloetide
atggactggatttggcgcatccttttccttgtcggcgctgctaccggcgcccattcccaactgcaactgcaagagtctggccctggcctggtcaagccttctgaaaccctgagcctgacctgtaccgtgtccggcggctctatcagcagcggcgattactactggggctggatcagacagcctccaggcaagggactcgaatggatcggcagcatcagctacagcggctccacctactacaacccaagcctgaagtccagagtgaccatcagcgtggacaccagcagaaaccagttctccctgaagctgagcagcgtgacagccgccgatacagccgtgtattattgcaccagagaggacagcagcaactggcggagtagaggacagggcacactggtcacagtgtcctcttctggaggcggtggaagcggtggaggaggatctgaagtgcagctggttgaatctggcggaggactggttcaggctggcggatctctgagactgtcttgtgccgccagcggcagaacctttagcatgggctggtttagacaggcccctggcaaagagagagagttcgtcgccgccatcacatactctggcggcagcccttactacgccgactctgtgaagggcagattcaccatcagccgggacaacgccaagaacaccgtgtacctccagatgaacagcctgaagcctgaggacaccgccgtgtactactgcgccgccaatccaacatacggcagcgactggaacgccgagaattggggccagggaacccaagtgacagtgtctagcggatccggcggcggaggatctggcggaggcggatctgggggcggaggctctttcgaacaagttcagcttcaacagcctggcgctgagctggtcaaacctggcgcttctgtgaagatgagctgcaaagccagcggctacgccttcagcagctactggatcaactggatgaagcagaaacccggccagggactcgaatggatcggccaaatctatcccggcgacggcgacaccaactacaacggcaagttcaagggcagagccacactgaccgccgatacctctagcagcacagcctacatgcagctgagcagcctgaccagcgaagatagcgccgtgtacttctgtgcccggtccatcacaacagtcgtgggctgcgctatggactattggggccagggaacaagcgtgaccgtgtctagtggcggaggcggaagtggaggcggaggatctggcggcggaggctctgacatccagatgacacagagccctagcagcctgtctgccagcgtgggagacagagtgaccatcacatgcaaggccagcgaccacatcaacaactggctggcctggtatcagcagaagcctggacaggcccctaagctgctgatctacggcgctaccacactggaaacaggcgtgcccagcagattttctggcagcggctctggcaccgactacaccctgacaatatccagcctccagcctgaggacttcgccacctactactgtcagcagagctggaacaccccttggacattcggccagggcaccaagctggaaatcaagagaacgcgtggcggaggcagccagagcatcaagggcaaccacctggtcaaggtgtacgactaccaagaggacggcagcgtgctgctgacatgtgatgccgaggccaagaacatcacctggtttaaggacggcaagatgatcggcttcctgaccgaggacaagaagaagtggaacctgggcagcaacgctaaggaccccagaggcatgtatcagtgcaagggcagccagaacaagagcaagcccctccaggtgtactaccggatgtgccagaactgcatcgagctgaacgccgctaccatcagcggctttctgttcgccgagatcgtgtccatcttcgtgctggccgtgggcgtgtactttatcgctggacaggatggcgtgcggcagagcagagcttccgataagcaaaccctgctgcctaacgaccagctgtaccagcctctgaaggacagagaggacgaccagtacagccacctccagggcaatcagctgagaagaaac

SEQ ID NO: 6421 - DNA, 2034 bp, Artificial Sequence
  Synthetic Polynucloetide
atggactggatttggcgcatccttttccttgtcggcgctgctaccggcgcccattcccaactgcaactgcaagagtctggccctggcctggtcaagccttctgaaaccctgagcctgacctgtaccgtgtccggcggctctatcagcagcggcgattactactggggctggatcagacagcctccaggcaagggactcgaatggatcggcagcatcagctacagcggctccacctactacaacccaagcctgaagtccagagtgaccatcagcgtggacaccagcagaaaccagttctccctgaagctgagcagcgtgacagccgccgatacagccgtgtattattgcaccagagaggacagcagcaactggcggagtagaggacagggcacactggtcacagtgtcctcttctggaggcggtggaagcggtggaggaggatctgaagtgcagctggttgaatctggcggaggactggttcaggctggcggatctctgagactgtcttgtgccgccagcggcagaacctttagcatgggctggtttagacaggcccctggcaaagagagagagttcgtcgccgccatcacatactctggcggcagcccttactacgccgactctgtgaagggcagattcaccatcagccgggacaacgccaagaacaccgtgtacctccagatgaacagcctgaagcctgaggacaccgccgtgtactactgcgccgccaatccaacatacggcagcgactggaacgccgagaattggggccagggaacccaagtgacagtgtctagcggatccggcggcggaggatctggcggaggcggatctgggggcggaggctctttcgaacaagttcagcttcaacagcctggcgctgagctggtcaaacctggcgcttctgtgaagatgagctgcaaagccagcggctacgccttcagcagctactggatcaactggatgaagcagaaacccggccagggactcgaatggatcggccaaatctatcccggcgacggcgacaccaactacaacggcaagttcaagggcagagccacactgaccgccgatacctctagcagcacagcctacatgcagctgagcagcctgaccagcgaagatagcgccgtgtacttctgtgcccggtccatcacaacagtcgtgggctgcgctatggactattggggccagggaacaagcgtgaccgtgtctagtggcggaggcggaagtggaggcggaggatctggcggcggaggctctgacatccagatgacacagagccctagcagcctgtctgccagcgtgggagacagagtgaccatcacatgcaaggccagcgaccacatcaacaactggctggcctggtatcagcagaagcctggacaggcccctaagctgctgatctacggcgctaccacactggaaacaggcgtgcccagcagattttctggcagcggctctggcaccgactacaccctgacaatatccagcctccagcctgaggacttcgccacctactactgtcagcagagctggaacaccccttggacattcggccagggcaccaagctggaaatcaagagaacgcgtggcggaggcagccagagttttgggttgttggaccctaaattgtgctatctgttggacggaatcctgttcatttacggagtgatcctgaccgcattgttcctgcgggttaagttttccagatccgcagacgcacccgcttaccaacaagggcagaaccaactctacaatgaacttaatttggggcggagggaagagtacgacgttctggacaaaaggaggggacgagatcccgagatgggcggaaagcctcagcgaaggaagaatccgcaagaggggctttataacgaactccagaaagataaaatggcagaagcctatagtgagattgggatgaagggagaaaggaggaggggtaaaggtcacgatgggttgtaccaaggattgagcacagccactaaagatacctatgatgcgctccacatgcaggccctgccgccaaga

SEQ ID NO: 6422 - DNA, 2145 bp, Artificial Sequence
  Synthetic Polynucloetide
atggactggatttggcgcatccttttccttgtcggcgctgctaccggcgcccattcccaactgcaactgcaagagtctggccctggcctggtcaagccttctgaaaccctgagcctgacctgtaccgtgtccggcggctctatcagcagcggcgattactactggggctggatcagacagcctccaggcaagggactcgaatggatcggcagcatcagctacagcggctccacctactacaacccaagcctgaagtccagagtgaccatcagcgtggacaccagcagaaaccagttctccctgaagctgagcagcgtgacagccgccgatacagccgtgtattattgcaccagagaggacagcagcaactggcggagtagaggacagggcacactggtcacagtgtcctcttctggaggcggtggaagcggtggaggaggatctgaagtgcagctggttgaatctggcggaggactggttcaggctggcggatctctgagactgtcttgtgccgccagcggcagaacctttagcatgggctggtttagacaggcccctggcaaagagagagagttcgtcgccgccatcacatactctggcggcagcccttactacgccgactctgtgaagggcagattcaccatcagccgggacaacgccaagaacaccgtgtacctccagatgaacagcctgaagcctgaggacaccgccgtgtactactgcgccgccaatccaacatacggcagcgactggaacgccgagaattggggccagggaacccaagtgacagtgtctagcggatccggcggcggaggatctggcggaggcggatctgggggcggaggctctttcgaacaagttcagcttcaacagcctggcgctgagctggtcaaacctggcgcttctgtgaagatgagctgcaaagccagcggctacgccttcagcagctactggatcaactggatgaagcagaaacccggccagggactcgaatggatcggccaaatctatcccggcgacggcgacaccaactacaacggcaagttcaagggcagagccacactgaccgccgatacctctagcagcacagcctacatgcagctgagcagcctgaccagcgaagatagcgccgtgtacttctgtgcccggtccatcacaacagtcgtgggctgcgctatggactattggggccagggaacaagcgtgaccgtgtctagtacgcgtatccagaaccctgatcctgccgtgtaccagctgcgggatagcaagagcagcgacaagagcgtgtgtctgttcaccgacttcgacagccagaccaacgtgtcccagagcaaggactccgacgtgtacatcaccgataagaccgtgctggacatgcggagcatggacttcaagagcaactccgccgtggcctggtccaacaagtccgatttcgcctgcgccaacgccttcaacaacagcattatccccgaggacacattcttcccaagccccgagagcagctgcgacgtgaagctggtggaaaagagcttcgagacagacaccaacctgaacttccagaacctgagcgtgatcggcttcagaatcctgctgctgaaagtggccggctttaacctgctgatgaccctgcggctgtggtccagccgcgccaagagaagcggatctggcgtgaagcagaccctgaatttcgacctgctgaagctggctggcgacgtggaatccaacccaggcccttctagaggccatatggccaagcctttgtctcaagaagaatccaccctcattgaaagagcaacggctacaatcaacagcatccccatctctgaagactacagcgtcgccagcgcagctctctctagcgacggccgcatcttcactggtgtcaatgtatatcattttactgggggaccttgtgcagaactcgtggtgctgggcactgctgctgctgcggcagctggcaacctgacttgtatcgtcgcgatcggaaatgagaacaggggcatcttgagcccctgcggacggtgccgacaggtgcttctcgatctgcatcctgggatcaaagccatagtgaaggacagtgatggacagccgacggcagttgggattcgtgaattgctgccctctggttatgtgtgggagggctga

SEQ ID NO: 6423 - DNA, 1644 bp, Artificial Sequence
  Synthetic Polynucloetide
atggactggatttggcgcatccttttccttgtcggcgctgctaccggcgcccattcccaactgcaactgcaagagtctggccctggcctggtcaagccttctgaaaccctgagcctgacctgtaccgtgtccggcggctctatcagcagcggcgattactactggggctggatcagacagcctccaggcaagggactcgaatggatcggcagcatcagctacagcggctccacctactacaacccaagcctgaagtccagagtgaccatcagcgtggacaccagcagaaaccagttctccctgaagctgagcagcgtgacagccgccgatacagccgtgtattattgcaccagagaggacagcagcaactggcggagtagaggacagggcacactggtcacagtgtcctcttctggaggcggtggaagcggtggaggaggatctgaagtgcagctggttgaatctggcggaggactggttcaggctggcggatctctgagactgtcttgtgccgccagcggcagaacctttagcatgggctggtttagacaggcccctggcaaagagagagagttcgtcgccgccatcacatactctggcggcagcccttactacgccgactctgtgaagggcagattcaccatcagccgggacaacgccaagaacaccgtgtacctccagatgaacagcctgaagcctgaggacaccgccgtgtactactgcgccgccaatccaacatacggcagcgactggaacgccgagaattggggccagggaacccaagtgacagtgtctagcggatccggcggcggaggatctggcggaggcggatctgggggcggaggctctttcgaacaagttcagcttcaacagcctggcgctgagctggtcaaacctggcgcttctgtgaagatgagctgcaaagccagcggctacgccttcagcagctactggatcaactggatgaagcagaaacccggccagggactcgaatggatcggccaaatctatcccggcgacggcgacaccaactacaacggcaagttcaagggcagagccacactgaccgccgatacctctagcagcacagcctacatgcagctgagcagcctgaccagcgaagatagcgccgtgtacttctgtgcccggtccatcacaacagtcgtgggctgcgctatggactattggggccagggaacaagcgtgaccgtgtctagtacgcgtatccagaaccctgatcctgccgtgtaccagctgcgggatagcaagagcagcgacaagagcgtgtgtctgttcaccgacttcgacagccagaccaacgtgtcccagagcaaggactccgacgtgtacatcaccgataagaccgtgctggacatgcggagcatggacttcaagagcaactccgccgtggcctggtccaacaagtccgatttcgcctgcgccaacgccttcaacaacagcattatccccgaggacacattcttcccaagccccgagagcagctgcgacgtgaagctggtggaaaagagcttcgagacagacaccaacctgaacttccagaacctgagcgtgatcggcttcagaatcctgctgctgaaagtggccggctttaacctgctgatgaccctgcggctgtggtccagc

SEQ ID NO: 6424 - DNA, 2181 bp, Artificial Sequence
  Synthetic Polynucloetide
atggactggatttggcgcatccttttccttgtcggcgctgctaccggcgcccattcccaactgcaactgcaagagtctggccctggcctggtcaagccttctgaaaccctgagcctgacctgtaccgtgtccggcggctctatcagcagcggcgattactactggggctggatcagacagcctccaggcaagggactcgaatggatcggcagcatcagctacagcggctccacctactacaacccaagcctgaagtccagagtgaccatcagcgtggacaccagcagaaaccagttctccctgaagctgagcagcgtgacagccgccgatacagccgtgtattattgcaccagagaggacagcagcaactggcggagtagaggacagggcacactggtcacagtgtcctcttctggaggcggtggaagcggtggaggaggatctgaagtgcagctggttgaatctggcggaggactggttcaggctggcggatctctgagactgtcttgtgccgccagcggcagaacctttagcatgggctggtttagacaggcccctggcaaagagagagagttcgtcgccgccatcacatactctggcggcagcccttactacgccgactctgtgaagggcagattcaccatcagccgggacaacgccaagaacaccgtgtacctccagatgaacagcctgaagcctgaggacaccgccgtgtactactgcgccgccaatccaacatacggcagcgactggaacgccgagaattggggccagggaacccaagtgacagtgtctagcggatccggcggcggaggatctggcggaggcggatctgggggcggaggctctttcgaacaagttcagcttcaacagcctggcgctgagctggtcaaacctggcgcttctgtgaagatgagctgcaaagccagcggctacgccttcagcagctactggatcaactggatgaagcagaaacccggccagggactcgaatggatcggccaaatctatcccggcgacggcgacaccaactacaacggcaagttcaagggcagagccacactgaccgccgatacctctagcagcacagcctacatgcagctgagcagcctgaccagcgaagatagcgccgtgtacttctgtgcccggtccatcacaacagtcgtgggctgcgctatggactattggggccagggaacaagcgtgaccgtgtctagtacgcgtgagcagaaactgatctcggaagaggatgggagcggcatccagaaccctgatcctgccgtgtaccagctgcgggatagcaagagcagcgacaagagcgtgtgtctgttcaccgacttcgacagccagaccaacgtgtcccagagcaaggactccgacgtgtacatcaccgataagtgcgtgctggacatgcggagcatggacttcaagagcaactccgccgtggcctggtccaacaagtccgatttcgcctgcgccaacgccttcaacaacagcattatccccgaggacacattcttcccaagccccgagagcagctgcgacgtgaagctggtggaaaagagcttcgagacagacaccaacctgaacttccagaacctgagcgtgatcggcttcagaatcctgctgctgaaagtggccggctttaacctgctgatgaccctgcggctgtggtccagccgcgccaagagaagcggatctggcgtgaagcagaccctgaatttcgacctgctgaagctggctggcgacgtggaatccaacccaggcccttctagaggccatatggccaagcctttgtctcaagaagaatccaccctcattgaaagagcaacggctacaatcaacagcatccccatctctgaagactacagcgtcgccagcgcagctctctctagcgacggccgcatcttcactggtgtcaatgtatatcattttactgggggaccttgtgcagaactcgtggtgctgggcactgctgctgctgcggcagctggcaacctgacttgtatcgtcgcgatcggaaatgagaacaggggcatcttgagcccctgcggacggtgccgacaggtgcttctcgatctgcatcctgggatcaaagccatagtgaaggacagtgatggacagccgacggcagttgggattcgtgaattgctgccctctggttatgtgtgggagggctga

SEQ ID NO: 6425 - DNA, 1683 bp, Artificial Sequence
  Synthetic Polynucloetide
atggactggatttggcgcatccttttccttgtcggcgctgctaccggcgcccattcccaactgcaactgcaagagtctggccctggcctggtcaagccttctgaaaccctgagcctgacctgtaccgtgtccggcggctctatcagcagcggcgattactactggggctggatcagacagcctccaggcaagggactcgaatggatcggcagcatcagctacagcggctccacctactacaacccaagcctgaagtccagagtgaccatcagcgtggacaccagcagaaaccagttctccctgaagctgagcagcgtgacagccgccgatacagccgtgtattattgcaccagagaggacagcagcaactggcggagtagaggacagggcacactggtcacagtgtcctcttctggaggcggtggaagcggtggaggaggatctgaagtgcagctggttgaatctggcggaggactggttcaggctggcggatctctgagactgtcttgtgccgccagcggcagaacctttagcatgggctggtttagacaggcccctggcaaagagagagagttcgtcgccgccatcacatactctggcggcagcccttactacgccgactctgtgaagggcagattcaccatcagccgggacaacgccaagaacaccgtgtacctccagatgaacagcctgaagcctgaggacaccgccgtgtactactgcgccgccaatccaacatacggcagcgactggaacgccgagaattggggccagggaacccaagtgacagtgtctagcggatccggcggcggaggatctggcggaggcggatctgggggcggaggctctttcgaacaagttcagcttcaacagcctggcgctgagctggtcaaacctggcgcttctgtgaagatgagctgcaaagccagcggctacgccttcagcagctactggatcaactggatgaagcagaaacccggccagggactcgaatggatcggccaaatctatcccggcgacggcgacaccaactacaacggcaagttcaagggcagagccacactgaccgccgatacctctagcagcacagcctacatgcagctgagcagcctgaccagcgaagatagcgccgtgtacttctgtgcccggtccatcacaacagtcgtgggctgcgctatggactattggggccagggaacaagcgtgaccgtgtctagtacgcgtgagcagaaactgatctcggaagaggatgggagcggcatccagaaccctgatcctgccgtgtaccagctgcgggatagcaagagcagcgacaagagcgtgtgtctgttcaccgacttcgacagccagaccaacgtgtcccagagcaaggactccgacgtgtacatcaccgataagtgcgtgctggacatgcggagcatggacttcaagagcaactccgccgtggcctggtccaacaagtccgatttcgcctgcgccaacgccttcaacaacagcattatccccgaggacacattcttcccaagccccgagagcagctgcgacgtgaagctggtggaaaagagcttcgagacagacaccaacctgaacttccagaacctgagcgtgatcggcttcagaatcctgctgctgaaagtggccggctttaacctgctgatgaccctgcggctgtggtccagctga

SEQ ID NO: 6426 - DNA, 4158 bp, Artificial Sequence
  Synthetic Polynucloetide
atggccttaccagtgaccgccttgctcctgccgctggccttgctgctccacgccgccaggccggaggttcagctgcttgagtctggcggaggactggttcaacctggcggaagcctgagactgtcttgtgccgccagcggcttcacctttagcagctacgccatgagctgggtccgacaggctcctggcaaaggactggaatgggtgtccagcatcagcggcagcggcgactacatctactacgccgatagcgtgaagggcagattcaccatcagccgggacatcagcaagaacaccctgtacctccagatgaacagcctgagagccgaggacaccgccgtgtactactgtgccaaagaaggcaccggcgctaacagcagcctggccgattatagaggccagggcacactggtcaccgtgtctagtggcggaggaagcggcggaggatctgaagtgcaggttttggagtctggcggaggactggttcagcctggcggatctctgagactgtcttgtgccgccagcggcttcaccttcagcaactttgccatgagctgggtccgacaggcccctggcaaaggacttgaatgggtgtccacaatcagcggcagcgccggcacaacagattacgccgattctgtgaagggcagattcaccatcagccgggacaacagcaagaaaaccctgtacctccagatgaacagcctgcgcgtggaagataccgccgtgtactactgtgccgatggcagaggccccttcttcgattatcgcggccagggcacactggtcaccgtttcttctggtaccggcggaggcggatctggcggcggaggtagcggtggcggaggatctgaattcgacatccagatgacacagagccctagcagcctgtctgccagcgtgggagacagagtgaccatcacatgcaaggccagcgaccacatcaacaactggctggcctggtatcagcagaagcctggacaggcccctaagctgctgatctacggcgctaccacactggaaacaggcgtgcccagcagattttctggcagcggctctggcaccgactacaccctgacaatatccagcctccagcctgaggacttcgccacctactactgtcagcagagctggaacaccccttggacattcggccagggcaccaagctggaaatcaagagactcgagatccagaaccctgatcctgccgtgtaccagctgcgggatagcaagagcagcgacaagagcgtgtgtctgttcaccgacttcgacagccagaccaacgtgtcccagagcaaggactccgacgtgtacatcaccgataagtgcgtgctggacatgcggagcatggacttcaagagcaactccgccgtggcctggtccaacaagtccgatttcgcctgcgccaacgccttcaacaacagcattatccccgaggacacattcttcccaagcagcgacgtgccctgcgacgtgaagctggtggaaaagagcttcgagacagacaccaacctgaacttccagaacctgagcgtgatcggcttcagaatcctgctgctgaaagtggccggctttaacctgctgatgaccctgcggctgtggtccagccgcgccaagagaagcggatctggcgtgaagcagaccctgaatttcgacctgctgaagctggctggcgacgtggaatccaacccaggccctactagtatggactggatttggcgcatccttttccttgtcggcgctgctaccggcgcccattcccaactgcaactgcaagagtctggccctggcctggtcaagccttctgaaaccctgagcctgacctgtaccgtgtccggcggctctatcagcagcggcgattactactggggctggatcagacagcctccaggcaagggactcgaatggatcggcagcatcagctacagcggctccacctactacaacccaagcctgaagtccagagtgaccatcagcgtggacaccagcagaaaccagttctccctgaagctgagcagcgtgacagccgccgatacagccgtgtattattgcaccagagaggacagcagcaactggcggagtagaggacagggcacactggtcacagtgtcctcttctggaggcggtggaagcggtggaggaggatctgaagtgcagctggttgaatctggcggaggactggttcaggctggcggatctctgagactgtcttgtgccgccagcggcagaacctttagcatgggctggtttagacaggcccctggcaaagagagagagttcgtcgccgccatcacatactctggcggcagcccttactacgccgactctgtgaagggcagattcaccatcagccgggacaacgccaagaacaccgtgtacctccagatgaacagcctgaagcctgaggacaccgccgtgtactactgcgccgccaatccaacatacggcagcgactggaacgccgagaattggggccagggaacccaagtgacagtgtctagcggatccggcggcggaggatctggcggaggcggatctgggggcggaggctctttcgaacaagttcagcttcaacagcctggcgctgagctggtcaaacctggcgcttctgtgaagatgagctgcaaagccagcggctacgccttcagcagctactggatcaactggatgaagcagaaacccggccagggactcgaatggatcggccaaatctatcccggcgacggcgacaccaactacaacggcaagttcaagggcagagccacactgaccgccgatacctctagcagcacagcctacatgcagctgagcagcctgaccagcgaagatagcgccgtgtacttctgtgcccggtccatcacaacagtcgtgggctgcgctatggactattggggccagggaacaagcgtgaccgtgtctagtacgcgtgaggacctgaagaacgtgttcccacctgaggtggccgtgttcgagcctagcaaggccgagatcgcccacacccagaaagccaccctcgtgtgcctggctaccggcttctaccccgaccatgtggaactgtcttggtgggtcaacggcaaagaggtgcacagcggcgtgtgtaccgacccccagccactgaaagaacagcccgccctgaacgacagccggtactgcctgagcagcagactgagagtgtccgccaccttctggcagaacccccggaaccacttcagatgccaggtgcagttctacggcctgagcgagaacgacgagtggacccaggacagagccaagcccgtgacccagatcgtgtctgccgaagcctggggcagagccgattgcggcatcaccagcgccagctaccaccagggcgtgctgagcgccaccatcctgtacgagatcctgctgggcaaggccaccctgtacgccgtgctggtgtctgccctggtgctgatggctatggtcaagcggaaggacagccggggaagggccaagcgatctggatctggagcaacaaacttctcactactcaaacaagcaggtgacgtggaggagaatcccgggccttctagaggccatatgaccgagtacaagcccacggtgcgcctcgccacccgcgacgacgtccccagggccgtacgcaccctcgccgccgcgttcgccgactaccccgccacgcgccacaccgtcgatccggaccgccacatcgagcgggtcaccgagctgcaagaactcttcctcacgcgcgtcgggctcgacatcggcaaggtgtgggtcgcggacgacggcgccgcggtggcggtctggaccacgccggagagcgtcgaagcgggggcggtgttcgccgagatcggcccgcgcatggccgagttgagcggttcccggctggccgcgcagcaacagatggaaggcctcctggcgccgcaccggcccaaggagcccgcgtggttcctggccaccgtcggcgtctcgcccgaccaccagggcaagggtctgggcagcgccgtcgtgctccccggagtggaggcggccgagcgcgccggggtgcccgccttcctggagacctccgcgccccgcaacctccccttctacgagcggctcggcttcaccgtcaccgccgacgtcgaggtgcccgaaggaccgcgcacctggtgcatgacccgcaagcccggtgcctga

SEQ ID NO: 6427 - DNA, 4155 bp, Artificial Sequence
  Synthetic Polynucloetide
atggccttaccagtgaccgccttgctcctgccgctggccttgctgctccacgccgccaggccggaggttcagctgcttgagtctggcggaggactggttcaacctggcggaagcctgagactgtcttgtgccgccagcggcttcacctttagcagctacgccatgagctgggtccgacaggctcctggcaaaggactggaatgggtgtccagcatcagcggcagcggcgactacatctactacgccgatagcgtgaagggcagattcaccatcagccgggacatcagcaagaacaccctgtacctccagatgaacagcctgagagccgaggacaccgccgtgtactactgtgccaaagaaggcaccggcgctaacagcagcctggccgattatagaggccagggcacactggtcaccgtgtctagtggcggaggaagcggcggaggatctgaagtgcaggttttggagtctggcggaggactggttcagcctggcggatctctgagactgtcttgtgccgccagcggcttcaccttcagcaactttgccatgagctgggtccgacaggcccctggcaaaggacttgaatgggtgtccacaatcagcggcagcgccggcacaacagattacgccgattctgtgaagggcagattcaccatcagccgggacaacagcaagaaaaccctgtacctccagatgaacagcctgcgcgtggaagataccgccgtgtactactgtgccgatggcagaggccccttcttcgattatcgcggccagggcacactggtcaccgtttcttctggtaccggcggaggcggatctggcggcggaggtagcggtggcggaggatctgaattcgacatccagatgacacagagccctagcagcctgtctgccagcgtgggagacagagtgaccatcacatgcaaggccagcgaccacatcaacaactggctggcctggtatcagcagaagcctggacaggcccctaagctgctgatctacggcgctaccacactggaaacaggcgtgcccagcagattttctggcagcggctctggcaccgactacaccctgacaatatccagcctccagcctgaggacttcgccacctactactgtcagcagagctggaacaccccttggacattcggccagggcaccaagctggaaatcaagagactcgaggacctgaagaacgtgttcccacctgaggtggccgtgttcgagcctagcaaggccgagatcgcccacacccagaaagccaccctcgtgtgcctggctaccggcttctaccccgaccatgtggaactgtcttggtgggtcaacggcaaagaggtgcacagcggcgtgtgtaccgacccccagccactgaaagaacagcccgccctgaacgacagccggtactgcctgagcagcagactgagagtgtccgccaccttctggcagaacccccggaaccacttcagatgccaggtgcagttctacggcctgagcgagaacgacgagtggacccaggacagagccaagcccgtgacccagatcgtgtctgccgaagcctggggcagagccgattgcggcatcaccagcgccagctaccaccagggcgtgctgagcgccaccatcctgtacgagatcctgctgggcaaggccaccctgtacgccgtgctggtgtctgccctggtgctgatggctatggtcaagcggaaggacagccggggaagggccaagcgatctggatctggagcaacaaacttctcactactcaaacaagcaggtgacgtggaggagaatcccgggcctactagtatggactggatttggcgcatccttttccttgtcggcgctgctaccggcgcccattcccaactgcaactgcaagagtctggccctggcctggtcaagccttctgaaaccctgagcctgacctgtaccgtgtccggcggctctatcagcagcggcgattactactggggctggatcagacagcctccaggcaagggactcgaatggatcggcagcatcagctacagcggctccacctactacaacccaagcctgaagtccagagtgaccatcagcgtggacaccagcagaaaccagttctccctgaagctgagcagcgtgacagccgccgatacagccgtgtattattgcaccagagaggacagcagcaactggcggagtagaggacagggcacactggtcacagtgtcctcttctggaggcggtggaagcggtggaggaggatctgaagtgcagctggttgaatctggcggaggactggttcaggctggcggatctctgagactgtcttgtgccgccagcggcagaacctttagcatgggctggtttagacaggcccctggcaaagagagagagttcgtcgccgccatcacatactctggcggcagcccttactacgccgactctgtgaagggcagattcaccatcagccgggacaacgccaagaacaccgtgtacctccagatgaacagcctgaagcctgaggacaccgccgtgtactactgcgccgccaatccaacatacggcagcgactggaacgccgagaattggggccagggaacccaagtgacagtgtctagcggatccggcggcggaggatctggcggaggcggatctgggggcggaggctctttcgaacaagttcagcttcaacagcctggcgctgagctggtcaaacctggcgcttctgtgaagatgagctgcaaagccagcggctacgccttcagcagctactggatcaactggatgaagcagaaacccggccagggactcgaatggatcggccaaatctatcccggcgacggcgacaccaactacaacggcaagttcaagggcagagccacactgaccgccgatacctctagcagcacagcctacatgcagctgagcagcctgaccagcgaagatagcgccgtgtacttctgtgcccggtccatcacaacagtcgtgggctgcgctatggactattggggccagggaacaagcgtgaccgtgtctagtacgcgtatccagaaccctgatcctgccgtgtaccagctgcgggatagcaagagcagcgacaagagcgtgtgtctgttcaccgacttcgacagccagaccaacgtgtcccagagcaaggactccgacgtgtacatcaccgataagtgcgtgctggacatgcggagcatggacttcaagagcaactccgccgtggcctggtccaacaagtccgatttcgcctgcgccaacgccttcaacaacagcattatccccgaggacacattcttcccaagcagcgacgtgccctgcgacgtgaagctggtggaaaagagcttcgagacagacaccaacctgaacttccagaacctgagcgtgatcggcttcagaatcctgctgctgaaagtggccggctttaacctgctgatgaccctgcggctgtggtccagccgcgccaagagaagcggatctggcgtgaagcagaccctgaatttcgacctgctgaagctggctggcgacgtggaatccaacccaggcccttctagaggccatatgaccgagtacaagcccacggtgcgcctcgccacccgcgacgacgtccccagggccgtacgcaccctcgccgccgcgttcgccgactaccccgccacgcgccacaccgtcgatccggaccgccacatcgagcgggtcaccgagctgcaagaactcttcctcacgcgcgtcgggctcgacatcggcaaggtgtgggtcgcggacgacggcgccgcggtggcggtctggaccacgccggagagcgtcgaagcgggggcggtgttcgccgagatcggcccgcgcatggccgagttgagcggttcccggctggccgcgcagcaacagatggaaggcctcctggcgccgcaccggcccaaggagcccgcgtggttcctggccaccgtcggcgtctcgcccgaccaccagggcaagggtctgggcagcgccgtcgtgctccccggagtggaggcggccgagcgcgccggggtgcccgccttcctggagacctccgcgccccgcaacctccccttctacgagcggctcggcttcaccgtcaccgccgacgtcgaggtgcccgaaggaccgcgcacctggtgcatgacccgcaagcccggtgcctga

SEQ ID NO: 6428 - DNA, 4155 bp, Artificial Sequence
  Synthetic Polynucloetide
atggccttaccagtgaccgccttgctcctgccgctggccttgctgctccacgccgccaggccggaggttcagctgcttgagtctggcggaggactggttcaacctggcggaagcctgagactgtcttgtgccgccagcggcttcacctttagcagctacgccatgagctgggtccgacaggctcctggcaaaggactggaatgggtgtccagcatcagcggcagcggcgactacatctactacgccgatagcgtgaagggcagattcaccatcagccgggacatcagcaagaacaccctgtacctccagatgaacagcctgagagccgaggacaccgccgtgtactactgtgccaaagaaggcaccggcgctaacagcagcctggccgattatagaggccagggcacactggtcaccgtgtctagtggcggaggaagcggcggaggatctgaagtgcaggttttggagtctggcggaggactggttcagcctggcggatctctgagactgtcttgtgccgccagcggcttcaccttcagcaactttgccatgagctgggtccgacaggcccctggcaaaggacttgaatgggtgtccacaatcagcggcagcgccggcacaacagattacgccgattctgtgaagggcagattcaccatcagccgggacaacagcaagaaaaccctgtacctccagatgaacagcctgcgcgtggaagataccgccgtgtactactgtgccgatggcagaggccccttcttcgattatcgcggccagggcacactggtcaccgtttcttctggtaccggcggaggcggatctggcggcggaggtagcggtggcggaggatctgaattcgacatccagatgacacagagccctagcagcctgtctgccagcgtgggagacagagtgaccatcacatgcaaggccagcgaccacatcaacaactggctggcctggtatcagcagaagcctggacaggcccctaagctgctgatctacggcgctaccacactggaaacaggcgtgcccagcagattttctggcagcggctctggcaccgactacaccctgacaatatccagcctccagcctgaggacttcgccacctactactgtcagcagagctggaacaccccttggacattcggccagggcaccaagctggaaatcaagagactcgaggacctgaagaacgtgttcccacctgaggtggccgtgttcgagcctagcgaggccgagatcagccacacccagaaagccaccctcgtgtgcctggctaccggcttctaccccgaccatgtggaactgtcttggtgggtcaacggcaaagaggtgcacagcggcgtgtgtaccgacccccagccactgaaagaacagcccgccctgaacgacagccggtactgcctgagcagcagactgagagtgtccgccaccttctggcagaacccccggaaccacttcagatgccaggtgcagttctacggcctgagcgagaacgacgagtggacccaggacagagccaagcccgtgacccagatcgtgtctgccgaagcctggggcagagccgattgcggctttaccagcgagagctaccagcagggcgtgctgagcgccaccatcctgtacgagatcctgctgggcaaggccaccctgtacgccgtgctggtgtctgccctggtgctgatggctatggtcaagcggaaggacagccggggaagggccaagcgatctggatctggagcaacaaacttctcactactcaaacaagcaggtgacgtggaggagaatcccgggcctactagtatggactggatttggcgcatccttttccttgtcggcgctgctaccggcgcccattcccaactgcaactgcaagagtctggccctggcctggtcaagccttctgaaaccctgagcctgacctgtaccgtgtccggcggctctatcagcagcggcgattactactggggctggatcagacagcctccaggcaagggactcgaatggatcggcagcatcagctacagcggctccacctactacaacccaagcctgaagtccagagtgaccatcagcgtggacaccagcagaaaccagttctccctgaagctgagcagcgtgacagccgccgatacagccgtgtattattgcaccagagaggacagcagcaactggcggagtagaggacagggcacactggtcacagtgtcctcttctggaggcggtggaagcggtggaggaggatctgaagtgcagctggttgaatctggcggaggactggttcaggctggcggatctctgagactgtcttgtgccgccagcggcagaacctttagcatgggctggtttagacaggcccctggcaaagagagagagttcgtcgccgccatcacatactctggcggcagcccttactacgccgactctgtgaagggcagattcaccatcagccgggacaacgccaagaacaccgtgtacctccagatgaacagcctgaagcctgaggacaccgccgtgtactactgcgccgccaatccaacatacggcagcgactggaacgccgagaattggggccagggaacccaagtgacagtgtctagcggatccggcggcggaggatctggcggaggcggatctgggggcggaggctctttcgaacaagttcagcttcaacagcctggcgctgagctggtcaaacctggcgcttctgtgaagatgagctgcaaagccagcggctacgccttcagcagctactggatcaactggatgaagcagaaacccggccagggactcgaatggatcggccaaatctatcccggcgacggcgacaccaactacaacggcaagttcaagggcagagccacactgaccgccgatacctctagcagcacagcctacatgcagctgagcagcctgaccagcgaagatagcgccgtgtacttctgtgcccggtccatcacaacagtcgtgggctgcgctatggactattggggccagggaacaagcgtgaccgtgtctagtacgcgtatccagaaccctgatcctgccgtgtaccagctgcgggatagcaagagcagcgacaagagcgtgtgtctgttcaccgacttcgacagccagaccaacgtgtcccagagcaaggactccgacgtgtacatcaccgataagtgcgtgctggacatgcggagcatggacttcaagagcaactccgccgtggcctggtccaacaagtccgatttcgcctgcgccaacgccttcaacaacagcattatccccgaggacacattcttcccaagccccgagagcagctgcgacgtgaagctggtggaaaagagcttcgagacagacaccaacctgaacttccagaacctgagcgtgatcggcttcagaatcctgctgctgaaagtggccggctttaacctgctgatgaccctgcggctgtggtccagccgcgccaagagaagcggatctggcgtgaagcagaccctgaatttcgacctgctgaagctggctggcgacgtggaatccaacccaggcccttctagaggccatatgaccgagtacaagcccacggtgcgcctcgccacccgcgacgacgtccccagggccgtacgcaccctcgccgccgcgttcgccgactaccccgccacgcgccacaccgtcgatccggaccgccacatcgagcgggtcaccgagctgcaagaactcttcctcacgcgcgtcgggctcgacatcggcaaggtgtgggtcgcggacgacggcgccgcggtggcggtctggaccacgccggagagcgtcgaagcgggggcggtgttcgccgagatcggcccgcgcatggccgagttgagcggttcccggctggccgcgcagcaacagatggaaggcctcctggcgccgcaccggcccaaggagcccgcgtggttcctggccaccgtcggcgtctcgcccgaccaccagggcaagggtctgggcagcgccgtcgtgctccccggagtggaggcggccgagcgcgccggggtgcccgccttcctggagacctccgcgccccgcaacctccccttctacgagcggctcggcttcaccgtcaccgccgacgtcgaggtgcccgaaggaccgcgcacctggtgcatgacccgcaagcccggtgcctga

SEQ ID NO: 6429 - DNA, 3453 bp, Artificial Sequence
  Synthetic Polynucloetide
atggccttaccagtgaccgccttgctcctgccgctggccttgctgctccacgccgccaggccggaggttcagctgcttgagtctggcggaggactggttcaacctggcggaagcctgagactgtcttgtgccgccagcggcttcacctttagcagctacgccatgagctgggtccgacaggctcctggcaaaggactggaatgggtgtccagcatcagcggcagcggcgactacatctactacgccgatagcgtgaagggcagattcaccatcagccgggacatcagcaagaacaccctgtacctccagatgaacagcctgagagccgaggacaccgccgtgtactactgtgccaaagaaggcaccggcgctaacagcagcctggccgattatagaggccagggcacactggtcaccgtgtctagtggcggaggaagcggcggaggatctgaagtgcaggttttggagtctggcggaggactggttcagcctggcggatctctgagactgtcttgtgccgccagcggcttcaccttcagcaactttgccatgagctgggtccgacaggcccctggcaaaggacttgaatgggtgtccacaatcagcggcagcgccggcacaacagattacgccgattctgtgaagggcagattcaccatcagccgggacaacagcaagaaaaccctgtacctccagatgaacagcctgcgcgtggaagataccgccgtgtactactgtgccgatggcagaggccccttcttcgattatcgcggccagggcacactggtcaccgtttcttctggtaccggcggaggcggatctggcggcggaggtagcggtggcggaggatctgaattcgacatccagatgacacagagccctagcagcctgtctgccagcgtgggagacagagtgaccatcacatgcaaggccagcgaccacatcaacaactggctggcctggtatcagcagaagcctggacaggcccctaagctgctgatctacggcgctaccacactggaaacaggcgtgcccagcagattttctggcagcggctctggcaccgactacaccctgacaatatccagcctccagcctgaggacttcgccacctactactgtcagcagagctggaacaccccttggacattcggccagggcaccaagctggaaatcaagagactcgaggacctgaagaacgtgttcccacctgaggtggccgtgttcgagcctagcgaggccgagatcagccacacccagaaagccaccctcgtgtgcctggctaccggcttctaccccgaccatgtggaactgtcttggtgggtcaacggcaaagaggtgcacagcggcgtgtgtaccgacccccagccactgaaagaacagcccgccctgaacgacagccggtactgcctgagcagcagactgagagtgtccgccaccttctggcagaacccccggaaccacttcagatgccaggtgcagttctacggcctgagcgagaacgacgagtggacccaggacagagccaagcccgtgacccagatcgtgtctgccgaagcctggggcagagccgattgcggctttaccagcgagagctaccagcagggcgtgctgagcgccaccatcctgtacgagatcctgctgggcaaggccaccctgtacgccgtgctggtgtctgccctggtgctgatggctatggtcaagcggaaggacagccggggaagggccaagcgatctggatctggagcaacaaacttctcactactcaaacaagcaggtgacgtggaggagaatcccgggcctactagtatggactggatttggcgcatccttttccttgtcggcgctgctaccggcgcccattcccaactgcaactgcaagagtctggccctggcctggtcaagccttctgaaaccctgagcctgacctgtaccgtgtccggcggctctatcagcagcggcgattactactggggctggatcagacagcctccaggcaagggactcgaatggatcggcagcatcagctacagcggctccacctactacaacccaagcctgaagtccagagtgaccatcagcgtggacaccagcagaaaccagttctccctgaagctgagcagcgtgacagccgccgatacagccgtgtattattgcaccagagaggacagcagcaactggcggagtagaggacagggcacactggtcacagtgtcctcttctggaggcggtggaagcggtggaggaggatctgaagtgcagctggttgaatctggcggaggactggttcaggctggcggatctctgagactgtcttgtgccgccagcggcagaacctttagcatgggctggtttagacaggcccctggcaaagagagagagttcgtcgccgccatcacatactctggcggcagcccttactacgccgactctgtgaagggcagattcaccatcagccgggacaacgccaagaacaccgtgtacctccagatgaacagcctgaagcctgaggacaccgccgtgtactactgcgccgccaatccaacatacggcagcgactggaacgccgagaattggggccagggaacccaagtgacagtgtctagcggatccggcggcggaggatctggcggaggcggatctgggggcggaggctctttcgaacaagttcagcttcaacagcctggcgctgagctggtcaaacctggcgcttctgtgaagatgagctgcaaagccagcggctacgccttcagcagctactggatcaactggatgaagcagaaacccggccagggactcgaatggatcggccaaatctatcccggcgacggcgacaccaactacaacggcaagttcaagggcagagccacactgaccgccgatacctctagcagcacagcctacatgcagctgagcagcctgaccagcgaagatagcgccgtgtacttctgtgcccggtccatcacaacagtcgtgggctgcgctatggactattggggccagggaacaagcgtgaccgtgtctagtacgcgtatccagaaccctgatcctgccgtgtaccagctgcgggatagcaagagcagcgacaagagcgtgtgtctgttcaccgacttcgacagccagaccaacgtgtcccagagcaaggactccgacgtgtacatcaccgataagtgcgtgctggacatgcggagcatggacttcaagagcaactccgccgtggcctggtccaacaagtccgatttcgcctgcgccaacgccttcaacaacagcattatccccgaggacacattcttcccaagccccgagagcagctgcgacgtgaagctggtggaaaagagcttcgagacagacaccaacctgaacttccagaacctgagcgtgatcggcttcagaatcctgctgctgaaagtggccggctttaacctgctgatgaccctgcggctgtggtccagc

SEQ ID NO: 6430 - DNA, 4128 bp, Artificial Sequence
  Synthetic Polynucloetide
atggccttaccagtgaccgccttgctcctgccgctggccttgctgctccacgccgccaggccggaggttcagctgcttgagtctggcggaggactggttcaacctggcggaagcctgagactgtcttgtgccgccagcggcttcacctttagcagctacgccatgagctgggtccgacaggctcctggcaaaggactggaatgggtgtccagcatcagcggcagcggcgactacatctactacgccgatagcgtgaagggcagattcaccatcagccgggacatcagcaagaacaccctgtacctccagatgaacagcctgagagccgaggacaccgccgtgtactactgtgccaaagaaggcaccggcgctaacagcagcctggccgattatagaggccagggcacactggtcaccgtgtctagtggcggaggaagcggcggaggatctgaagtgcaggttttggagtctggcggaggactggttcagcctggcggatctctgagactgtcttgtgccgccagcggcttcaccttcagcaactttgccatgagctgggtccgacaggcccctggcaaaggacttgaatgggtgtccacaatcagcggcagcgccggcacaacagattacgccgattctgtgaagggcagattcaccatcagccgggacaacagcaagaaaaccctgtacctccagatgaacagcctgcgcgtggaagataccgccgtgtactactgtgccgatggcagaggccccttcttcgattatcgcggccagggcacactggtcaccgtttcttctggtaccggcggaggcggatctggcggcggaggtagcggtggcggaggatctgaattcgacatccagatgacacagagccctagcagcctgtctgccagcgtgggagacagagtgaccatcacatgcaaggccagcgaccacatcaacaactggctggcctggtatcagcagaagcctggacaggcccctaagctgctgatctacggcgctaccacactggaaacaggcgtgcccagcagattttctggcagcggctctggcaccgactacaccctgacaatatccagcctccagcctgaggacttcgccacctactactgtcagcagagctggaacaccccttggacattcggccagggcaccaagctggaaatcaagagactcgaggacctgaagaacgtgttcccacctgaggtggccgtgttcgagcctagcgaggccgagatcagccacacccagaaagccaccctcgtgtgcctggctaccggcttctaccccgaccatgtggaactgtcttggtgggtcaacggcaaagaggtgcacagcggcgtgtgtaccgacccccagccactgaaagaacagcccgccctgaacgacagccggtactgcctgagcagcagactgagagtgtccgccaccttctggcagaacccccggaaccacttcagatgccaggtgcagttctacggcctgagcgagaacgacgagtggacccaggacagagccaagcccgtgacccagatcgtgtctgccgaagcctggggcagagccgattgcggctttaccagcgagagctaccagcagggcgtgctgagcgccaccatcctgtacgagatcctgctgggcaaggccaccctgtacgccgtgctggtgtctgccctggtgctgatggctatggtcaagcggaaggacagccggggaagggccaagcgatctggatctggagcaacaaacttctcactactcaaacaagcaggtgacgtggaggagaatcccgggcctactagtatggactggatttggcgcatccttttccttgtcggcgctgctaccggcgcccattcccaactgcaactgcaagagtctggccctggcctggtcaagccttctgaaaccctgagcctgacctgtaccgtgtccggcggctctatcagcagcggcgattactactggggctggatcagacagcctccaggcaagggactcgaatggatcggcagcatcagctacagcggctccacctactacaacccaagcctgaagtccagagtgaccatcagcgtggacaccagcagaaaccagttctccctgaagctgagcagcgtgacagccgccgatacagccgtgtattattgcaccagagaggacagcagcaactggcggagtagaggacagggcacactggtcacagtgtcctcttctggaggcggtggaagcggtggaggaggatctgaagtgcagctggttgaatctggcggaggactggttcaggctggcggatctctgagactgtcttgtgccgccagcggcagaacctttagcatgggctggtttagacaggcccctggcaaagagagagagttcgtcgccgccatcacatactctggcggcagcccttactacgccgactctgtgaagggcagattcaccatcagccgggacaacgccaagaacaccgtgtacctccagatgaacagcctgaagcctgaggacaccgccgtgtactactgcgccgccaatccaacatacggcagcgactggaacgccgagaattggggccagggaacccaagtgacagtgtctagcggatccggcggcggaggatctggcggaggcggatctgggggcggaggctctttcgaacaagttcagcttcaacagcctggcgctgagctggtcaaacctggcgcttctgtgaagatgagctgcaaagccagcggctacgccttcagcagctactggatcaactggatgaagcagaaacccggccagggactcgaatggatcggccaaatctatcccggcgacggcgacaccaactacaacggcaagttcaagggcagagccacactgaccgccgatacctctagcagcacagcctacatgcagctgagcagcctgaccagcgaagatagcgccgtgtacttctgtgcccggtccatcacaacagtcgtgggctgcgctatggactattggggccagggaacaagcgtgaccgtgtctagtacgcgtatccagaaccctgatcctgccgtgtaccagctgcgggatagcaagagcagcgacaagagcgtgtgtctgttcaccgacttcgacagccagaccaacgtgtcccagagcaaggactccgacgtgtacatcaccgataagtgcgtgctggacatgcggagcatggacttcaagagcaactccgccgtggcctggtccaacaagtccgatttcgcctgcgccaacgccttcaacaacagcattatccccgaggacacattcttcccaagccccgagagcagctgcgacgtgaagctggtggaaaagagcttcgagacagacaccaacctgaacttccagaacctgagcgtgatcggcttcagaatcctgctgctgaaagtggccggctttaacctgctgatgaccctgcggctgtggtccagccgcgccaagagaagcggatctggcgtgaagcagaccctgaatttcgacctgctgaagctggctggcgacgtggaatccaacccaggcccttctagaggcgggatccacaccatggctacctacgaggtgctgtgcgaggtggcaagaaagctgggcaccgacgacagagaagtggtgctgttcctgctgaacgtgttcatccctcagcctacactggcccagctgatcggtgcactgagagccctgaaagaggaaggccggctgacctttcctctgctggccgaatgcctgttcagagccggaagaagggatctgctgcgggacctgctgcatctggaccccagatttctggaaagacacctggccggcaccatgagctacttcagcccttaccagctgaccgtgctgcacgttgacggcgaactgtgcgccagagatattcggagcctgatcttcctgagcaaggacaccatcggcagccggtctacccctcagacatttctgcactgggtgtactgcatggaaaacctggacctgctcggccccacagatgtggatgccctgatgtccatgctgagaagcctgagcagagtggacctccagagacaggtgcagacactgatgggactgcacctgagcggacctagccacagccagcactacagacacacccct

SEQ ID NO: 6431 - DNA, 3465 bp, Artificial Sequence
  Synthetic Polynucloetide
atggccttaccagtgaccgccttgctcctgccgctggccttgctgctccacgccgccaggccggaggttcagctgcttgagtctggcggaggactggttcaacctggcggaagcctgagactgtcttgtgccgccagcggcttcacctttagcagctacgccatgagctgggtccgacaggctcctggcaaaggactggaatgggtgtccagcatcagcggcagcggcgactacatctactacgccgatagcgtgaagggcagattcaccatcagccgggacatcagcaagaacaccctgtacctccagatgaacagcctgagagccgaggacaccgccgtgtactactgtgccaaagaaggcaccggcgctaacagcagcctggccgattatagaggccagggcacactggtcaccgtgtctagtggcggaggaagcggcggaggatctgaagtgcaggttttggagtctggcggaggactggttcagcctggcggatctctgagactgtcttgtgccgccagcggcttcaccttcagcaactttgccatgagctgggtccgacaggcccctggcaaaggacttgaatgggtgtccacaatcagcggcagcgccggcacaacagattacgccgattctgtgaagggcagattcaccatcagccgggacaacagcaagaaaaccctgtacctccagatgaacagcctgcgcgtggaagataccgccgtgtactactgtgccgatggcagaggccccttcttcgattatcgcggccagggcacactggtcaccgtttcttctggtaccggcggaggcggatctggcggcggaggtagcggtggcggaggatctgaattcgacatccagatgacacagagccctagcagcctgtctgccagcgtgggagacagagtgaccatcacatgcaaggccagcgaccacatcaacaactggctggcctggtatcagcagaagcctggacaggcccctaagctgctgatctacggcgctaccacactggaaacaggcgtgcccagcagattttctggcagcggctctggcaccgactacaccctgacaatatccagcctccagcctgaggacttcgccacctactactgtcagcagagctggaacaccccttggacattcggccagggcaccaagctggaaatcaagagactcgagatccagaaccctgatcctgccgtgtaccagctgcgggatagcaagagcagcgacaagagcgtgtgtctgttcaccgacttcgacagccagaccaacgtgtcccagagcaaggactccgacgtgtacatcaccgataagtgcgtgctggacatgcggagcatggacttcaagagcaactccgccgtggcctggtccaacaagtccgatttcgcctgcgccaacgccttcaacaacagcattatccccgaggacacattcttcccaagccccgagagcagctgcgacgtgaagctggtggaaaagagcttcgagacagacaccaacctgaacttccagaacctgagcgtgatcggcttcagaatcctgctgctgaaagtggccggctttaacctgctgatgaccctgcggctgtggtccagccgcgccaagagaagcggatctggcgtgaagcagaccctgaatttcgacctgctgaagctggctggcgacgtggaatccaacccaggccctactagtatggactggatttggcgcatccttttccttgtcggcgctgctaccggcgcccattcccaactgcaactgcaagagtctggccctggcctggtcaagccttctgaaaccctgagcctgacctgtaccgtgtccggcggctctatcagcagcggcgattactactggggctggatcagacagcctccaggcaagggactcgaatggatcggcagcatcagctacagcggctccacctactacaacccaagcctgaagtccagagtgaccatcagcgtggacaccagcagaaaccagttctccctgaagctgagcagcgtgacagccgccgatacagccgtgtattattgcaccagagaggacagcagcaactggcggagtagaggacagggcacactggtcacagtgtcctcttctggaggcggtggaagcggtggaggaggatctgaagtgcagctggttgaatctggcggaggactggttcaggctggcggatctctgagactgtcttgtgccgccagcggcagaacctttagcatgggctggtttagacaggcccctggcaaagagagagagttcgtcgccgccatcacatactctggcggcagcccttactacgccgactctgtgaagggcagattcaccatcagccgggacaacgccaagaacaccgtgtacctccagatgaacagcctgaagcctgaggacaccgccgtgtactactgcgccgccaatccaacatacggcagcgactggaacgccgagaattggggccagggaacccaagtgacagtgtctagcggatccggcggcggaggatctggcggaggcggatctgggggcggaggctctttcgaacaagttcagcttcaacagcctggcgctgagctggtcaaacctggcgcttctgtgaagatgagctgcaaagccagcggctacgccttcagcagctactggatcaactggatgaagcagaaacccggccagggactcgaatggatcggccaaatctatcccggcgacggcgacaccaactacaacggcaagttcaagggcagagccacactgaccgccgatacctctagcagcacagcctacatgcagctgagcagcctgaccagcgaagatagcgccgtgtacttctgtgcccggtccatcacaacagtcgtgggctgcgctatggactattggggccagggaacaagcgtgaccgtgtctagtacgcgtgaggacctgaagaacgtgttcccacctgaggtggccgtgttcgagcctagcgaggccgagatcagccacacccagaaagccaccctcgtgtgcctggctaccggcttctaccccgaccatgtggaactgtcttggtgggtcaacggcaaagaggtgcacagcggcgtgtgtaccgacccccagccactgaaagaacagcccgccctgaacgacagccggtactgcctgagcagcagactgagagtgtccgccaccttctggcagaacccccggaaccacttcagatgccaggtgcagttctacggcctgagcgagaacgacgagtggacccaggacagagccaagcccgtgacccagatcgtgtctgccgaagcctggggcagagccgattgcggctttaccagcgagagctaccagcagggcgtgctgagcgccaccatcctgtacgagatcctgctgggcaaggccaccctgtacgccgtgctggtgtctgccctggtgctgatggctatggtcaagcggaaggacagccgggga

SEQ ID NO: 6432 - DNA, 4131 bp, Artificial Sequence
  Synthetic Polynucloetide
atggccttaccagtgaccgccttgctcctgccgctggccttgctgctccacgccgccaggccggaggttcagctgcttgagtctggcggaggactggttcaacctggcggaagcctgagactgtcttgtgccgccagcggcttcacctttagcagctacgccatgagctgggtccgacaggctcctggcaaaggactggaatgggtgtccagcatcagcggcagcggcgactacatctactacgccgatagcgtgaagggcagattcaccatcagccgggacatcagcaagaacaccctgtacctccagatgaacagcctgagagccgaggacaccgccgtgtactactgtgccaaagaaggcaccggcgctaacagcagcctggccgattatagaggccagggcacactggtcaccgtgtctagtggcggaggaagcggcggaggatctgaagtgcaggttttggagtctggcggaggactggttcagcctggcggatctctgagactgtcttgtgccgccagcggcttcaccttcagcaactttgccatgagctgggtccgacaggcccctggcaaaggacttgaatgggtgtccacaatcagcggcagcgccggcacaacagattacgccgattctgtgaagggcagattcaccatcagccgggacaacagcaagaaaaccctgtacctccagatgaacagcctgcgcgtggaagataccgccgtgtactactgtgccgatggcagaggccccttcttcgattatcgcggccagggcacactggtcaccgtttcttctggtaccggcggaggcggatctggcggcggaggtagcggtggcggaggatctgaattcgacatccagatgacacagagccctagcagcctgtctgccagcgtgggagacagagtgaccatcacatgcaaggccagcgaccacatcaacaactggctggcctggtatcagcagaagcctggacaggcccctaagctgctgatctacggcgctaccacactggaaacaggcgtgcccagcagattttctggcagcggctctggcaccgactacaccctgacaatatccagcctccagcctgaggacttcgccacctactactgtcagcagagctggaacaccccttggacattcggccagggcaccaagctggaaatcaagagactcgagatccagaaccctgatcctgccgtgtaccagctgcgggatagcaagagcagcgacaagagcgtgtgtctgttcaccgacttcgacagccagaccaacgtgtcccagagcaaggactccgacgtgtacatcaccgataagtgcgtgctggacatgcggagcatggacttcaagagcaactccgccgtggcctggtccaacaagtccgatttcgcctgcgccaacgccttcaacaacagcattatccccgaggacacattcttcccaagccccgagagcagctgcgacgtgaagctggtggaaaagagcttcgagacagacaccaacctgaacttccagaacctgagcgtgatcggcttcagaatcctgctgctgaaagtggccggctttaacctgctgatgaccctgcggctgtggtccagccgcgccaagagaagcggatctggcgtgaagcagaccctgaatttcgacctgctgaagctggctggcgacgtggaatccaacccaggccctactagtatggactggatttggcgcatccttttccttgtcggcgctgctaccggcgcccattcccaactgcaactgcaagagtctggccctggcctggtcaagccttctgaaaccctgagcctgacctgtaccgtgtccggcggctctatcagcagcggcgattactactggggctggatcagacagcctccaggcaagggactcgaatggatcggcagcatcagctacagcggctccacctactacaacccaagcctgaagtccagagtgaccatcagcgtggacaccagcagaaaccagttctccctgaagctgagcagcgtgacagccgccgatacagccgtgtattattgcaccagagaggacagcagcaactggcggagtagaggacagggcacactggtcacagtgtcctcttctggaggcggtggaagcggtggaggaggatctgaagtgcagctggttgaatctggcggaggactggttcaggctggcggatctctgagactgtcttgtgccgccagcggcagaacctttagcatgggctggtttagacaggcccctggcaaagagagagagttcgtcgccgccatcacatactctggcggcagcccttactacgccgactctgtgaagggcagattcaccatcagccgggacaacgccaagaacaccgtgtacctccagatgaacagcctgaagcctgaggacaccgccgtgtactactgcgccgccaatccaacatacggcagcgactggaacgccgagaattggggccagggaacccaagtgacagtgtctagcggatccggcggcggaggatctggcggaggcggatctgggggcggaggctctttcgaacaagttcagcttcaacagcctggcgctgagctggtcaaacctggcgcttctgtgaagatgagctgcaaagccagcggctacgccttcagcagctactggatcaactggatgaagcagaaacccggccagggactcgaatggatcggccaaatctatcccggcgacggcgacaccaactacaacggcaagttcaagggcagagccacactgaccgccgatacctctagcagcacagcctacatgcagctgagcagcctgaccagcgaagatagcgccgtgtacttctgtgcccggtccatcacaacagtcgtgggctgcgctatggactattggggccagggaacaagcgtgaccgtgtctagtacgcgtgaggacctgaagaacgtgttcccacctgaggtggccgtgttcgagcctagcgaggccgagatcagccacacccagaaagccaccctcgtgtgcctggctaccggcttctaccccgaccatgtggaactgtcttggtgggtcaacggcaaagaggtgcacagcggcgtgtgtaccgacccccagccactgaaagaacagcccgccctgaacgacagccggtactgcctgagcagcagactgagagtgtccgccaccttctggcagaacccccggaaccacttcagatgccaggtgcagttctacggcctgagcgagaacgacgagtggacccaggacagagccaagcccgtgacccagatcgtgtctgccgaagcctggggcagagccgattgcggctttaccagcgagagctaccagcagggcgtgctgagcgccaccatcctgtacgagatcctgctgggcaaggccaccctgtacgccgtgctggtgtctgccctggtgctgatggctatggtcaagcggaaggacagccggggaagggccaagcgatctggatctggagcaacaaacttctcactactcaaacaagcaggtgacgtggaggagaatcccgggccttctagaggcgggatccacaccatggctacctacgaggtgctgtgcgaggtggcaagaaagctgggcaccgacgacagagaagtggtgctgttcctgctgaacgtgttcatccctcagcctacactggcccagctgatcggtgcactgagagccctgaaagaggaaggccggctgacctttcctctgctggccgaatgcctgttcagagccggaagaagggatctgctgcgggacctgctgcatctggaccccagatttctggaaagacacctggccggcaccatgagctacttcagcccttaccagctgaccgtgctgcacgttgacggcgaactgtgcgccagagatattcggagcctgatcttcctgagcaaggacaccatcggcagccggtctacccctcagacatttctgcactgggtgtactgcatggaaaacctggacctgctcggccccacagatgtggatgccctgatgtccatgctgagaagcctgagcagagtggacctccagagacaggtgcagacactgatgggactgcacctgagcggacctagccacagccagcactacagacacacccct

SEQ ID NO: 6433 - DNA, 4155 bp, Artificial Sequence
  Synthetic Polynucloetide
atggccttaccagtgaccgccttgctcctgccgctggccttgctgctccacgccgccaggccggaggttcagctgcttgagtctggcggaggactggttcaacctggcggaagcctgagactgtcttgtgccgccagcggcttcacctttagcagctacgccatgagctgggtccgacaggctcctggcaaaggactggaatgggtgtccagcatcagcggcagcggcgactacatctactacgccgatagcgtgaagggcagattcaccatcagccgggacatcagcaagaacaccctgtacctccagatgaacagcctgagagccgaggacaccgccgtgtactactgtgccaaagaaggcaccggcgctaacagcagcctggccgattatagaggccagggcacactggtcaccgtgtctagtggcggaggaagcggcggaggatctgaagtgcaggttttggagtctggcggaggactggttcagcctggcggatctctgagactgtcttgtgccgccagcggcttcaccttcagcaactttgccatgagctgggtccgacaggcccctggcaaaggacttgaatgggtgtccacaatcagcggcagcgccggcacaacagattacgccgattctgtgaagggcagattcaccatcagccgggacaacagcaagaaaaccctgtacctccagatgaacagcctgcgcgtggaagataccgccgtgtactactgtgccgatggcagaggccccttcttcgattatcgcggccagggcacactggtcaccgtttcttctggtaccggcggaggcggatctggcggcggaggtagcggtggcggaggatctgaattcgacatccagatgacacagagccctagcagcctgtctgccagcgtgggagacagagtgaccatcacatgcaaggccagcgaccacatcaacaactggctggcctggtatcagcagaagcctggacaggcccctaagctgctgatctacggcgctaccacactggaaacaggcgtgcccagcagattttctggcagcggctctggcaccgactacaccctgacaatatccagcctccagcctgaggacttcgccacctactactgtcagcagagctggaacaccccttggacattcggccagggcaccaagctggaaatcaagagactcgaggacctgaagaacgtgttcccacctgaggtggccgtgttcgagcctagcgaggccgagatcagccacacccagaaagccaccctcgtgtgcctggctaccggcttctaccccgaccatgtggaactgtcttggtgggtcaacggcaaagaggtgcacagcggcgtgtctaccgacccccagccactgaaagaacagcccgccctgaacgacagccggtactgcctgagcagcagactgagagtgtccgccaccttctggcagaacccccggaaccacttcagatgccaggtgcagttctacggcctgagcgagaacgacgagtggacccaggacagagccaagcccgtgacccagatcgtgtctgccgaagcctggggcagagccgattgcggctttaccagcgagagctaccagcagggcgtgctgagcgccaccatcctgtacgagatcctgctgggcaaggccaccctgtacgccgtgctggtgtctgccctggtgctgatggctatggtcaagcggaaggacagccggggaagggccaagcgatctggatctggagcaacaaacttctcactactcaaacaagcaggtgacgtggaggagaatcccgggcctactagtatggactggatttggcgcatccttttccttgtcggcgctgctaccggcgcccattcccaactgcaactgcaagagtctggccctggcctggtcaagccttctgaaaccctgagcctgacctgtaccgtgtccggcggctctatcagcagcggcgattactactggggctggatcagacagcctccaggcaagggactcgaatggatcggcagcatcagctacagcggctccacctactacaacccaagcctgaagtccagagtgaccatcagcgtggacaccagcagaaaccagttctccctgaagctgagcagcgtgacagccgccgatacagccgtgtattattgcaccagagaggacagcagcaactggcggagtagaggacagggcacactggtcacagtgtcctcttctggaggcggtggaagcggtggaggaggatctgaagtgcagctggttgaatctggcggaggactggttcaggctggcggatctctgagactgtcttgtgccgccagcggcagaacctttagcatgggctggtttagacaggcccctggcaaagagagagagttcgtcgccgccatcacatactctggcggcagcccttactacgccgactctgtgaagggcagattcaccatcagccgggacaacgccaagaacaccgtgtacctccagatgaacagcctgaagcctgaggacaccgccgtgtactactgcgccgccaatccaacatacggcagcgactggaacgccgagaattggggccagggaacccaagtgacagtgtctagcggatccggcggcggaggatctggcggaggcggatctgggggcggaggctctttcgaacaagttcagcttcaacagcctggcgctgagctggtcaaacctggcgcttctgtgaagatgagctgcaaagccagcggctacgccttcagcagctactggatcaactggatgaagcagaaacccggccagggactcgaatggatcggccaaatctatcccggcgacggcgacaccaactacaacggcaagttcaagggcagagccacactgaccgccgatacctctagcagcacagcctacatgcagctgagcagcctgaccagcgaagatagcgccgtgtacttctgtgcccggtccatcacaacagtcgtgggctgcgctatggactattggggccagggaacaagcgtgaccgtgtctagtacgcgtatccagaaccctgatcctgccgtgtaccagctgcgggatagcaagagcagcgacaagagcgtgtgtctgttcaccgacttcgacagccagaccaacgtgtcccagagcaaggactccgacgtgtacatcaccgataagaccgtgctggacatgcggagcatggacttcaagagcaactccgccgtggcctggtccaacaagtccgatttcgcctgcgccaacgccttcaacaacagcattatccccgaggacacattcttcccaagccccgagagcagctgcgacgtgaagctggtggaaaagagcttcgagacagacaccaacctgaacttccagaacctgagcgtgatcggcttcagaatcctgctgctgaaagtggccggctttaacctgctgatgaccctgcggctgtggtccagccgcgccaagagaagcggatctggcgtgaagcagaccctgaatttcgacctgctgaagctggctggcgacgtggaatccaacccaggcccttctagaggccatatgaccgagtacaagcccacggtgcgcctcgccacccgcgacgacgtccccagggccgtacgcaccctcgccgccgcgttcgccgactaccccgccacgcgccacaccgtcgatccggaccgccacatcgagcgggtcaccgagctgcaagaactcttcctcacgcgcgtcgggctcgacatcggcaaggtgtgggtcgcggacgacggcgccgcggtggcggtctggaccacgccggagagcgtcgaagcgggggcggtgttcgccgagatcggcccgcgcatggccgagttgagcggttcccggctggccgcgcagcaacagatggaaggcctcctggcgccgcaccggcccaaggagcccgcgtggttcctggccaccgtcggcgtctcgcccgaccaccagggcaagggtctgggcagcgccgtcgtgctccccggagtggaggcggccgagcgcgccggggtgcccgccttcctggagacctccgcgccccgcaacctccccttctacgagcggctcggcttcaccgtcaccgccgacgtcgaggtgcccgaaggaccgcgcacctggtgcatgacccgcaagcccggtgcctga

SEQ ID NO: 6434 - DNA, 4401 bp, Artificial Sequence
  Synthetic Polynucloetide
atggccttaccagtgaccgccttgctcctgccgctggccttgctgctccacgccgccaggccggaggttcagctgcttgagtctggcggaggactggttcaacctggcggaagcctgagactgtcttgtgccgccagcggcttcacctttagcagctacgccatgagctgggtccgacaggctcctggcaaaggactggaatgggtgtccagcatcagcggcagcggcgactacatctactacgccgatagcgtgaagggcagattcaccatcagccgggacatcagcaagaacaccctgtacctccagatgaacagcctgagagccgaggacaccgccgtgtactactgtgccaaagaaggcaccggcgctaacagcagcctggccgattatagaggccagggcacactggtcaccgtgtctagtggcggaggaagcggcggaggatctgaagtgcaggttttggagtctggcggaggactggttcagcctggcggatctctgagactgtcttgtgccgccagcggcttcaccttcagcaactttgccatgagctgggtccgacaggcccctggcaaaggacttgaatgggtgtccacaatcagcggcagcgccggcacaacagattacgccgattctgtgaagggcagattcaccatcagccgggacaacagcaagaaaaccctgtacctccagatgaacagcctgcgcgtggaagataccgccgtgtactactgtgccgatggcagaggccccttcttcgattatcgcggccagggcacactggtcaccgtttcttctggtaccggcggaggcggatctggcggcggaggtagcggtggcggaggatctgaattcgacatccagatgacacagagccctagcagcctgtctgccagcgtgggagacagagtgaccatcacatgcaaggccagcgaccacatcaacaactggctggcctggtatcagcagaagcctggacaggcccctaagctgctgatctacggcgctaccacactggaaacaggcgtgcccagcagattttctggcagcggctctggcaccgactacaccctgacaatatccagcctccagcctgaggacttcgccacctactactgtcagcagagctggaacaccccttggacattcggccagggcaccaagctggaaatcaagagactcgaggacctgaagaacgtgttcccacctgaggtggccgtgttcgagcctagcgaggccgagatcagccacacccagaaagccaccctcgtgtgcctggctaccggcttctaccccgaccatgtggaactgtcttggtgggtcaacggcaaagaggtgcacagcggcgtgtctaccgacccccagccactgaaagaacagcccgccctgaacgacagccggtactgcctgagcagcagactgagagtgtccgccaccttctggcagaacccccggaaccacttcagatgccaggtgcagttctacggcctgagcgagaacgacgagtggacccaggacagagccaagcccgtgacccagatcgtgtctgccgaagcctggggcagagccgattgcggctttaccagcgagagctaccagcagggcgtgctgagcgccaccatcctgtacgagatcctgctgggcaaggccaccctgtacgccgtgctggtgtctgccctggtgctgatggctatggtcaagcggaaggacagccggggaagggccaagcgatctggatctggagcaacaaacttctcactactcaaacaagcaggtgacgtggaggagaatcccgggcctactagtatggactggatttggcgcatccttttccttgtcggcgctgctaccggcgcccattcccaactgcaactgcaagagtctggccctggcctggtcaagccttctgaaaccctgagcctgacctgtaccgtgtccggcggctctatcagcagcggcgattactactggggctggatcagacagcctccaggcaagggactcgaatggatcggcagcatcagctacagcggctccacctactacaacccaagcctgaagtccagagtgaccatcagcgtggacaccagcagaaaccagttctccctgaagctgagcagcgtgacagccgccgatacagccgtgtattattgcaccagagaggacagcagcaactggcggagtagaggacagggcacactggtcacagtgtcctcttctggaggcggtggaagcggtggaggaggatctgaagtgcagctggttgaatctggcggaggactggttcaggctggcggatctctgagactgtcttgtgccgccagcggcagaacctttagcatgggctggtttagacaggcccctggcaaagagagagagttcgtcgccgccatcacatactctggcggcagcccttactacgccgactctgtgaagggcagattcaccatcagccgggacaacgccaagaacaccgtgtacctccagatgaacagcctgaagcctgaggacaccgccgtgtactactgcgccgccaatccaacatacggcagcgactggaacgccgagaattggggccagggaacccaagtgacagtgtctagcggatccggcggcggaggatctggcggaggcggatctgggggcggaggctctttcgaacaagttcagcttcaacagcctggcgctgagctggtcaaacctggcgcttctgtgaagatgagctgcaaagccagcggctacgccttcagcagctactggatcaactggatgaagcagaaacccggccagggactcgaatggatcggccaaatctatcccggcgacggcgacaccaactacaacggcaagttcaagggcagagccacactgaccgccgatacctctagcagcacagcctacatgcagctgagcagcctgaccagcgaagatagcgccgtgtacttctgtgcccggtccatcacaacagtcgtgggctgcgctatggactattggggccagggaacaagcgtgaccgtgtctagtacgcgtgagcagaaactgatctcggaagaggatgggagcggcaccccattcccttctctggcccctcccatcatgctgctggtggacggcaagcagcagatggtggtcgtgtgcctggtgctggatgtggccccacctggactggacagccccatctggtttagcgccggcaatggctctgccctggacgcctttacctacggcccaagccctgccaccgatggcacctggacaaatctggcccacctgagcctgcccagcgaggaactggcttcttgggagcctctcgtgtgccacacaggacctggcgctgagggacacagcagatccacccagcctatgcacctgtctggcgaggccagcaccgccagaacctgtcctcaggaacctctgagaggcacccctggcggagcactgtggctgggagtgctgagactgctgctgttcaagctgctgctgtttgacctgctgctgacctgctcctgtctgtgcgatcctgccggccctctgccttctcctgccaccaccacaagactgagagccctgggcagccacagactgcaccctgccacagagacaggcggcagagaggccacaagcagccctagaccccagcccagagacagaagatggggcgataccccccctggcagaaagcctggatctccagtccgcgccaagagaagcggatctggcgtgaagcagaccctgaatttcgacctgctgaagctggctggcgacgtggaatccaacccaggcccttctagaggccatatgaccgagtacaagcccacggtgcgcctcgccacccgcgacgacgtccccagggccgtacgcaccctcgccgccgcgttcgccgactaccccgccacgcgccacaccgtcgatccggaccgccacatcgagcgggtcaccgagctgcaagaactcttcctcacgcgcgtcgggctcgacatcggcaaggtgtgggtcgcggacgacggcgccgcggtggcggtctggaccacgccggagagcgtcgaagcgggggcggtgttcgccgagatcggcccgcgcatggccgagttgagcggttcccggctggccgcgcagcaacagatggaaggcctcctggcgccgcaccggcccaaggagcccgcgtggttcctggccaccgtcggcgtctcgcccgaccaccagggcaagggtctgggcagcgccgtcgtgctccccggagtggaggcggccgagcgcgccggggtgcccgccttcctggagacctccgcgccccgcaacctccccttctacgagcggctcggcttcaccgtcaccgccgacgtcgaggtgcccgaaggaccgcgcacctggtgcatgacccgcaagcccggtgcctga

SEQ ID NO: 6435 - DNA, 4266 bp, Artificial Sequence
  Synthetic Polynucloetide
atggccttaccagtgaccgccttgctcctgccgctggccttgctgctccacgccgccaggccggaggttcagctgcttgagtctggcggaggactggttcaacctggcggaagcctgagactgtcttgtgccgccagcggcttcacctttagcagctacgccatgagctgggtccgacaggctcctggcaaaggactggaatgggtgtccagcatcagcggcagcggcgactacatctactacgccgatagcgtgaagggcagattcaccatcagccgggacatcagcaagaacaccctgtacctccagatgaacagcctgagagccgaggacaccgccgtgtactactgtgccaaagaaggcaccggcgctaacagcagcctggccgattatagaggccagggcacactggtcaccgtgtctagtggcggaggaagcggcggaggatctgaagtgcaggttttggagtctggcggaggactggttcagcctggcggatctctgagactgtcttgtgccgccagcggcttcaccttcagcaactttgccatgagctgggtccgacaggcccctggcaaaggacttgaatgggtgtccacaatcagcggcagcgccggcacaacagattacgccgattctgtgaagggcagattcaccatcagccgggacaacagcaagaaaaccctgtacctccagatgaacagcctgcgcgtggaagataccgccgtgtactactgtgccgatggcagaggccccttcttcgattatcgcggccagggcacactggtcaccgtttcttctggtaccggcggaggcggatctggcggcggaggtagcggtggcggaggatctgaattcgacatccagatgacacagagccctagcagcctgtctgccagcgtgggagacagagtgaccatcacatgcaaggccagcgaccacatcaacaactggctggcctggtatcagcagaagcctggacaggcccctaagctgctgatctacggcgctaccacactggaaacaggcgtgcccagcagattttctggcagcggctctggcaccgactacaccctgacaatatccagcctccagcctgaggacttcgccacctactactgtcagcagagctggaacaccccttggacattcggccagggcaccaagctggaaatcaagagactcgaggggaaaccaattcccaaccctcttctgggactggattcaaccggcagcggcgacaagcagctggacgccgacgtgtcccccaagcctaccatcttcctgccctctatcgccgagacaaagctccagaaggccggcacctacctgtgcctgctggaaaagttcttcccagatgtgattaagatccactggcaggaaaagaagtccaacaccatcctgggcagccaggaaggcaacaccatgaagaccaacgacacctacatgaagttcagctggctgaccgtgcccgagaagtccctggacaaagaacacagatgcatcgtgcggcacgaaaacaacaagaacggcgtggaccaggaaatcatcttcccacccatcaagaccgatgtgattacaatggaccccaaggacaactgctccaaggacgccaacgataccctgctgctccagctgaccaacaccagcgcctactacatgtacttgttgctgctgctgaagtccgtggtgtacttcgccatcatcacatgctgcctgctgcggagaaccgccttctgctgcaacggcgagaagtctagggccaagcgatctggatctggagcaacaaacttctcactactcaaacaagcaggtgacgtggaggagaatcccgggcctactagtatggactggatttggcgcatccttttccttgtcggcgctgctaccggcgcccattcccaactgcaactgcaagagtctggccctggcctggtcaagccttctgaaaccctgagcctgacctgtaccgtgtccggcggctctatcagcagcggcgattactactggggctggatcagacagcctccaggcaagggactcgaatggatcggcagcatcagctacagcggctccacctactacaacccaagcctgaagtccagagtgaccatcagcgtggacaccagcagaaaccagttctccctgaagctgagcagcgtgacagccgccgatacagccgtgtattattgcaccagagaggacagcagcaactggcggagtagaggacagggcacactggtcacagtgtcctcttctggaggcggtggaagcggtggaggaggatctgaagtgcagctggttgaatctggcggaggactggttcaggctggcggatctctgagactgtcttgtgccgccagcggcagaacctttagcatgggctggtttagacaggcccctggcaaagagagagagttcgtcgccgccatcacatactctggcggcagcccttactacgccgactctgtgaagggcagattcaccatcagccgggacaacgccaagaacaccgtgtacctccagatgaacagcctgaagcctgaggacaccgccgtgtactactgcgccgccaatccaacatacggcagcgactggaacgccgagaattggggccagggaacccaagtgacagtgtctagcggatccggcggcggaggatctggcggaggcggatctgggggcggaggctctttcgaacaagttcagcttcaacagcctggcgctgagctggtcaaacctggcgcttctgtgaagatgagctgcaaagccagcggctacgccttcagcagctactggatcaactggatgaagcagaaacccggccagggactcgaatggatcggccaaatctatcccggcgacggcgacaccaactacaacggcaagttcaagggcagagccacactgaccgccgatacctctagcagcacagcctacatgcagctgagcagcctgaccagcgaagatagcgccgtgtacttctgtgcccggtccatcacaacagtcgtgggctgcgctatggactattggggccagggaacaagcgtgaccgtgtctagtacgcgtgagcagaaactgatctcggaagaggatgggagcggcagccagcctcacaccaagcccagcgtgttcgtgatgaagaacggcaccaacgtggcctgcctcgtgaaagagttctaccccaaggacatcaggatcaacctggtgtccagcaagaagatcaccgagttcgaccccgccatcgtgatctcccccagcggcaagtacaacgccgtgaagctggggaagtacgaggacagcaacagcgtgacctgctccgtgcagcacgacaacaagaccgtgcacagcaccgactttgaagtgaaaaccgactccaccgaccacgtgaagcccaaagagacagagaacaccaagcagcccagcaagagctgccacaagcccaaggccatcgtgcacaccgagaaagtgaacatgatgagcctgaccgtgctgggcctgcggatgctgttcgccaaaaccgtggccgtgaacttcctgctgaccgccaagctgttcttcctccgcgccaagagaagcggatctggcgtgaagcagaccctgaatttcgacctgctgaagctggctggcgacgtggaatccaacccaggcccttctagaggccatatgaccgagtacaagcccacggtgcgcctcgccacccgcgacgacgtccccagggccgtacgcaccctcgccgccgcgttcgccgactaccccgccacgcgccacaccgtcgatccggaccgccacatcgagcgggtcaccgagctgcaagaactcttcctcacgcgcgtcgggctcgacatcggcaaggtgtgggtcgcggacgacggcgccgcggtggcggtctggaccacgccggagagcgtcgaagcgggggcggtgttcgccgagatcggcccgcgcatggccgagttgagcggttcccggctggccgcgcagcaacagatggaaggcctcctggcgccgcaccggcccaaggagcccgcgtggttcctggccaccgtcggcgtctcgcccgaccaccagggcaagggtctgggcagcgccgtcgtgctccccggagtggaggcggccgagcgcgccggggtgcccgccttcctggagacctccgcgccccgcaacctccccttctacgagcggctcggcttcaccgtcaccgccgacgtcgaggtgcccgaaggaccgcgcacctggtgcatgacccgcaagcccggtgcctga

SEQ ID NO: 6436 - DNA, 3477 bp, Artificial Sequence
  Synthetic Polynucloetide
atggccttaccagtgaccgccttgctcctgccgctggccttgctgctccacgccgccaggccggaggttcagctgcttgagtctggcggaggactggttcaacctggcggaagcctgagactgtcttgtgccgccagcggcttcacctttagcagctacgccatgagctgggtccgacaggctcctggcaaaggactggaatgggtgtccagcatcagcggcagcggcgactacatctactacgccgatagcgtgaagggcagattcaccatcagccgggacatcagcaagaacaccctgtacctccagatgaacagcctgagagccgaggacaccgccgtgtactactgtgccaaagaaggcaccggcgctaacagcagcctggccgattatagaggccagggcacactggtcaccgtgtctagtggcggaggaagcggcggaggatctgaagtgcaggttttggagtctggcggaggactggttcagcctggcggatctctgagactgtcttgtgccgccagcggcttcaccttcagcaactttgccatgagctgggtccgacaggcccctggcaaaggacttgaatgggtgtccacaatcagcggcagcgccggcacaacagattacgccgattctgtgaagggcagattcaccatcagccgggacaacagcaagaaaaccctgtacctccagatgaacagcctgcgcgtggaagataccgccgtgtactactgtgccgatggcagaggccccttcttcgattatcgcggccagggcacactggtcaccgtttcttctggtaccggcggaggcggatctggcggcggaggtagcggtggcggaggatctgaattcgacatccagatgacacagagccctagcagcctgtctgccagcgtgggagacagagtgaccatcacatgcaaggccagcgaccacatcaacaactggctggcctggtatcagcagaagcctggacaggcccctaagctgctgatctacggcgctaccacactggaaacaggcgtgcccagcagattttctggcagcggctctggcaccgactacaccctgacaatatccagcctccagcctgaggacttcgccacctactactgtcagcagagctggaacaccccttggacattcggccagggcaccaagctggaaatcaagagactcgagagccagcctcacaccaagcccagcgtgttcgtgatgaagaacggcaccaacgtggcctgcctcgtgaaagagttctaccccaaggacatcaggatcaacctggtgtccagcaagaagatcaccgagttcgaccccgccatcgtgatctcccccagcggcaagtacaacgccgtgaagctggggaagtacgaggacagcaacagcgtgacctgctccgtgcagcacgacaacaagaccgtgcacagcaccgactttgaagtgaaaaccgactccaccgaccacgtgaagcccaaagagacagagaacaccaagcagcccagcaagagctgccacaagcccaaggccatcgtgcacaccgagaaagtgaacatgatgagcctgaccgtgctgggcctgcggatgctgttcgccaaaaccgtggccgtgaacttcctgctgaccgccaagctgttcttcctcagggccaagcgatctggatctggagcaacaaacttctcactactcaaacaagcaggtgacgtggaggagaatcccgggcctactagtatggactggatttggcgcatccttttccttgtcggcgctgctaccggcgcccattcccaactgcaactgcaagagtctggccctggcctggtcaagccttctgaaaccctgagcctgacctgtaccgtgtccggcggctctatcagcagcggcgattactactggggctggatcagacagcctccaggcaagggactcgaatggatcggcagcatcagctacagcggctccacctactacaacccaagcctgaagtccagagtgaccatcagcgtggacaccagcagaaaccagttctccctgaagctgagcagcgtgacagccgccgatacagccgtgtattattgcaccagagaggacagcagcaactggcggagtagaggacagggcacactggtcacagtgtcctcttctggaggcggtggaagcggtggaggaggatctgaagtgcagctggttgaatctggcggaggactggttcaggctggcggatctctgagactgtcttgtgccgccagcggcagaacctttagcatgggctggtttagacaggcccctggcaaagagagagagttcgtcgccgccatcacatactctggcggcagcccttactacgccgactctgtgaagggcagattcaccatcagccgggacaacgccaagaacaccgtgtacctccagatgaacagcctgaagcctgaggacaccgccgtgtactactgcgccgccaatccaacatacggcagcgactggaacgccgagaattggggccagggaacccaagtgacagtgtctagcggatccggcggcggaggatctggcggaggcggatctgggggcggaggctctttcgaacaagttcagcttcaacagcctggcgctgagctggtcaaacctggcgcttctgtgaagatgagctgcaaagccagcggctacgccttcagcagctactggatcaactggatgaagcagaaacccggccagggactcgaatggatcggccaaatctatcccggcgacggcgacaccaactacaacggcaagttcaagggcagagccacactgaccgccgatacctctagcagcacagcctacatgcagctgagcagcctgaccagcgaagatagcgccgtgtacttctgtgcccggtccatcacaacagtcgtgggctgcgctatggactattggggccagggaacaagcgtgaccgtgtctagtacgcgtgacaagcagctggacgccgacgtgtcccccaagcctaccatcttcctgccctctatcgccgagacaaagctccagaaggccggcacctacctgtgcctgctggaaaagttcttcccagatgtgattaagatccactggcaggaaaagaagtccaacaccatcctgggcagccaggaaggcaacaccatgaagaccaacgacacctacatgaagttcagctggctgaccgtgcccgagaagtccctggacaaagaacacagatgcatcgtgcggcacgaaaacaacaagaacggcgtggaccaggaaatcatcttcccacccatcaagaccgatgtgattacaatggaccccaaggacaactgctccaaggacgccaacgataccctgctgctccagctgaccaacaccagcgcctactacatgtacttgttgctgctgctgaagtccgtggtgtacttcgccatcatcacatgctgcctgctgcggagaaccgccttctgctgcaacggcgagaagtct

SEQ ID NO: 6437 - DNA, 4686 bp, Artificial Sequence
  Synthetic Polynucloetide
atggccttaccagtgaccgccttgctcctgccgctggccttgctgctccacgccgccaggccggaggttcagctgcttgagtctggcggaggactggttcaacctggcggaagcctgagactgtcttgtgccgccagcggcttcacctttagcagctacgccatgagctgggtccgacaggctcctggcaaaggactggaatgggtgtccagcatcagcggcagcggcgactacatctactacgccgatagcgtgaagggcagattcaccatcagccgggacatcagcaagaacaccctgtacctccagatgaacagcctgagagccgaggacaccgccgtgtactactgtgccaaagaaggcaccggcgctaacagcagcctggccgattatagaggccagggcacactggtcaccgtgtctagtggcggaggaagcggcggaggatctgaagtgcaggttttggagtctggcggaggactggttcagcctggcggatctctgagactgtcttgtgccgccagcggcttcaccttcagcaactttgccatgagctgggtccgacaggcccctggcaaaggacttgaatgggtgtccacaatcagcggcagcgccggcacaacagattacgccgattctgtgaagggcagattcaccatcagccgggacaacagcaagaaaaccctgtacctccagatgaacagcctgcgcgtggaagataccgccgtgtactactgtgccgatggcagaggccccttcttcgattatcgcggccagggcacactggtcaccgtttcttctggtaccggcggaggcggatctggcggcggaggtagcggtggcggaggatctgaattcgacatccagatgacacagagccctagcagcctgtctgccagcgtgggagacagagtgaccatcacatgcaaggccagcgaccacatcaacaactggctggcctggtatcagcagaagcctggacaggcccctaagctgctgatctacggcgctaccacactggaaacaggcgtgcccagcagattttctggcagcggctctggcaccgactacaccctgacaatatccagcctccagcctgaggacttcgccacctactactgtcagcagagctggaacaccccttggacattcggccagggcaccaagctggaaatcaagagaggacagcctaaggccaatcctaccgtgacactgttccctccaagcagcgaagaactccaggccaacaaggccacacttgtgtgcctgatctccgacttctaccctggggctgtgacagtggcttggaaggccgatggatctcctgtgaaagccggcgtggaaaccaccaagccatccaagcagagcaacaacaaatacgccgccagctcctacctgagcctgacacctgagcagtggaagtcccacagatcctacagctgccaagtgacccacgaaggcagcaccgtggaaaagacagtggcccctacagagtgcagcggatcccagagcttcggcctgctggaccccaagctgtgctacctgctggatggcatcctgttcatctacggcgtgatcctgaccgccctgttcctgagagtgaagttcagcagaagcgccgacgcccctgcctaccagcagggacagaaccaactgtacaacgagctgaacctgggcagacgggaagagtacgacgtgctggacaagcggagaggcagggaccctgagatgggcggaaagccccagcggagaaagaacccccaggaaggactgtataacgaactccagaaagacaagatggccgaagcctacagcgagatcggcatgaagggcgagcggagaagaggcaagggccacgatggcctgtaccagggcctgagcaccgccaccaaggacacctatgacgccctgcacatgcaggccctgcctccaagaagggccaagcgatctggatctggagcaacaaacttctcactactcaaacaagcaggtgacgtggaggagaatcccgggcctactagtatggactggatttggcgcatccttttccttgtcggcgctgctaccggcgcccattcccaactgcaactgcaagagtctggccctggcctggtcaagccttctgaaaccctgagcctgacctgtaccgtgtccggcggctctatcagcagcggcgattactactggggctggatcagacagcctccaggcaagggactcgaatggatcggcagcatcagctacagcggctccacctactacaacccaagcctgaagtccagagtgaccatcagcgtggacaccagcagaaaccagttctccctgaagctgagcagcgtgacagccgccgatacagccgtgtattattgcaccagagaggacagcagcaactggcggagtagaggacagggcacactggtcacagtgtcctcttctggaggcggtggaagcggtggaggaggatctgaagtgcagctggttgaatctggcggaggactggttcaggctggcggatctctgagactgtcttgtgccgccagcggcagaacctttagcatgggctggtttagacaggcccctggcaaagagagagagttcgtcgccgccatcacatactctggcggcagcccttactacgccgactctgtgaagggcagattcaccatcagccgggacaacgccaagaacaccgtgtacctccagatgaacagcctgaagcctgaggacaccgccgtgtactactgcgccgccaatccaacatacggcagcgactggaacgccgagaattggggccagggaacccaagtgacagtgtctagcggatccggcggcggaggatctggcggaggcggatctgggggcggaggctctttcgaacaagttcagcttcaacagcctggcgctgagctggtcaaacctggcgcttctgtgaagatgagctgcaaagccagcggctacgccttcagcagctactggatcaactggatgaagcagaaacccggccagggactcgaatggatcggccaaatctatcccggcgacggcgacaccaactacaacggcaagttcaagggcagagccacactgaccgccgatacctctagcagcacagcctacatgcagctgagcagcctgaccagcgaagatagcgccgtgtacttctgtgcccggtccatcacaacagtcgtgggctgcgctatggactattggggccagggaacaagcgtgaccgtgtctagtgcctctacaaagggaccctccgtgtttcctctggctcccagcagcaagtctacaagcggaggaacagccgctctgggctgcctggtcaaggattactttcccgagcctgtgaccgtgtcctggaatagcggagcactgacaagcggcgtgcacacctttccagccgtgctgcaaagcagcggcctgtactctctgagcagcgtggtcacagtgcctagctctagcctgggcacccagacctacatctgcaatgtgaaccacaagcctagcaacaccaaggtggacaagagagtggaacccaagagctgtggtacccagagttttgggttgttggaccctaaattgtgctatctgttggacggaatcctgttcatttacggagtgatcctgaccgcattgttcctgcgggttaagttttccagatccgcagacgcacccgcttaccaacaagggcagaaccaactctacaatgaacttaatttggggcggagggaagagtacgacgttctggacaaaaggaggggacgagatcccgagatgggcggaaagcctcagcgaaggaagaatccgcaagaggggctttataacgaactccagaaagataaaatggcagaagcctatagtgagattgggatgaagggagaaaggaggaggggtaaaggtcacgatgggttgtaccaaggattgagcacagccactaaagatacctatgatgcgctccacatgcaggccctgccgccaagacgcgccaagagaagcggatctggcgtgaagcagaccctgaatttcgacctgctgaagctggctggcgacgtggaatccaacccaggcccttctagaggccatatgaccgagtacaagcccacggtgcgcctcgccacccgcgacgacgtccccagggccgtacgcaccctcgccgccgcgttcgccgactaccccgccacgcgccacaccgtcgatccggaccgccacatcgagcgggtcaccgagctgcaagaactcttcctcacgcgcgtcgggctcgacatcggcaaggtgtgggtcgcggacgacggcgccgcggtggcggtctggaccacgccggagagcgtcgaagcgggggcggtgttcgccgagatcggcccgcgcatggccgagttgagcggttcccggctggccgcgcagcaacagatggaaggcctcctggcgccgcaccggcccaaggagcccgcgtggttcctggccaccgtcggcgtctcgcccgaccaccagggcaagggtctgggcagcgccgtcgtgctccccggagtggaggcggccgagcgcgccggggtgcccgccttcctggagacctccgcgccccgcaacctccccttctacgagcggctcggcttcaccgtcaccgccgacgtcgaggtgcccgaaggaccgcgcacctggtgcatgacccgcaagcccggtgcctga

SEQ ID NO: 6438 - DNA, 4041 bp, Artificial Sequence
  Synthetic Polynucloetide
atggccttaccagtgaccgccttgctcctgccgctggccttgctgctccacgccgccaggccggaggttcagctgcttgagtctggcggaggactggttcaacctggcggaagcctgagactgtcttgtgccgccagcggcttcacctttagcagctacgccatgagctgggtccgacaggctcctggcaaaggactggaatgggtgtccagcatcagcggcagcggcgactacatctactacgccgatagcgtgaagggcagattcaccatcagccgggacatcagcaagaacaccctgtacctccagatgaacagcctgagagccgaggacaccgccgtgtactactgtgccaaagaaggcaccggcgctaacagcagcctggccgattatagaggccagggcacactggtcaccgtgtctagtggcggaggaagcggcggaggatctgaagtgcaggttttggagtctggcggaggactggttcagcctggcggatctctgagactgtcttgtgccgccagcggcttcaccttcagcaactttgccatgagctgggtccgacaggcccctggcaaaggacttgaatgggtgtccacaatcagcggcagcgccggcacaacagattacgccgattctgtgaagggcagattcaccatcagccgggacaacagcaagaaaaccctgtacctccagatgaacagcctgcgcgtggaagataccgccgtgtactactgtgccgatggcagaggccccttcttcgattatcgcggccagggcacactggtcaccgtttcttctggtaccggcggaggcggatctggcggcggaggtagcggtggcggaggatctgaattcgacatccagatgacacagagccctagcagcctgtctgccagcgtgggagacagagtgaccatcacatgcaaggccagcgaccacatcaacaactggctggcctggtatcagcagaagcctggacaggcccctaagctgctgatctacggcgctaccacactggaaacaggcgtgcccagcagattttctggcagcggctctggcaccgactacaccctgacaatatccagcctccagcctgaggacttcgccacctactactgtcagcagagctggaacaccccttggacattcggccagggcaccaagctggaaatcaagagactcgaggacctgaagaacgtgttcccacctgaggtggccgtgttcgagcctagcgaggccgagatcagccacacccagaaagccaccctcgtgtgcctggctaccggcttctaccccgaccatgtggaactgtcttggtgggtcaacggcaaagaggtgcacagcggcgtgtctaccgacccccagccactgaaagaacagcccgccctgaacgacagccggtactgcctgagcagcagactgagagtgtccgccaccttctggcagaacccccggaaccacttcagatgccaggtgcagttctacggcctgagcgagaacgacgagtggacccaggacagagccaagcccgtgacccagatcgtgtctgccgaagcctggggcagagccgattgcggatcccagagcttcggcctgctggaccccaagctgtgctacctgctggatggcatcctgttcatctacggcgtgatcctgaccgccctgttcctgagagtgaagttcagcagaagcgccgacgcccctgcctaccagcagggacagaaccaactgtacaacgagctgaacctgggcagacgggaagagtacgacgtgctggacaagcggagaggcagggaccctgagatgggcggaaagccccagcggagaaagaacccccaggaaggactgtataacgaactccagaaagacaagatggccgaagcctacagcgagatcggcatgaagggcgagcggagaagaggcaagggccacgatggcctgtaccagggcctgagcaccgccaccaaggacacctatgacgccctgcacatgcaggccctgcctccaagaagggccaagcgatctggatctggagcaacaaacttctcactactcaaacaagcaggtgacgtggaggagaatcccgggcctactagtatggactggatttggcgcatccttttccttgtcggcgctgctaccggcgcccattcccaactgcaactgcaagagtctggccctggcctggtcaagccttctgaaaccctgagcctgacctgtaccgtgtccggcggctctatcagcagcggcgattactactggggctggatcagacagcctccaggcaagggactcgaatggatcggcagcatcagctacagcggctccacctactacaacccaagcctgaagtccagagtgaccatcagcgtggacaccagcagaaaccagttctccctgaagctgagcagcgtgacagccgccgatacagccgtgtattattgcaccagagaggacagcagcaactggcggagtagaggacagggcacactggtcacagtgtcctcttctggaggcggtggaagcggtggaggaggatctgaagtgcagctggttgaatctggcggaggactggttcaggctggcggatctctgagactgtcttgtgccgccagcggcagaacctttagcatgggctggtttagacaggcccctggcaaagagagagagttcgtcgccgccatcacatactctggcggcagcccttactacgccgactctgtgaagggcagattcaccatcagccgggacaacgccaagaacaccgtgtacctccagatgaacagcctgaagcctgaggacaccgccgtgtactactgcgccgccaatccaacatacggcagcgactggaacgccgagaattggggccagggaacccaagtgacagtgtctagcggatccggcggcggaggatctggcggaggcggatctgggggcggaggctctttcgaacaagttcagcttcaacagcctggcgctgagctggtcaaacctggcgcttctgtgaagatgagctgcaaagccagcggctacgccttcagcagctactggatcaactggatgaagcagaaacccggccagggactcgaatggatcggccaaatctatcccggcgacggcgacaccaactacaacggcaagttcaagggcagagccacactgaccgccgatacctctagcagcacagcctacatgcagctgagcagcctgaccagcgaagatagcgccgtgtacttctgtgcccggtccatcacaacagtcgtgggctgcgctatggactattggggccagggaacaagcgtgaccgtgtctagtacgcgtatccagaaccctgatcctgccgtgtaccagctgcgggatagcaagagcagcgacaagagcgtgtgtctgttcaccgacttcgacagccagaccaacgtgtcccagagcaaggactccgacgtgtacatcaccgataagaccgtgctggacatgcggagcatggacttcaagagcaactccgccgtggcctggtccaacaagtccgatttcgcctgcgccaacgccttcaacaacagcattatccccgaggacacattcttcccaagccccgagagcagctgcggtacccagagttttgggttgttggaccctaaattgtgctatctgttggacggaatcctgttcatttacggagtgatcctgaccgcattgttcctgcgggttaagttttccagatccgcagacgcacccgcttaccaacaagggcagaaccaactctacaatgaacttaatttggggcggagggaagagtacgacgttctggacaaaaggaggggacgagatcccgagatgggcggaaagcctcagcgaaggaagaatccgcaagaggggctttataacgaactccagaaagataaaatggcagaagcctatagtgagattgggatgaagggagaaaggaggaggggtaaaggtcacgatgggttgtaccaaggattgagcacagccactaaagatacctatgatgcgctccacatgcaggccctgccgccaaga

SEQ ID NO: 6439 - DNA, 4041 bp, Artificial Sequence
  Synthetic Polynucloetide
atggccttaccagtgaccgccttgctcctgccgctggccttgctgctccacgccgccaggccggaggttcagctgcttgagtctggcggaggactggttcaacctggcggaagcctgagactgtcttgtgccgccagcggcttcacctttagcagctacgccatgagctgggtccgacaggctcctggcaaaggactggaatgggtgtccagcatcagcggcagcggcgactacatctactacgccgatagcgtgaagggcagattcaccatcagccgggacatcagcaagaacaccctgtacctccagatgaacagcctgagagccgaggacaccgccgtgtactactgtgccaaagaaggcaccggcgctaacagcagcctggccgattatagaggccagggcacactggtcaccgtgtctagtggcggaggaagcggcggaggatctgaagtgcaggttttggagtctggcggaggactggttcagcctggcggatctctgagactgtcttgtgccgccagcggcttcaccttcagcaactttgccatgagctgggtccgacaggcccctggcaaaggacttgaatgggtgtccacaatcagcggcagcgccggcacaacagattacgccgattctgtgaagggcagattcaccatcagccgggacaacagcaagaaaaccctgtacctccagatgaacagcctgcgcgtggaagataccgccgtgtactactgtgccgatggcagaggccccttcttcgattatcgcggccagggcacactggtcaccgtttcttctggtaccggcggaggcggatctggcggcggaggtagcggtggcggaggatctgaattcgacatccagatgacacagagccctagcagcctgtctgccagcgtgggagacagagtgaccatcacatgcaaggccagcgaccacatcaacaactggctggcctggtatcagcagaagcctggacaggcccctaagctgctgatctacggcgctaccacactggaaacaggcgtgcccagcagattttctggcagcggctctggcaccgactacaccctgacaatatccagcctccagcctgaggacttcgccacctactactgtcagcagagctggaacaccccttggacattcggccagggcaccaagctggaaatcaagagactcgaggacctgaagaacgtgttcccacctgaggtggccgtgttcgagcctagcaaggccgagatcgcccacacccagaaagccaccctcgtgtgcctggctaccggcttctaccccgaccatgtggaactgtcttggtgggtcaacggcaaagaggtgcacagcggcgtgtgtaccgacccccagccactgaaagaacagcccgccctgaacgacagccggtactgcctgagcagcagactgagagtgtccgccaccttctggcagaacccccggaaccacttcagatgccaggtgcagttctacggcctgagcgagaacgacgagtggacccaggacagagccaagcccgtgacccagatcgtgtctgccgaagcctggggcagagccgattgcggatcccagagcttcggcctgctggaccccaagctgtgctacctgctggatggcatcctgttcatctacggcgtgatcctgaccgccctgttcctgagagtgaagttcagcagaagcgccgacgcccctgcctaccagcagggacagaaccaactgtacaacgagctgaacctgggcagacgggaagagtacgacgtgctggacaagcggagaggcagggaccctgagatgggcggaaagccccagcggagaaagaacccccaggaaggactgtataacgaactccagaaagacaagatggccgaagcctacagcgagatcggcatgaagggcgagcggagaagaggcaagggccacgatggcctgtaccagggcctgagcaccgccaccaaggacacctatgacgccctgcacatgcaggccctgcctccaagaagggccaagcgatctggatctggagcaacaaacttctcactactcaaacaagcaggtgacgtggaggagaatcccgggcctactagtatggactggatttggcgcatccttttccttgtcggcgctgctaccggcgcccattcccaactgcaactgcaagagtctggccctggcctggtcaagccttctgaaaccctgagcctgacctgtaccgtgtccggcggctctatcagcagcggcgattactactggggctggatcagacagcctccaggcaagggactcgaatggatcggcagcatcagctacagcggctccacctactacaacccaagcctgaagtccagagtgaccatcagcgtggacaccagcagaaaccagttctccctgaagctgagcagcgtgacagccgccgatacagccgtgtattattgcaccagagaggacagcagcaactggcggagtagaggacagggcacactggtcacagtgtcctcttctggaggcggtggaagcggtggaggaggatctgaagtgcagctggttgaatctggcggaggactggttcaggctggcggatctctgagactgtcttgtgccgccagcggcagaacctttagcatgggctggtttagacaggcccctggcaaagagagagagttcgtcgccgccatcacatactctggcggcagcccttactacgccgactctgtgaagggcagattcaccatcagccgggacaacgccaagaacaccgtgtacctccagatgaacagcctgaagcctgaggacaccgccgtgtactactgcgccgccaatccaacatacggcagcgactggaacgccgagaattggggccagggaacccaagtgacagtgtctagcggatccggcggcggaggatctggcggaggcggatctgggggcggaggctctttcgaacaagttcagcttcaacagcctggcgctgagctggtcaaacctggcgcttctgtgaagatgagctgcaaagccagcggctacgccttcagcagctactggatcaactggatgaagcagaaacccggccagggactcgaatggatcggccaaatctatcccggcgacggcgacaccaactacaacggcaagttcaagggcagagccacactgaccgccgatacctctagcagcacagcctacatgcagctgagcagcctgaccagcgaagatagcgccgtgtacttctgtgcccggtccatcacaacagtcgtgggctgcgctatggactattggggccagggaacaagcgtgaccgtgtctagtacgcgtatccagaaccctgatcctgccgtgtaccagctgcgggatagcaagagcagcgacaagagcgtgtgtctgttcaccgacttcgacagccagaccaacgtgtcccagagcaaggactccgacgtgtacatcaccgataagtgcgtgctggacatgcggagcatggacttcaagagcaactccgccgtggcctggtccaacaagtccgatttcgcctgcgccaacgccttcaacaacagcattatccccgaggacacattcttcccaagcagcgacgtgccctgcggtacccagagttttgggttgttggaccctaaattgtgctatctgttggacggaatcctgttcatttacggagtgatcctgaccgcattgttcctgcgggttaagttttccagatccgcagacgcacccgcttaccaacaagggcagaaccaactctacaatgaacttaatttggggcggagggaagagtacgacgttctggacaaaaggaggggacgagatcccgagatgggcggaaagcctcagcgaaggaagaatccgcaagaggggctttataacgaactccagaaagataaaatggcagaagcctatagtgagattgggatgaagggagaaaggaggaggggtaaaggtcacgatgggttgtaccaaggattgagcacagccactaaagatacctatgatgcgctccacatgcaggccctgccgccaaga

SEQ ID NO: 6440 - DNA, 4254 bp, Artificial Sequence
  Synthetic Polynucloetide
atggccttaccagtgaccgccttgctcctgccgctggccttgctgctccacgccgccaggccggaggttcagctgcttgagtctggcggaggactggttcaacctggcggaagcctgagactgtcttgtgccgccagcggcttcacctttagcagctacgccatgagctgggtccgacaggctcctggcaaaggactggaatgggtgtccagcatcagcggcagcggcgactacatctactacgccgatagcgtgaagggcagattcaccatcagccgggacatcagcaagaacaccctgtacctccagatgaacagcctgagagccgaggacaccgccgtgtactactgtgccaaagaaggcaccggcgctaacagcagcctggccgattatagaggccagggcacactggtcaccgtgtctagtggcggaggaagcggcggaggatctgaagtgcaggttttggagtctggcggaggactggttcagcctggcggatctctgagactgtcttgtgccgccagcggcttcaccttcagcaactttgccatgagctgggtccgacaggcccctggcaaaggacttgaatgggtgtccacaatcagcggcagcgccggcacaacagattacgccgattctgtgaagggcagattcaccatcagccgggacaacagcaagaaaaccctgtacctccagatgaacagcctgcgcgtggaagataccgccgtgtactactgtgccgatggcagaggccccttcttcgattatcgcggccagggcacactggtcaccgtttcttctggtaccggcggaggcggatctggcggcggaggtagcggtggcggaggatctgaattcgacatccagatgacacagagccctagcagcctgtctgccagcgtgggagacagagtgaccatcacatgcaaggccagcgaccacatcaacaactggctggcctggtatcagcagaagcctggacaggcccctaagctgctgatctacggcgctaccacactggaaacaggcgtgcccagcagattttctggcagcggctctggcaccgactacaccctgacaatatccagcctccagcctgaggacttcgccacctactactgtcagcagagctggaacaccccttggacattcggccagggcaccaagctggaaatcaagagactcgaggggaaaccaattcccaaccctcttctgggactggattcaaccggcagcggcgaggacctgaagaacgtgttcccacctgaggtggccgtgttcgagcctagcgaggccgagatcagccacacccagaaagccaccctcgtgtgcctggctaccggcttctaccccgaccatgtggaactgtcttggtgggtcaacggcaaagaggtgcacagcggcgtgtctaccgacccccagccactgaaagaacagcccgccctgaacgacagccggtactgcctgagcagcagactgagagtgtccgccaccttctggcagaacccccggaaccacttcagatgccaggtgcagttctacggcctgagcgagaacgacgagtggacccaggacagagccaagcccgtgacccagatcgtgtctgccgaagcctggggcagagccgattgcggatcccagagcttcggcctgctggaccccaagctgtgctacctgctggatggcatcctgttcatctacggcgtgatcctgaccgccctgttcctgagagtgaagttcagcagaagcgccgacgcccctgcctaccagcagggacagaaccaactgtacaacgagctgaacctgggcagacgggaagagtacgacgtgctggacaagcggagaggcagggaccctgagatgggcggaaagccccagcggagaaagaacccccaggaaggactgtataacgaactccagaaagacaagatggccgaagcctacagcgagatcggcatgaagggcgagcggagaagaggcaagggccacgatggcctgtaccagggcctgagcaccgccaccaaggacacctatgacgccctgcacatgcaggccctgcctccaagaagggccaagcgatctggatctggagcaacaaacttctcactactcaaacaagcaggtgacgtggaggagaatcccgggcctactagtatggactggatttggcgcatccttttccttgtcggcgctgctaccggcgcccattcccaactgcaactgcaagagtctggccctggcctggtcaagccttctgaaaccctgagcctgacctgtaccgtgtccggcggctctatcagcagcggcgattactactggggctggatcagacagcctccaggcaagggactcgaatggatcggcagcatcagctacagcggctccacctactacaacccaagcctgaagtccagagtgaccatcagcgtggacaccagcagaaaccagttctccctgaagctgagcagcgtgacagccgccgatacagccgtgtattattgcaccagagaggacagcagcaactggcggagtagaggacagggcacactggtcacagtgtcctcttctggaggcggtggaagcggtggaggaggatctgaagtgcagctggttgaatctggcggaggactggttcaggctggcggatctctgagactgtcttgtgccgccagcggcagaacctttagcatgggctggtttagacaggcccctggcaaagagagagagttcgtcgccgccatcacatactctggcggcagcccttactacgccgactctgtgaagggcagattcaccatcagccgggacaacgccaagaacaccgtgtacctccagatgaacagcctgaagcctgaggacaccgccgtgtactactgcgccgccaatccaacatacggcagcgactggaacgccgagaattggggccagggaacccaagtgacagtgtctagcggatccggcggcggaggatctggcggaggcggatctgggggcggaggctctttcgaacaagttcagcttcaacagcctggcgctgagctggtcaaacctggcgcttctgtgaagatgagctgcaaagccagcggctacgccttcagcagctactggatcaactggatgaagcagaaacccggccagggactcgaatggatcggccaaatctatcccggcgacggcgacaccaactacaacggcaagttcaagggcagagccacactgaccgccgatacctctagcagcacagcctacatgcagctgagcagcctgaccagcgaagatagcgccgtgtacttctgtgcccggtccatcacaacagtcgtgggctgcgctatggactattggggccagggaacaagcgtgaccgtgtctagtacgcgtgagcagaaactgatctcggaagaggatgggagcggcatccagaaccctgatcctgccgtgtaccagctgcgggatagcaagagcagcgacaagagcgtgtgtctgttcaccgacttcgacagccagaccaacgtgtcccagagcaaggactccgacgtgtacatcaccgataagaccgtgctggacatgcggagcatggacttcaagagcaactccgccgtggcctggtccaacaagtccgatttcgcctgcgccaacgccttcaacaacagcattatccccgaggacacattcttcccaagccccgagagcagctgcggtacccagagttttgggttgttggaccctaaattgtgctatctgttggacggaatcctgttcatttacggagtgatcctgaccgcattgttcctgaggagcaagcggtcacggctgctccacagcgattacatgaatatgacaccacgaagaccgggtcctactcgcaaacactaccaaccctacgcacctccccgcgactttgcagcgtaccgatctcgggttaagttttccagatccgcagacgcacccgcttaccaacaagggcagaaccaactctacaatgaacttaatttggggcggagggaagagtacgacgttctggacaaaaggaggggacgagatcccgagatgggcggaaagcctcagcgaaggaagaatccgcaagaggggctttataacgaactccagaaagataaaatggcagaagcctatagtgagattgggatgaagggagaaaggaggaggggtaaaggtcacgatgggttgtaccaaggattgagcacagccactaaagatacctatgatgcgctccacatgcaggccctgccgccaaga

SEQ ID NO: 6441 - DNA, 4377 bp, Artificial Sequence
  Synthetic Polynucloetide
atggccttaccagtgaccgccttgctcctgccgctggccttgctgctccacgccgccaggccggaggttcagctgcttgagtctggcggaggactggttcaacctggcggaagcctgagactgtcttgtgccgccagcggcttcacctttagcagctacgccatgagctgggtccgacaggctcctggcaaaggactggaatgggtgtccagcatcagcggcagcggcgactacatctactacgccgatagcgtgaagggcagattcaccatcagccgggacatcagcaagaacaccctgtacctccagatgaacagcctgagagccgaggacaccgccgtgtactactgtgccaaagaaggcaccggcgctaacagcagcctggccgattatagaggccagggcacactggtcaccgtgtctagtggcggaggaagcggcggaggatctgaagtgcaggttttggagtctggcggaggactggttcagcctggcggatctctgagactgtcttgtgccgccagcggcttcaccttcagcaactttgccatgagctgggtccgacaggcccctggcaaaggacttgaatgggtgtccacaatcagcggcagcgccggcacaacagattacgccgattctgtgaagggcagattcaccatcagccgggacaacagcaagaaaaccctgtacctccagatgaacagcctgcgcgtggaagataccgccgtgtactactgtgccgatggcagaggccccttcttcgattatcgcggccagggcacactggtcaccgtttcttctggtaccggcggaggcggatctggcggcggaggtagcggtggcggaggatctgaattcgacatccagatgacacagagccctagcagcctgtctgccagcgtgggagacagagtgaccatcacatgcaaggccagcgaccacatcaacaactggctggcctggtatcagcagaagcctggacaggcccctaagctgctgatctacggcgctaccacactggaaacaggcgtgcccagcagattttctggcagcggctctggcaccgactacaccctgacaatatccagcctccagcctgaggacttcgccacctactactgtcagcagagctggaacaccccttggacattcggccagggcaccaagctggaaatcaagagactcgaggggaaaccaattcccaaccctcttctgggactggattcaaccggcagcggcgaggacctgaagaacgtgttcccacctgaggtggccgtgttcgagcctagcgaggccgagatcagccacacccagaaagccaccctcgtgtgcctggctaccggcttctaccccgaccatgtggaactgtcttggtgggtcaacggcaaagaggtgcacagcggcgtgtctaccgacccccagccactgaaagaacagcccgccctgaacgacagccggtactgcctgagcagcagactgagagtgtccgccaccttctggcagaacccccggaaccacttcagatgccaggtgcagttctacggcctgagcgagaacgacgagtggacccaggacagagccaagcccgtgacccagatcgtgtctgccgaagcctggggcagagccgattgcggatcccagagcttcggcctgctggaccccaagctgtgctacctgctggatggcatcctgttcatctacggcgtgatcctgaccgccctgttcctgaggagtaagaggagcaggctcctgcacagtgactacatgaacatgactccacgccgccccggacccacccgcaagcattaccagccctatgccccaccacgcgacttcgcagcctatcgctccagagtgaagttcagcagaagcgccgacgcccctgcctaccagcagggacagaaccaactgtacaacgagctgaacctgggcagacgggaagagtacgacgtgctggacaagcggagaggcagggaccctgagatgggcggaaagccccagcggagaaagaacccccaggaaggactgtataacgaactccagaaagacaagatggccgaagcctacagcgagatcggcatgaagggcgagcggagaagaggcaagggccacgatggcctgtaccagggcctgagcaccgccaccaaggacacctatgacgccctgcacatgcaggccctgcctccaagaagggccaagcgatctggatctggagcaacaaacttctcactactcaaacaagcaggtgacgtggaggagaatcccgggcctactagtatggactggatttggcgcatccttttccttgtcggcgctgctaccggcgcccattcccaactgcaactgcaagagtctggccctggcctggtcaagccttctgaaaccctgagcctgacctgtaccgtgtccggcggctctatcagcagcggcgattactactggggctggatcagacagcctccaggcaagggactcgaatggatcggcagcatcagctacagcggctccacctactacaacccaagcctgaagtccagagtgaccatcagcgtggacaccagcagaaaccagttctccctgaagctgagcagcgtgacagccgccgatacagccgtgtattattgcaccagagaggacagcagcaactggcggagtagaggacagggcacactggtcacagtgtcctcttctggaggcggtggaagcggtggaggaggatctgaagtgcagctggttgaatctggcggaggactggttcaggctggcggatctctgagactgtcttgtgccgccagcggcagaacctttagcatgggctggtttagacaggcccctggcaaagagagagagttcgtcgccgccatcacatactctggcggcagcccttactacgccgactctgtgaagggcagattcaccatcagccgggacaacgccaagaacaccgtgtacctccagatgaacagcctgaagcctgaggacaccgccgtgtactactgcgccgccaatccaacatacggcagcgactggaacgccgagaattggggccagggaacccaagtgacagtgtctagcggatccggcggcggaggatctggcggaggcggatctgggggcggaggctctttcgaacaagttcagcttcaacagcctggcgctgagctggtcaaacctggcgcttctgtgaagatgagctgcaaagccagcggctacgccttcagcagctactggatcaactggatgaagcagaaacccggccagggactcgaatggatcggccaaatctatcccggcgacggcgacaccaactacaacggcaagttcaagggcagagccacactgaccgccgatacctctagcagcacagcctacatgcagctgagcagcctgaccagcgaagatagcgccgtgtacttctgtgcccggtccatcacaacagtcgtgggctgcgctatggactattggggccagggaacaagcgtgaccgtgtctagtacgcgtgagcagaaactgatctcggaagaggatgggagcggcatccagaaccctgatcctgccgtgtaccagctgcgggatagcaagagcagcgacaagagcgtgtgtctgttcaccgacttcgacagccagaccaacgtgtcccagagcaaggactccgacgtgtacatcaccgataagaccgtgctggacatgcggagcatggacttcaagagcaactccgccgtggcctggtccaacaagtccgatttcgcctgcgccaacgccttcaacaacagcattatccccgaggacacattcttcccaagccccgagagcagctgcggtacccagagttttgggttgttggaccctaaattgtgctatctgttggacggaatcctgttcatttacggagtgatcctgaccgcattgttcctgaggagcaagcggtcacggctgctccacagcgattacatgaatatgacaccacgaagaccgggtcctactcgcaaacactaccaaccctacgcacctccccgcgactttgcagcgtaccgatctcgggttaagttttccagatccgcagacgcacccgcttaccaacaagggcagaaccaactctacaatgaacttaatttggggcggagggaagagtacgacgttctggacaaaaggaggggacgagatcccgagatgggcggaaagcctcagcgaaggaagaatccgcaagaggggctttataacgaactccagaaagataaaatggcagaagcctatagtgagattgggatgaagggagaaaggaggaggggtaaaggtcacgatgggttgtaccaaggattgagcacagccactaaagatacctatgatgcgctccacatgcaggccctgccgccaaga

SEQ ID NO: 6442 - DNA, 4260 bp, Artificial Sequence
  Synthetic Polynucloetide
atggccttaccagtgaccgccttgctcctgccgctggccttgctgctccacgccgccaggccggaggttcagctgcttgagtctggcggaggactggttcaacctggcggaagcctgagactgtcttgtgccgccagcggcttcacctttagcagctacgccatgagctgggtccgacaggctcctggcaaaggactggaatgggtgtccagcatcagcggcagcggcgactacatctactacgccgatagcgtgaagggcagattcaccatcagccgggacatcagcaagaacaccctgtacctccagatgaacagcctgagagccgaggacaccgccgtgtactactgtgccaaagaaggcaccggcgctaacagcagcctggccgattatagaggccagggcacactggtcaccgtgtctagtggcggaggaagcggcggaggatctgaagtgcaggttttggagtctggcggaggactggttcagcctggcggatctctgagactgtcttgtgccgccagcggcttcaccttcagcaactttgccatgagctgggtccgacaggcccctggcaaaggacttgaatgggtgtccacaatcagcggcagcgccggcacaacagattacgccgattctgtgaagggcagattcaccatcagccgggacaacagcaagaaaaccctgtacctccagatgaacagcctgcgcgtggaagataccgccgtgtactactgtgccgatggcagaggccccttcttcgattatcgcggccagggcacactggtcaccgtttcttctggtaccggcggaggcggatctggcggcggaggtagcggtggcggaggatctgaattcgacatccagatgacacagagccctagcagcctgtctgccagcgtgggagacagagtgaccatcacatgcaaggccagcgaccacatcaacaactggctggcctggtatcagcagaagcctggacaggcccctaagctgctgatctacggcgctaccacactggaaacaggcgtgcccagcagattttctggcagcggctctggcaccgactacaccctgacaatatccagcctccagcctgaggacttcgccacctactactgtcagcagagctggaacaccccttggacattcggccagggcaccaagctggaaatcaagagactcgaggggaaaccaattcccaaccctcttctgggactggattcaaccggcagcggcgaggacctgaagaacgtgttcccacctgaggtggccgtgttcgagcctagcgaggccgagatcagccacacccagaaagccaccctcgtgtgcctggctaccggcttctaccccgaccatgtggaactgtcttggtgggtcaacggcaaagaggtgcacagcggcgtgtctaccgacccccagccactgaaagaacagcccgccctgaacgacagccggtactgcctgagcagcagactgagagtgtccgccaccttctggcagaacccccggaaccacttcagatgccaggtgcagttctacggcctgagcgagaacgacgagtggacccaggacagagccaagcccgtgacccagatcgtgtctgccgaagcctggggcagagccgattgcggatcccagagcttcggcctgctggaccccaagctgtgctacctgctggatggcatcctgttcatctacggcgtgatcctgaccgccctgttcctgagagtgaagttcagcagaagcgccgacgcccctgcctaccagcagggacagaaccaactgtacaacgagctgaacctgggcagacgggaagagtacgacgtgctggacaagcggagaggcagggaccctgagatgggcggaaagccccagcggagaaagaacccccaggaaggactgtataacgaactccagaaagacaagatggccgaagcctacagcgagatcggcatgaagggcgagcggagaagaggcaagggccacgatggcctgtaccagggcctgagcaccgccaccaaggacacctatgacgccctgcacatgcaggccctgcctccaagaagggccaagcgatctggatctggagcaacaaacttctcactactcaaacaagcaggtgacgtggaggagaatcccgggcctactagtatggactggatttggcgcatccttttccttgtcggcgctgctaccggcgcccattcccaactgcaactgcaagagtctggccctggcctggtcaagccttctgaaaccctgagcctgacctgtaccgtgtccggcggctctatcagcagcggcgattactactggggctggatcagacagcctccaggcaagggactcgaatggatcggcagcatcagctacagcggctccacctactacaacccaagcctgaagtccagagtgaccatcagcgtggacaccagcagaaaccagttctccctgaagctgagcagcgtgacagccgccgatacagccgtgtattattgcaccagagaggacagcagcaactggcggagtagaggacagggcacactggtcacagtgtcctcttctggaggcggtggaagcggtggaggaggatctgaagtgcagctggttgaatctggcggaggactggttcaggctggcggatctctgagactgtcttgtgccgccagcggcagaacctttagcatgggctggtttagacaggcccctggcaaagagagagagttcgtcgccgccatcacatactctggcggcagcccttactacgccgactctgtgaagggcagattcaccatcagccgggacaacgccaagaacaccgtgtacctccagatgaacagcctgaagcctgaggacaccgccgtgtactactgcgccgccaatccaacatacggcagcgactggaacgccgagaattggggccagggaacccaagtgacagtgtctagcggatccggcggcggaggatctggcggaggcggatctgggggcggaggctctttcgaacaagttcagcttcaacagcctggcgctgagctggtcaaacctggcgcttctgtgaagatgagctgcaaagccagcggctacgccttcagcagctactggatcaactggatgaagcagaaacccggccagggactcgaatggatcggccaaatctatcccggcgacggcgacaccaactacaacggcaagttcaagggcagagccacactgaccgccgatacctctagcagcacagcctacatgcagctgagcagcctgaccagcgaagatagcgccgtgtacttctgtgcccggtccatcacaacagtcgtgggctgcgctatggactattggggccagggaacaagcgtgaccgtgtctagtacgcgtgagcagaaactgatctcggaagaggatctggggagcggcatccagaaccctgatcctgccgtgtaccagctgcgggatagcaagagcagcgacaagagcgtgtgtctgttcaccgacttcgacagccagaccaacgtgtcccagagcaaggactccgacgtgtacatcaccgataagaccgtgctggacatgcggagcatggacttcaagagcaactccgccgtggcctggtccaacaagtccgatttcgcctgcgccaacgccttcaacaacagcattatccccgaggacacattcttcccaagccccgagagcagctgcggtacccagagttttgggttgttggaccctaaattgtgctatctgttggacggaatcctgttcatttacggagtgatcctgaccgcattgttcctgaagagaggccggaagaagctgctgtacatcttcaagcagcctttcatgcggcccgtgcagaccacccaggaagaggacggctgctcctgccggttccccgaggaagaagaaggcggctgcgagctgcgggttaagttttccagatccgcagacgcacccgcttaccaacaagggcagaaccaactctacaatgaacttaatttggggcggagggaagagtacgacgttctggacaaaaggaggggacgagatcccgagatgggcggaaagcctcagcgaaggaagaatccgcaagaggggctttataacgaactccagaaagataaaatggcagaagcctatagtgagattgggatgaagggagaaaggaggaggggtaaaggtcacgatgggttgtaccaaggattgagcacagccactaaagatacctatgatgcgctccacatgcaggccctgccgccaaga

SEQ ID NO: 6443 - DNA, 4386 bp, Artificial Sequence
  Synthetic Polynucloetide
atggccttaccagtgaccgccttgctcctgccgctggccttgctgctccacgccgccaggccggaggttcagctgcttgagtctggcggaggactggttcaacctggcggaagcctgagactgtcttgtgccgccagcggcttcacctttagcagctacgccatgagctgggtccgacaggctcctggcaaaggactggaatgggtgtccagcatcagcggcagcggcgactacatctactacgccgatagcgtgaagggcagattcaccatcagccgggacatcagcaagaacaccctgtacctccagatgaacagcctgagagccgaggacaccgccgtgtactactgtgccaaagaaggcaccggcgctaacagcagcctggccgattatagaggccagggcacactggtcaccgtgtctagtggcggaggaagcggcggaggatctgaagtgcaggttttggagtctggcggaggactggttcagcctggcggatctctgagactgtcttgtgccgccagcggcttcaccttcagcaactttgccatgagctgggtccgacaggcccctggcaaaggacttgaatgggtgtccacaatcagcggcagcgccggcacaacagattacgccgattctgtgaagggcagattcaccatcagccgggacaacagcaagaaaaccctgtacctccagatgaacagcctgcgcgtggaagataccgccgtgtactactgtgccgatggcagaggccccttcttcgattatcgcggccagggcacactggtcaccgtttcttctggtaccggcggaggcggatctggcggcggaggtagcggtggcggaggatctgaattcgacatccagatgacacagagccctagcagcctgtctgccagcgtgggagacagagtgaccatcacatgcaaggccagcgaccacatcaacaactggctggcctggtatcagcagaagcctggacaggcccctaagctgctgatctacggcgctaccacactggaaacaggcgtgcccagcagattttctggcagcggctctggcaccgactacaccctgacaatatccagcctccagcctgaggacttcgccacctactactgtcagcagagctggaacaccccttggacattcggccagggcaccaagctggaaatcaagagactcgaggggaaaccaattcccaaccctcttctgggactggattcaaccggcagcggcgaggacctgaagaacgtgttcccacctgaggtggccgtgttcgagcctagcgaggccgagatcagccacacccagaaagccaccctcgtgtgcctggctaccggcttctaccccgaccatgtggaactgtcttggtgggtcaacggcaaagaggtgcacagcggcgtgtctaccgacccccagccactgaaagaacagcccgccctgaacgacagccggtactgcctgagcagcagactgagagtgtccgccaccttctggcagaacccccggaaccacttcagatgccaggtgcagttctacggcctgagcgagaacgacgagtggacccaggacagagccaagcccgtgacccagatcgtgtctgccgaagcctggggcagagccgattgcggatcccagagcttcggcctgctggaccccaagctgtgctacctgctggatggcatcctgttcatctacggcgtgatcctgaccgccctgttcctgaaacggggcagaaagaaactcctgtatatattcaaacaaccatttatgagaccagtacaaactactcaagaggaagatggctgtagctgccgatttccagaagaagaagaaggaggatgtgaactgagagtgaagttcagcagaagcgccgacgcccctgcctaccagcagggacagaaccaactgtacaacgagctgaacctgggcagacgggaagagtacgacgtgctggacaagcggagaggcagggaccctgagatgggcggaaagccccagcggagaaagaacccccaggaaggactgtataacgaactccagaaagacaagatggccgaagcctacagcgagatcggcatgaagggcgagcggagaagaggcaagggccacgatggcctgtaccagggcctgagcaccgccaccaaggacacctatgacgccctgcacatgcaggccctgcctccaagaagggccaagcgatctggatctggagcaacaaacttctcactactcaaacaagcaggtgacgtggaggagaatcccgggcctactagtatggactggatttggcgcatccttttccttgtcggcgctgctaccggcgcccattcccaactgcaactgcaagagtctggccctggcctggtcaagccttctgaaaccctgagcctgacctgtaccgtgtccggcggctctatcagcagcggcgattactactggggctggatcagacagcctccaggcaagggactcgaatggatcggcagcatcagctacagcggctccacctactacaacccaagcctgaagtccagagtgaccatcagcgtggacaccagcagaaaccagttctccctgaagctgagcagcgtgacagccgccgatacagccgtgtattattgcaccagagaggacagcagcaactggcggagtagaggacagggcacactggtcacagtgtcctcttctggaggcggtggaagcggtggaggaggatctgaagtgcagctggttgaatctggcggaggactggttcaggctggcggatctctgagactgtcttgtgccgccagcggcagaacctttagcatgggctggtttagacaggcccctggcaaagagagagagttcgtcgccgccatcacatactctggcggcagcccttactacgccgactctgtgaagggcagattcaccatcagccgggacaacgccaagaacaccgtgtacctccagatgaacagcctgaagcctgaggacaccgccgtgtactactgcgccgccaatccaacatacggcagcgactggaacgccgagaattggggccagggaacccaagtgacagtgtctagcggatccggcggcggaggatctggcggaggcggatctgggggcggaggctctttcgaacaagttcagcttcaacagcctggcgctgagctggtcaaacctggcgcttctgtgaagatgagctgcaaagccagcggctacgccttcagcagctactggatcaactggatgaagcagaaacccggccagggactcgaatggatcggccaaatctatcccggcgacggcgacaccaactacaacggcaagttcaagggcagagccacactgaccgccgatacctctagcagcacagcctacatgcagctgagcagcctgaccagcgaagatagcgccgtgtacttctgtgcccggtccatcacaacagtcgtgggctgcgctatggactattggggccagggaacaagcgtgaccgtgtctagtacgcgtgagcagaaactgatctcggaagaggatctggggagcggcatccagaaccctgatcctgccgtgtaccagctgcgggatagcaagagcagcgacaagagcgtgtgtctgttcaccgacttcgacagccagaccaacgtgtcccagagcaaggactccgacgtgtacatcaccgataagaccgtgctggacatgcggagcatggacttcaagagcaactccgccgtggcctggtccaacaagtccgatttcgcctgcgccaacgccttcaacaacagcattatccccgaggacacattcttcccaagccccgagagcagctgcggtacccagagttttgggttgttggaccctaaattgtgctatctgttggacggaatcctgttcatttacggagtgatcctgaccgcattgttcctgaagagaggccggaagaagctgctgtacatcttcaagcagcctttcatgcggcccgtgcagaccacccaggaagaggacggctgctcctgccggttccccgaggaagaagaaggcggctgcgagctgcgggttaagttttccagatccgcagacgcacccgcttaccaacaagggcagaaccaactctacaatgaacttaatttggggcggagggaagagtacgacgttctggacaaaaggaggggacgagatcccgagatgggcggaaagcctcagcgaaggaagaatccgcaagaggggctttataacgaactccagaaagataaaatggcagaagcctatagtgagattgggatgaagggagaaaggaggaggggtaaaggtcacgatgggttgtaccaaggattgagcacagccactaaagatacctatgatgcgctccacatgcaggccctgccgccaaga

SEQ ID NO: 6444 - DNA, 4059 bp, Artificial Sequence
  Synthetic Polynucloetide
atggccttaccagtgaccgccttgctcctgccgctggccttgctgctccacgccgccaggccggaggttcagctgcttgagtctggcggaggactggttcaacctggcggaagcctgagactgtcttgtgccgccagcggcttcacctttagcagctacgccatgagctgggtccgacaggctcctggcaaaggactggaatgggtgtccagcatcagcggcagcggcgactacatctactacgccgatagcgtgaagggcagattcaccatcagccgggacatcagcaagaacaccctgtacctccagatgaacagcctgagagccgaggacaccgccgtgtactactgtgccaaagaaggcaccggcgctaacagcagcctggccgattatagaggccagggcacactggtcaccgtgtctagtggcggaggaagcggcggaggatctgaagtgcaggttttggagtctggcggaggactggttcagcctggcggatctctgagactgtcttgtgccgccagcggcttcaccttcagcaactttgccatgagctgggtccgacaggcccctggcaaaggacttgaatgggtgtccacaatcagcggcagcgccggcacaacagattacgccgattctgtgaagggcagattcaccatcagccgggacaacagcaagaaaaccctgtacctccagatgaacagcctgcgcgtggaagataccgccgtgtactactgtgccgatggcagaggccccttcttcgattatcgcggccagggcacactggtcaccgtttcttctggtaccggcggaggcggatctggcggcggaggtagcggtggcggaggatctgaattcgacatccagatgacacagagccctagcagcctgtctgccagcgtgggagacagagtgaccatcacatgcaaggccagcgaccacatcaacaactggctggcctggtatcagcagaagcctggacaggcccctaagctgctgatctacggcgctaccacactggaaacaggcgtgcccagcagattttctggcagcggctctggcaccgactacaccctgacaatatccagcctccagcctgaggacttcgccacctactactgtcagcagagctggaacaccccttggacattcggccagggcaccaagctggaaatcaagagactcgagcagagcttcggcctgctggaccccaagctgtgctacctgctggatggcatcctgttcatctacggcgtgatcctgaccgccctgttcctgagagtgaagttcagcagaagcgccgacgcccctgcctaccagcagggacagaaccaactgtacaacgagctgaacctgggcagacgggaagagtacgacgtgctggacaagcggagaggcagggaccctgagatgggcggaaagccccagcggagaaagaacccccaggaaggactgtataacgaactccagaaagacaagatggccgaagcctacagcgagatcggcatgaagggcgagcggagaagaggcaagggccacgatggcctgtaccagggcctgagcaccgccaccaaggacacctatgacgccctgcacatgcaggccctgcctccaagaagggccaagcgatctggatctggagcaacaaacttctcactactcaaacaagcaggtgacgtggaggagaatcccgggcctactagtatggactggatttggcgcatccttttccttgtcggcgctgctaccggcgcccattcccaactgcaactgcaagagtctggccctggcctggtcaagccttctgaaaccctgagcctgacctgtaccgtgtccggcggctctatcagcagcggcgattactactggggctggatcagacagcctccaggcaagggactcgaatggatcggcagcatcagctacagcggctccacctactacaacccaagcctgaagtccagagtgaccatcagcgtggacaccagcagaaaccagttctccctgaagctgagcagcgtgacagccgccgatacagccgtgtattattgcaccagagaggacagcagcaactggcggagtagaggacagggcacactggtcacagtgtcctcttctggaggcggtggaagcggtggaggaggatctgaagtgcagctggttgaatctggcggaggactggttcaggctggcggatctctgagactgtcttgtgccgccagcggcagaacctttagcatgggctggtttagacaggcccctggcaaagagagagagttcgtcgccgccatcacatactctggcggcagcccttactacgccgactctgtgaagggcagattcaccatcagccgggacaacgccaagaacaccgtgtacctccagatgaacagcctgaagcctgaggacaccgccgtgtactactgcgccgccaatccaacatacggcagcgactggaacgccgagaattggggccagggaacccaagtgacagtgtctagcggatccggcggcggaggatctggcggaggcggatctgggggcggaggctctttcgaacaagttcagcttcaacagcctggcgctgagctggtcaaacctggcgcttctgtgaagatgagctgcaaagccagcggctacgccttcagcagctactggatcaactggatgaagcagaaacccggccagggactcgaatggatcggccaaatctatcccggcgacggcgacaccaactacaacggcaagttcaagggcagagccacactgaccgccgatacctctagcagcacagcctacatgcagctgagcagcctgaccagcgaagatagcgccgtgtacttctgtgcccggtccatcacaacagtcgtgggctgcgctatggactattggggccagggaacaagcgtgaccgtgtctagtacgcgtcagagttttgggttgttggaccctaaattgtgctatctgttggacggaatcctgttcatttacggagtgatcctgaccgcattgttcctgcgggttaagttttccagatccgcagacgcacccgcttaccaacaagggcagaaccaactctacaatgaacttaatttggggcggagggaagagtacgacgttctggacaaaaggaggggacgagatcccgagatgggcggaaagcctcagcgaaggaagaatccgcaagaggggctttataacgaactccagaaagataaaatggcagaagcctatagtgagattgggatgaagggagaaaggaggaggggtaaaggtcacgatgggttgtaccaaggattgagcacagccactaaagatacctatgatgcgctccacatgcaggccctgccgccaagacgcgccaagagaagcggatctggcgtgaagcagaccctgaatttcgacctgctgaagctggctggcgacgtggaatccaacccaggcccttctagaggccatatgaccgagtacaagcccacggtgcgcctcgccacccgcgacgacgtccccagggccgtacgcaccctcgccgccgcgttcgccgactaccccgccacgcgccacaccgtcgatccggaccgccacatcgagcgggtcaccgagctgcaagaactcttcctcacgcgcgtcgggctcgacatcggcaaggtgtgggtcgcggacgacggcgccgcggtggcggtctggaccacgccggagagcgtcgaagcgggggcggtgttcgccgagatcggcccgcgcatggccgagttgagcggttcccggctggccgcgcagcaacagatggaaggcctcctggcgccgcaccggcccaaggagcccgcgtggttcctggccaccgtcggcgtctcgcccgaccaccagggcaagggtctgggcagcgccgtcgtgctccccggagtggaggcggccgagcgcgccggggtgcccgccttcctggagacctccgcgccccgcaacctccccttctacgagcggctcggcttcaccgtcaccgccgacgtcgaggtgcccgaaggaccgcgcacctggtgcatgacccgcaagcccggtgcctga

SEQ ID NO: 6445 - DNA, 3531 bp, Artificial Sequence
  Synthetic Polynucloetide
atggccttaccagtgaccgccttgctcctgccgctggccttgctgctccacgccgccaggccggaggttcagctgcttgagtctggcggaggactggttcaacctggcggaagcctgagactgtcttgtgccgccagcggcttcacctttagcagctacgccatgagctgggtccgacaggctcctggcaaaggactggaatgggtgtccagcatcagcggcagcggcgactacatctactacgccgatagcgtgaagggcagattcaccatcagccgggacatcagcaagaacaccctgtacctccagatgaacagcctgagagccgaggacaccgccgtgtactactgtgccaaagaaggcaccggcgctaacagcagcctggccgattatagaggccagggcacactggtcaccgtgtctagtggcggaggaagcggcggaggatctgaagtgcaggttttggagtctggcggaggactggttcagcctggcggatctctgagactgtcttgtgccgccagcggcttcaccttcagcaactttgccatgagctgggtccgacaggcccctggcaaaggacttgaatgggtgtccacaatcagcggcagcgccggcacaacagattacgccgattctgtgaagggcagattcaccatcagccgggacaacagcaagaaaaccctgtacctccagatgaacagcctgcgcgtggaagataccgccgtgtactactgtgccgatggcagaggccccttcttcgattatcgcggccagggcacactggtcaccgtttcttctggtaccggcggaggcggatctggcggcggaggtagcggtggcggaggatctgaattcgacatccagatgacacagagccctagcagcctgtctgccagcgtgggagacagagtgaccatcacatgcaaggccagcgaccacatcaacaactggctggcctggtatcagcagaagcctggacaggcccctaagctgctgatctacggcgctaccacactggaaacaggcgtgcccagcagattttctggcagcggctctggcaccgactacaccctgacaatatccagcctccagcctgaggacttcgccacctactactgtcagcagagctggaacaccccttggacattcggccagggcaccaagctggaaatcaagagactcgagggacagcctaaggccaatcctaccgtgacactgttccctccaagcagcgaagaactccaggccaacaaggccacacttgtgtgcctgatctccgacttctaccctggggctgtgacagtggcttggaaggccgatggatctcctgtgaaagccggcgtggaaaccaccaagccatccaagcagagcaacaacaaatacgccgccagctcctacctgagcctgacacctgagcagtggaagtcccacagatcctacagctgccaagtgacccacgaaggcagcaccgtggaaaagacagtggcccctacagagtgcagccccatcaagaccgatgtgattacaatggaccccaaggacaactgctccaaggacgccaacgataccctgctgctccagctgaccaacaccagcgcctactacatgtacttgttgctgctgctgaagtccgtggtgtacttcgccatcatcacatgctgcctgctgcggagaaccgccttctgctgcaacggcgagaagtctagggccaagcgatctggatctggagcaacaaacttctcactactcaaacaagcaggtgacgtggaggagaatcccgggcctactagtatggactggatttggcgcatccttttccttgtcggcgctgctaccggcgcccattcccaactgcaactgcaagagtctggccctggcctggtcaagccttctgaaaccctgagcctgacctgtaccgtgtccggcggctctatcagcagcggcgattactactggggctggatcagacagcctccaggcaagggactcgaatggatcggcagcatcagctacagcggctccacctactacaacccaagcctgaagtccagagtgaccatcagcgtggacaccagcagaaaccagttctccctgaagctgagcagcgtgacagccgccgatacagccgtgtattattgcaccagagaggacagcagcaactggcggagtagaggacagggcacactggtcacagtgtcctcttctggaggcggtggaagcggtggaggaggatctgaagtgcagctggttgaatctggcggaggactggttcaggctggcggatctctgagactgtcttgtgccgccagcggcagaacctttagcatgggctggtttagacaggcccctggcaaagagagagagttcgtcgccgccatcacatactctggcggcagcccttactacgccgactctgtgaagggcagattcaccatcagccgggacaacgccaagaacaccgtgtacctccagatgaacagcctgaagcctgaggacaccgccgtgtactactgcgccgccaatccaacatacggcagcgactggaacgccgagaattggggccagggaacccaagtgacagtgtctagcggatccggcggcggaggatctggcggaggcggatctgggggcggaggctctttcgaacaagttcagcttcaacagcctggcgctgagctggtcaaacctggcgcttctgtgaagatgagctgcaaagccagcggctacgccttcagcagctactggatcaactggatgaagcagaaacccggccagggactcgaatggatcggccaaatctatcccggcgacggcgacaccaactacaacggcaagttcaagggcagagccacactgaccgccgatacctctagcagcacagcctacatgcagctgagcagcctgaccagcgaagatagcgccgtgtacttctgtgcccggtccatcacaacagtcgtgggctgcgctatggactattggggccagggaacaagcgtgaccgtgtctagtacgcgtgcctctacaaagggaccctccgtgtttcctctggctcccagcagcaagtctacaagcggaggaacagccgctctgggctgcctggtcaaggattactttcccgagcctgtgaccgtgtcctggaatagcggagcactgacaagcggcgtgcacacctttccagccgtgctgcaaagcagcggcctgtactctctgagcagcgtggtcacagtgcctagctctagcctgggcacccagacctacatctgcaatgtgaaccacaagcctagcaacaccaaggtggacaagagagtggaacccaagagctgtgaagtgaaaaccgactccaccgaccacgtgaagcccaaagagacagagaacaccaagcagcccagcaagagctgccacaagcccaaggccatcgtgcacaccgagaaagtgaacatgatgagcctgaccgtgctgggcctgcggatgctgttcgccaaaaccgtggccgtgaacttcctgctgaccgccaagctgttcttcctc

SEQ ID NO: 6446 - DNA, 3465 bp, Artificial Sequence
  Synthetic Polynucloetide
atggccttaccagtgaccgccttgctcctgccgctggccttgctgctccacgccgccaggccggaggttcagctgcttgagtctggcggaggactggttcaacctggcggaagcctgagactgtcttgtgccgccagcggcttcacctttagcagctacgccatgagctgggtccgacaggctcctggcaaaggactggaatgggtgtccagcatcagcggcagcggcgactacatctactacgccgatagcgtgaagggcagattcaccatcagccgggacatcagcaagaacaccctgtacctccagatgaacagcctgagagccgaggacaccgccgtgtactactgtgccaaagaaggcaccggcgctaacagcagcctggccgattatagaggccagggcacactggtcaccgtgtctagtggcggaggaagcggcggaggatctgaagtgcaggttttggagtctggcggaggactggttcagcctggcggatctctgagactgtcttgtgccgccagcggcttcaccttcagcaactttgccatgagctgggtccgacaggcccctggcaaaggacttgaatgggtgtccacaatcagcggcagcgccggcacaacagattacgccgattctgtgaagggcagattcaccatcagccgggacaacagcaagaaaaccctgtacctccagatgaacagcctgcgcgtggaagataccgccgtgtactactgtgccgatggcagaggccccttcttcgattatcgcggccagggcacactggtcaccgtttcttctggtaccggcggaggcggatctggcggcggaggtagcggtggcggaggatctgaattcgacatccagatgacacagagccctagcagcctgtctgccagcgtgggagacagagtgaccatcacatgcaaggccagcgaccacatcaacaactggctggcctggtatcagcagaagcctggacaggcccctaagctgctgatctacggcgctaccacactggaaacaggcgtgcccagcagattttctggcagcggctctggcaccgactacaccctgacaatatccagcctccagcctgaggacttcgccacctactactgtcagcagagctggaacaccccttggacattcggccagggcaccaagctggaaatcaagagactcgagggacagcctaaggccaatcctaccgtgacactgttccctccaagcagcgaagaactccaggccaacaaggccacacttgtgtgcctgatctccgacttctaccctggggctgtgacagtggcttggaaggccgatggatctcctgtgaaagccggcgtggaaaccaccaagccatccaagcagagcaacaacaaatacgccgccagctcctacctgagcctgacacctgagcagtggaagtcccacagatcctacagctgccaagtgacccacgaaggcagcaccgtggaaaagacagtggcccctacagagtgcagcggcagagccgattgcggcatcaccagcgccagctaccaccagggcgtgctgagcgccaccatcctgtacgagatcctgctgggcaaggccaccctgtacgccgtgctggtgtctgccctggtgctgatggctatggtcaagcggaaggacagccggggaagggccaagcgatctggatctggagcaacaaacttctcactactcaaacaagcaggtgacgtggaggagaatcccgggcctactagtatggactggatttggcgcatccttttccttgtcggcgctgctaccggcgcccattcccaactgcaactgcaagagtctggccctggcctggtcaagccttctgaaaccctgagcctgacctgtaccgtgtccggcggctctatcagcagcggcgattactactggggctggatcagacagcctccaggcaagggactcgaatggatcggcagcatcagctacagcggctccacctactacaacccaagcctgaagtccagagtgaccatcagcgtggacaccagcagaaaccagttctccctgaagctgagcagcgtgacagccgccgatacagccgtgtattattgcaccagagaggacagcagcaactggcggagtagaggacagggcacactggtcacagtgtcctcttctggaggcggtggaagcggtggaggaggatctgaagtgcagctggttgaatctggcggaggactggttcaggctggcggatctctgagactgtcttgtgccgccagcggcagaacctttagcatgggctggtttagacaggcccctggcaaagagagagagttcgtcgccgccatcacatactctggcggcagcccttactacgccgactctgtgaagggcagattcaccatcagccgggacaacgccaagaacaccgtgtacctccagatgaacagcctgaagcctgaggacaccgccgtgtactactgcgccgccaatccaacatacggcagcgactggaacgccgagaattggggccagggaacccaagtgacagtgtctagcggatccggcggcggaggatctggcggaggcggatctgggggcggaggctctttcgaacaagttcagcttcaacagcctggcgctgagctggtcaaacctggcgcttctgtgaagatgagctgcaaagccagcggctacgccttcagcagctactggatcaactggatgaagcagaaacccggccagggactcgaatggatcggccaaatctatcccggcgacggcgacaccaactacaacggcaagttcaagggcagagccacactgaccgccgatacctctagcagcacagcctacatgcagctgagcagcctgaccagcgaagatagcgccgtgtacttctgtgcccggtccatcacaacagtcgtgggctgcgctatggactattggggccagggaacaagcgtgaccgtgtctagtacgcgtgcctctacaaagggaccctccgtgtttcctctggctcccagcagcaagtctacaagcggaggaacagccgctctgggctgcctggtcaaggattactttcccgagcctgtgaccgtgtcctggaatagcggagcactgacaagcggcgtgcacacctttccagccgtgctgcaaagcagcggcctgtactctctgagcagcgtggtcacagtgcctagctctagcctgggcacccagacctacatctgcaatgtgaaccacaagcctagcaacaccaaggtggacaagagagtggaacccaagagctgtatccccgaggacacattcttcccaagcagcgacgtgccctgcgacgtgaagctggtggaaaagagcttcgagacagacaccaacctgaacttccagaacctgagcgtgatcggcttcagaatcctgctgctgaaagtggccggctttaacctgctgatgaccctgcggctgtggtccagc

SEQ ID NO: 6447 - DNA, 3465 bp, Artificial Sequence
  Synthetic Polynucloetide
atggccttaccagtgaccgccttgctcctgccgctggccttgctgctccacgccgccaggccggaggttcagctgcttgagtctggcggaggactggttcaacctggcggaagcctgagactgtcttgtgccgccagcggcttcacctttagcagctacgccatgagctgggtccgacaggctcctggcaaaggactggaatgggtgtccagcatcagcggcagcggcgactacatctactacgccgatagcgtgaagggcagattcaccatcagccgggacatcagcaagaacaccctgtacctccagatgaacagcctgagagccgaggacaccgccgtgtactactgtgccaaagaaggcaccggcgctaacagcagcctggccgattatagaggccagggcacactggtcaccgtgtctagtggcggaggaagcggcggaggatctgaagtgcaggttttggagtctggcggaggactggttcagcctggcggatctctgagactgtcttgtgccgccagcggcttcaccttcagcaactttgccatgagctgggtccgacaggcccctggcaaaggacttgaatgggtgtccacaatcagcggcagcgccggcacaacagattacgccgattctgtgaagggcagattcaccatcagccgggacaacagcaagaaaaccctgtacctccagatgaacagcctgcgcgtggaagataccgccgtgtactactgtgccgatggcagaggccccttcttcgattatcgcggccagggcacactggtcaccgtttcttctggtaccggcggaggcggatctggcggcggaggtagcggtggcggaggatctgaattcgacatccagatgacacagagccctagcagcctgtctgccagcgtgggagacagagtgaccatcacatgcaaggccagcgaccacatcaacaactggctggcctggtatcagcagaagcctggacaggcccctaagctgctgatctacggcgctaccacactggaaacaggcgtgcccagcagattttctggcagcggctctggcaccgactacaccctgacaatatccagcctccagcctgaggacttcgccacctactactgtcagcagagctggaacaccccttggacattcggccagggcaccaagctggaaatcaagagactcgagggacagcctaaggccaatcctaccgtgacactgttccctccaagcagcgaagaactccaggccaacaaggccacacttgtgtgcctgatctccgacttctaccctggggctgtgacagtggcttggaaggccgatggatctcctgtgaaagccggcgtggaaaccaccaagccatccaagcagagcaacaacaaatacgccgccagctcctacctgagcctgacacctgagcagtggaagtcccacagatcctacagctgccaagtgacccacgaaggcagcaccgtggaaaagacagtggcccctacagagtgcagcggcagagccgattgcggctttaccagcgagagctaccagcagggcgtgctgagcgccaccatcctgtacgagatcctgctgggcaaggccaccctgtacgccgtgctggtgtctgccctggtgctgatggctatggtcaagcggaaggacagccggggaagggccaagcgatctggatctggagcaacaaacttctcactactcaaacaagcaggtgacgtggaggagaatcccgggcctactagtatggactggatttggcgcatccttttccttgtcggcgctgctaccggcgcccattcccaactgcaactgcaagagtctggccctggcctggtcaagccttctgaaaccctgagcctgacctgtaccgtgtccggcggctctatcagcagcggcgattactactggggctggatcagacagcctccaggcaagggactcgaatggatcggcagcatcagctacagcggctccacctactacaacccaagcctgaagtccagagtgaccatcagcgtggacaccagcagaaaccagttctccctgaagctgagcagcgtgacagccgccgatacagccgtgtattattgcaccagagaggacagcagcaactggcggagtagaggacagggcacactggtcacagtgtcctcttctggaggcggtggaagcggtggaggaggatctgaagtgcagctggttgaatctggcggaggactggttcaggctggcggatctctgagactgtcttgtgccgccagcggcagaacctttagcatgggctggtttagacaggcccctggcaaagagagagagttcgtcgccgccatcacatactctggcggcagcccttactacgccgactctgtgaagggcagattcaccatcagccgggacaacgccaagaacaccgtgtacctccagatgaacagcctgaagcctgaggacaccgccgtgtactactgcgccgccaatccaacatacggcagcgactggaacgccgagaattggggccagggaacccaagtgacagtgtctagcggatccggcggcggaggatctggcggaggcggatctgggggcggaggctctttcgaacaagttcagcttcaacagcctggcgctgagctggtcaaacctggcgcttctgtgaagatgagctgcaaagccagcggctacgccttcagcagctactggatcaactggatgaagcagaaacccggccagggactcgaatggatcggccaaatctatcccggcgacggcgacaccaactacaacggcaagttcaagggcagagccacactgaccgccgatacctctagcagcacagcctacatgcagctgagcagcctgaccagcgaagatagcgccgtgtacttctgtgcccggtccatcacaacagtcgtgggctgcgctatggactattggggccagggaacaagcgtgaccgtgtctagtacgcgtgcctctacaaagggaccctccgtgtttcctctggctcccagcagcaagtctacaagcggaggaacagccgctctgggctgcctggtcaaggattactttcccgagcctgtgaccgtgtcctggaatagcggagcactgacaagcggcgtgcacacctttccagccgtgctgcaaagcagcggcctgtactctctgagcagcgtggtcacagtgcctagctctagcctgggcacccagacctacatctgcaatgtgaaccacaagcctagcaacaccaaggtggacaagagagtggaacccaagagctgtatccccgaggacacattcttcccaagccccgagagcagctgcgacgtgaagctggtggaaaagagcttcgagacagacaccaacctgaacttccagaacctgagcgtgatcggcttcagaatcctgctgctgaaagtggccggctttaacctgctgatgaccctgcggctgtggtccagc

SEQ ID NO: 6448 - DNA, 3366 bp, Artificial Sequence
  Synthetic Polynucloetide
atggccttaccagtgaccgccttgctcctgccgctggccttgctgctccacgccgccaggccggaggttcagctgcttgagtctggcggaggactggttcaacctggcggaagcctgagactgtcttgtgccgccagcggcttcacctttagcagctacgccatgagctgggtccgacaggctcctggcaaaggactggaatgggtgtccagcatcagcggcagcggcgactacatctactacgccgatagcgtgaagggcagattcaccatcagccgggacatcagcaagaacaccctgtacctccagatgaacagcctgagagccgaggacaccgccgtgtactactgtgccaaagaaggcaccggcgctaacagcagcctggccgattatagaggccagggcacactggtcaccgtgtctagtggcggaggaagcggcggaggatctgaagtgcaggttttggagtctggcggaggactggttcagcctggcggatctctgagactgtcttgtgccgccagcggcttcaccttcagcaactttgccatgagctgggtccgacaggcccctggcaaaggacttgaatgggtgtccacaatcagcggcagcgccggcacaacagattacgccgattctgtgaagggcagattcaccatcagccgggacaacagcaagaaaaccctgtacctccagatgaacagcctgcgcgtggaagataccgccgtgtactactgtgccgatggcagaggccccttcttcgattatcgcggccagggcacactggtcaccgtttcttctctcgagggacagcctaaggccaatcctaccgtgacactgttccctccaagcagcgaagaactccaggccaacaaggccacacttgtgtgcctgatctccgacttctaccctggggctgtgacagtggcttggaaggccgatggatctcctgtgaaagccggcgtggaaaccaccaagccatccaagcagagcaacaacaaatacgccgccagctcctacctgagcctgacacctgagcagtggaagtcccacagatcctacagctgccaagtgacccacgaaggcagcaccgtggaaaagacagtggcccctacagagtgcagcggcagagccgattgcggctttaccagcgagagctaccagcagggcgtgctgagcgccaccatcctgtacgagatcctgctgggcaaggccaccctgtacgccgtgctggtgtctgccctggtgctgatggctatggtcaagcggaaggacagccggggaagggccaagcgatctggatctggagcaacaaacttctcactactcaaacaagcaggtgacgtggaggagaatcccgggcctactagtatggactggatttggcgcatccttttccttgtcggcgctgctaccggcgcgcattcccaactgcaactgcaagagtctggccctggcctggtcaagccttctgaaaccctgagcctgacctgtaccgtgtccggcggctctatcagcagcggcgattactactggggctggatcagacagcctccaggcaagggactcgaatggatcggcagcatcagctacagcggctccacctactacaacccaagcctgaagtccagagtgaccatcagcgtggacaccagcagaaaccagttctccctgaagctgagcagcgtgacagccgccgatacagccgtgtattattgcaccagagaggacagcagcaactggcggagtagaggacagggcacactggtcacagtgtcctcttctggaggcggtggaagcggtggaggaggatctgaagtgcagctggttgaatctggcggaggactggttcaggctggcggatctctgagactgtcttgtgccgccagcggcagaacctttagcatgggctggtttagacaggcccctggcaaagagagagagttcgtcgccgccatcacatactctggcggcagcccttactacgccgactctgtgaagggcagattcaccatcagccgggacaacgccaagaacaccgtgtacctccagatgaacagcctgaagcctgaggacaccgccgtgtactactgcgccgccaatccaacatacggcagcgactggaacgccgagaattggggccagggaacccaagtgacagtgtctagcacgcgtgcctctacaaagggaccctccgtgtttcctctggctcccagcagcaagtctacaagcggaggaacagccgctctgggctgcctggtcaaggattactttcccgagcctgtgaccgtgtcctggaatagcggagcactgacaagcggcgtgcacacctttccagccgtgctgcaaagcagcggcctgtactctctgagcagcgtggtcacagtgcctagctctagcctgggcacccagacctacatctgcaatgtgaaccacaagcctagcaacaccaaggtggacaagagagtggaacccaagagctgtatccccgaggacacattcttcccaagccccgagagcagctgcgacgtgaagctggtggaaaagagcttcgagacagacaccaacctgaacttccagaacctgagcgtgatcggcttcagaatcctgctgctgaaagtggccggctttaacctgctgatgaccctgcggctgtggtccagccgcgccaagagaagcggatctggcgtgaagcagaccctgaatttcgacctgctgaagctggctggcgacgtggaatccaacccaggcccttctagaggccatatgaccgagtacaagcccacggtgcgcctcgccacccgcgacgacgtccccagggccgtacgcaccctcgccgccgcgttcgccgactaccccgccacgcgccacaccgtcgatccggaccgccacatcgagcgggtcaccgagctgcaagaactcttcctcacgcgcgtcgggctcgacatcggcaaggtgtgggtcgcggacgacggcgccgcggtggcggtctggaccacgccggagagcgtcgaagcgggggcggtgttcgccgagatcggcccgcgcatggccgagttgagcggttcccggctggccgcgcagcaacagatggaaggcctcctggcgccgcaccggcccaaggagcccgcgtggttcctggccaccgtcggcgtctcgcccgaccaccagggcaagggtctgggcagcgccgtcgtgctccccggagtggaggcggccgagcgcgccggggtgcccgccttcctggagacctccgcgccccgcaacctccccttctacgagcggctcggcttcaccgtcaccgccgacgtcgaggtgcccgaaggaccgcgcacctggtgcatgacccgcaagcccggtgcctga

SEQ ID NO: 6449 - DNA, 2664 bp, Artificial Sequence
  Synthetic Polynucloetide
atggccttaccagtgaccgccttgctcctgccgctggccttgctgctccacgccgccaggccggaggttcagctgcttgagtctggcggaggactggttcaacctggcggaagcctgagactgtcttgtgccgccagcggcttcacctttagcagctacgccatgagctgggtccgacaggctcctggcaaaggactggaatgggtgtccagcatcagcggcagcggcgactacatctactacgccgatagcgtgaagggcagattcaccatcagccgggacatcagcaagaacaccctgtacctccagatgaacagcctgagagccgaggacaccgccgtgtactactgtgccaaagaaggcaccggcgctaacagcagcctggccgattatagaggccagggcacactggtcaccgtgtctagtggcggaggaagcggcggaggatctgaagtgcaggttttggagtctggcggaggactggttcagcctggcggatctctgagactgtcttgtgccgccagcggcttcaccttcagcaactttgccatgagctgggtccgacaggcccctggcaaaggacttgaatgggtgtccacaatcagcggcagcgccggcacaacagattacgccgattctgtgaagggcagattcaccatcagccgggacaacagcaagaaaaccctgtacctccagatgaacagcctgcgcgtggaagataccgccgtgtactactgtgccgatggcagaggccccttcttcgattatcgcggccagggcacactggtcaccgtttcttctctcgagggacagcctaaggccaatcctaccgtgacactgttccctccaagcagcgaagaactccaggccaacaaggccacacttgtgtgcctgatctccgacttctaccctggggctgtgacagtggcttggaaggccgatggatctcctgtgaaagccggcgtggaaaccaccaagccatccaagcagagcaacaacaaatacgccgccagctcctacctgagcctgacacctgagcagtggaagtcccacagatcctacagctgccaagtgacccacgaaggcagcaccgtggaaaagacagtggcccctacagagtgcagcggcagagccgattgcggctttaccagcgagagctaccagcagggcgtgctgagcgccaccatcctgtacgagatcctgctgggcaaggccaccctgtacgccgtgctggtgtctgccctggtgctgatggctatggtcaagcggaaggacagccggggaagggccaagcgatctggatctggagcaacaaacttctcactactcaaacaagcaggtgacgtggaggagaatcccgggcctactagtatggactggatttggcgcatccttttccttgtcggcgctgctaccggcgcgcattcccaactgcaactgcaagagtctggccctggcctggtcaagccttctgaaaccctgagcctgacctgtaccgtgtccggcggctctatcagcagcggcgattactactggggctggatcagacagcctccaggcaagggactcgaatggatcggcagcatcagctacagcggctccacctactacaacccaagcctgaagtccagagtgaccatcagcgtggacaccagcagaaaccagttctccctgaagctgagcagcgtgacagccgccgatacagccgtgtattattgcaccagagaggacagcagcaactggcggagtagaggacagggcacactggtcacagtgtcctcttctggaggcggtggaagcggtggaggaggatctgaagtgcagctggttgaatctggcggaggactggttcaggctggcggatctctgagactgtcttgtgccgccagcggcagaacctttagcatgggctggtttagacaggcccctggcaaagagagagagttcgtcgccgccatcacatactctggcggcagcccttactacgccgactctgtgaagggcagattcaccatcagccgggacaacgccaagaacaccgtgtacctccagatgaacagcctgaagcctgaggacaccgccgtgtactactgcgccgccaatccaacatacggcagcgactggaacgccgagaattggggccagggaacccaagtgacagtgtctagcacgcgtgcctctacaaagggaccctccgtgtttcctctggctcccagcagcaagtctacaagcggaggaacagccgctctgggctgcctggtcaaggattactttcccgagcctgtgaccgtgtcctggaatagcggagcactgacaagcggcgtgcacacctttccagccgtgctgcaaagcagcggcctgtactctctgagcagcgtggtcacagtgcctagctctagcctgggcacccagacctacatctgcaatgtgaaccacaagcctagcaacaccaaggtggacaagagagtggaacccaagagctgtatccccgaggacacattcttcccaagccccgagagcagctgcgacgtgaagctggtggaaaagagcttcgagacagacaccaacctgaacttccagaacctgagcgtgatcggcttcagaatcctgctgctgaaagtggccggctttaacctgctgatgaccctgcggctgtggtccagc

SEQ ID NO: 6450 - DNA, 2751 bp, Artificial Sequence
  Synthetic Polynucloetide
atggccttaccagtgaccgccttgctcctgccgctggccttgctgctccacgccgccaggccggaggttcagctgcttgagtctggcggaggactggttcaacctggcggaagcctgagactgtcttgtgccgccagcggcttcacctttagcagctacgccatgagctgggtccgacaggctcctggcaaaggactggaatgggtgtccagcatcagcggcagcggcgactacatctactacgccgatagcgtgaagggcagattcaccatcagccgggacatcagcaagaacaccctgtacctccagatgaacagcctgagagccgaggacaccgccgtgtactactgtgccaaagaaggcaccggcgctaacagcagcctggccgattatagaggccagggcacactggtcaccgtgtctagtggcggaggaagcggcggaggatctgaagtgcaggttttggagtctggcggaggactggttcagcctggcggatctctgagactgtcttgtgccgccagcggcttcaccttcagcaactttgccatgagctgggtccgacaggcccctggcaaaggacttgaatgggtgtccacaatcagcggcagcgccggcacaacagattacgccgattctgtgaagggcagattcaccatcagccgggacaacagcaagaaaaccctgtacctccagatgaacagcctgcgcgtggaagataccgccgtgtactactgtgccgatggcagaggccccttcttcgattatcgcggccagggcacactggtcaccgtttcttctctcgagggatctggcagagccgattgcggctttaccagcgagagctaccagcagggcgtgctgagcgccaccatcctgtacgagatcctgctgggcaaggccaccctgtacgccgtgctggtgtctgccctggtgctgatggctatggtcaagcggaaggacagccggggaagggccaagcgatctggatctggagcaacaaacttctcactactcaaacaagcaggtgacgtggaggagaatcccgggcctactagtatggactggatttggcgcatccttttccttgtcggcgctgctaccggcgcgcattcccaactgcaactgcaagagtctggccctggcctggtcaagccttctgaaaccctgagcctgacctgtaccgtgtccggcggctctatcagcagcggcgattactactggggctggatcagacagcctccaggcaagggactcgaatggatcggcagcatcagctacagcggctccacctactacaacccaagcctgaagtccagagtgaccatcagcgtggacaccagcagaaaccagttctccctgaagctgagcagcgtgacagccgccgatacagccgtgtattattgcaccagagaggacagcagcaactggcggagtagaggacagggcacactggtcacagtgtcctcttctggaggcggtggaagcggtggaggaggatctgaagtgcagctggttgaatctggcggaggactggttcaggctggcggatctctgagactgtcttgtgccgccagcggcagaacctttagcatgggctggtttagacaggcccctggcaaagagagagagttcgtcgccgccatcacatactctggcggcagcccttactacgccgactctgtgaagggcagattcaccatcagccgggacaacgccaagaacaccgtgtacctccagatgaacagcctgaagcctgaggacaccgccgtgtactactgcgccgccaatccaacatacggcagcgactggaacgccgagaattggggccagggaacccaagtgacagtgtctagcacgcgtggcagcatccccgaggacacattcttcccaagccccgagagcagctgcgacgtgaagctggtggaaaagagcttcgagacagacaccaacctgaacttccagaacctgagcgtgatcggcttcagaatcctgctgctgaaagtggccggctttaacctgctgatgaccctgcggctgtggtccagccgcgccaagagaagcggatctggcgtgaagcagaccctgaatttcgacctgctgaagctggctggcgacgtggaatccaacccaggcccttctagaggccatatgaccgagtacaagcccacggtgcgcctcgccacccgcgacgacgtccccagggccgtacgcaccctcgccgccgcgttcgccgactaccccgccacgcgccacaccgtcgatccggaccgccacatcgagcgggtcaccgagctgcaagaactcttcctcacgcgcgtcgggctcgacatcggcaaggtgtgggtcgcggacgacggcgccgcggtggcggtctggaccacgccggagagcgtcgaagcgggggcggtgttcgccgagatcggcccgcgcatggccgagttgagcggttcccggctggccgcgcagcaacagatggaaggcctcctggcgccgcaccggcccaaggagcccgcgtggttcctggccaccgtcggcgtctcgcccgaccaccagggcaagggtctgggcagcgccgtcgtgctccccggagtggaggcggccgagcgcgccggggtgcccgccttcctggagacctccgcgccccgcaacctccccttctacgagcggctcggcttcaccgtcaccgccgacgtcgaggtgcccgaaggaccgcgcacctggtgcatgacccgcaagcccggtgcctga

SEQ ID NO: 6451 - DNA, 2049 bp, Artificial Sequence
  Synthetic Polynucloetide
atggccttaccagtgaccgccttgctcctgccgctggccttgctgctccacgccgccaggccggaggttcagctgcttgagtctggcggaggactggttcaacctggcggaagcctgagactgtcttgtgccgccagcggcttcacctttagcagctacgccatgagctgggtccgacaggctcctggcaaaggactggaatgggtgtccagcatcagcggcagcggcgactacatctactacgccgatagcgtgaagggcagattcaccatcagccgggacatcagcaagaacaccctgtacctccagatgaacagcctgagagccgaggacaccgccgtgtactactgtgccaaagaaggcaccggcgctaacagcagcctggccgattatagaggccagggcacactggtcaccgtgtctagtggcggaggaagcggcggaggatctgaagtgcaggttttggagtctggcggaggactggttcagcctggcggatctctgagactgtcttgtgccgccagcggcttcaccttcagcaactttgccatgagctgggtccgacaggcccctggcaaaggacttgaatgggtgtccacaatcagcggcagcgccggcacaacagattacgccgattctgtgaagggcagattcaccatcagccgggacaacagcaagaaaaccctgtacctccagatgaacagcctgcgcgtggaagataccgccgtgtactactgtgccgatggcagaggccccttcttcgattatcgcggccagggcacactggtcaccgtttcttctctcgagggatctggcagagccgattgcggctttaccagcgagagctaccagcagggcgtgctgagcgccaccatcctgtacgagatcctgctgggcaaggccaccctgtacgccgtgctggtgtctgccctggtgctgatggctatggtcaagcggaaggacagccggggaagggccaagcgatctggatctggagcaacaaacttctcactactcaaacaagcaggtgacgtggaggagaatcccgggcctactagtatggactggatttggcgcatccttttccttgtcggcgctgctaccggcgcgcattcccaactgcaactgcaagagtctggccctggcctggtcaagccttctgaaaccctgagcctgacctgtaccgtgtccggcggctctatcagcagcggcgattactactggggctggatcagacagcctccaggcaagggactcgaatggatcggcagcatcagctacagcggctccacctactacaacccaagcctgaagtccagagtgaccatcagcgtggacaccagcagaaaccagttctccctgaagctgagcagcgtgacagccgccgatacagccgtgtattattgcaccagagaggacagcagcaactggcggagtagaggacagggcacactggtcacagtgtcctcttctggaggcggtggaagcggtggaggaggatctgaagtgcagctggttgaatctggcggaggactggttcaggctggcggatctctgagactgtcttgtgccgccagcggcagaacctttagcatgggctggtttagacaggcccctggcaaagagagagagttcgtcgccgccatcacatactctggcggcagcccttactacgccgactctgtgaagggcagattcaccatcagccgggacaacgccaagaacaccgtgtacctccagatgaacagcctgaagcctgaggacaccgccgtgtactactgcgccgccaatccaacatacggcagcgactggaacgccgagaattggggccagggaacccaagtgacagtgtctagcacgcgtggcagcatccccgaggacacattcttcccaagccccgagagcagctgcgacgtgaagctggtggaaaagagcttcgagacagacaccaacctgaacttccagaacctgagcgtgatcggcttcagaatcctgctgctgaaagtggccggctttaacctgctgatgaccctgcggctgtggtccagc

SEQ ID NO: 6452 - DNA, 2778 bp, Artificial Sequence
  Synthetic Polynucloetide
atggccttaccagtgaccgccttgctcctgccgctggccttgctgctccacgccgccaggccggaggttcagctgcttgagtctggcggaggactggttcaacctggcggaagcctgagactgtcttgtgccgccagcggcttcacctttagcagctacgccatgagctgggtccgacaggctcctggcaaaggactggaatgggtgtccagcatcagcggcagcggcgactacatctactacgccgatagcgtgaagggcagattcaccatcagccgggacatcagcaagaacaccctgtacctccagatgaacagcctgagagccgaggacaccgccgtgtactactgtgccaaagaaggcaccggcgctaacagcagcctggccgattatagaggccagggcacactggtcaccgtgtctagtggcggaggaagcggcggaggatctgaagtgcaggttttggagtctggcggaggactggttcagcctggcggatctctgagactgtcttgtgccgccagcggcttcaccttcagcaactttgccatgagctgggtccgacaggcccctggcaaaggacttgaatgggtgtccacaatcagcggcagcgccggcacaacagattacgccgattctgtgaagggcagattcaccatcagccgggacaacagcaagaaaaccctgtacctccagatgaacagcctgcgcgtggaagataccgccgtgtactactgtgccgatggcagaggccccttcttcgattatcgcggccagggcacactggtcaccgtttcttctctcgaggacaaaactcacacatgcccaccgtgcccagcaggcagagccgattgcggctttaccagcgagagctaccagcagggcgtgctgagcgccaccatcctgtacgagatcctgctgggcaaggccaccctgtacgccgtgctggtgtctgccctggtgctgatggctatggtcaagcggaaggacagccggggaagggccaagcgatctggatctggagcaacaaacttctcactactcaaacaagcaggtgacgtggaggagaatcccgggcctactagtatggactggatttggcgcatccttttccttgtcggcgctgctaccggcgcgcattcccaactgcaactgcaagagtctggccctggcctggtcaagccttctgaaaccctgagcctgacctgtaccgtgtccggcggctctatcagcagcggcgattactactggggctggatcagacagcctccaggcaagggactcgaatggatcggcagcatcagctacagcggctccacctactacaacccaagcctgaagtccagagtgaccatcagcgtggacaccagcagaaaccagttctccctgaagctgagcagcgtgacagccgccgatacagccgtgtattattgcaccagagaggacagcagcaactggcggagtagaggacagggcacactggtcacagtgtcctcttctggaggcggtggaagcggtggaggaggatctgaagtgcagctggttgaatctggcggaggactggttcaggctggcggatctctgagactgtcttgtgccgccagcggcagaacctttagcatgggctggtttagacaggcccctggcaaagagagagagttcgtcgccgccatcacatactctggcggcagcccttactacgccgactctgtgaagggcagattcaccatcagccgggacaacgccaagaacaccgtgtacctccagatgaacagcctgaagcctgaggacaccgccgtgtactactgcgccgccaatccaacatacggcagcgactggaacgccgagaattggggccagggaacccaagtgacagtgtctagcacgcgtggcagcatccccgaggacacattcttcccaagccccgagagcagctgcgacgtgaagctggtggaaaagagcttcgagacagacaccaacctgaacttccagaacctgagcgtgatcggcttcagaatcctgctgctgaaagtggccggctttaacctgctgatgaccctgcggctgtggtccagccgcgccaagagaagcggatctggcgtgaagcagaccctgaatttcgacctgctgaagctggctggcgacgtggaatccaacccaggcccttctagaggccatatgaccgagtacaagcccacggtgcgcctcgccacccgcgacgacgtccccagggccgtacgcaccctcgccgccgcgttcgccgactaccccgccacgcgccacaccgtcgatccggaccgccacatcgagcgggtcaccgagctgcaagaactcttcctcacgcgcgtcgggctcgacatcggcaaggtgtgggtcgcggacgacggcgccgcggtggcggtctggaccacgccggagagcgtcgaagcgggggcggtgttcgccgagatcggcccgcgcatggccgagttgagcggttcccggctggccgcgcagcaacagatggaaggcctcctggcgccgcaccggcccaaggagcccgcgtggttcctggccaccgtcggcgtctcgcccgaccaccagggcaagggtctgggcagcgccgtcgtgctccccggagtggaggcggccgagcgcgccggggtgcccgccttcctggagacctccgcgccccgcaacctccccttctacgagcggctcggcttcaccgtcaccgccgacgtcgaggtgcccgaaggaccgcgcacctggtgcatgacccgcaagcccggtgcctga

SEQ ID NO: 6453 - DNA, 2778 bp, Artificial Sequence
  Synthetic Polynucloetide
atggccttaccagtgaccgccttgctcctgccgctggccttgctgctccacgccgccaggccggaggttcagctgcttgagtctggcggaggactggttcaacctggcggaagcctgagactgtcttgtgccgccagcggcttcacctttagcagctacgccatgagctgggtccgacaggctcctggcaaaggactggaatgggtgtccagcatcagcggcagcggcgactacatctactacgccgatagcgtgaagggcagattcaccatcagccgggacatcagcaagaacaccctgtacctccagatgaacagcctgagagccgaggacaccgccgtgtactactgtgccaaagaaggcaccggcgctaacagcagcctggccgattatagaggccagggcacactggtcaccgtgtctagtggcggaggaagcggcggaggatctgaagtgcaggttttggagtctggcggaggactggttcagcctggcggatctctgagactgtcttgtgccgccagcggcttcaccttcagcaactttgccatgagctgggtccgacaggcccctggcaaaggacttgaatgggtgtccacaatcagcggcagcgccggcacaacagattacgccgattctgtgaagggcagattcaccatcagccgggacaacagcaagaaaaccctgtacctccagatgaacagcctgcgcgtggaagataccgccgtgtactactgtgccgatggcagaggccccttcttcgattatcgcggccagggcacactggtcaccgtttcttctctcgagggatctggcagagccgattgcggctttaccagcgagagctaccagcagggcgtgctgagcgccaccatcctgtacgagatcctgctgggcaaggccaccctgtacgccgtgctggtgtctgccctggtgctgatggctatggtcaagcggaaggacagccggggaagggccaagcgatctggatctggagcaacaaacttctcactactcaaacaagcaggtgacgtggaggagaatcccgggcctactagtatggactggatttggcgcatccttttccttgtcggcgctgctaccggcgcgcattcccaactgcaactgcaagagtctggccctggcctggtcaagccttctgaaaccctgagcctgacctgtaccgtgtccggcggctctatcagcagcggcgattactactggggctggatcagacagcctccaggcaagggactcgaatggatcggcagcatcagctacagcggctccacctactacaacccaagcctgaagtccagagtgaccatcagcgtggacaccagcagaaaccagttctccctgaagctgagcagcgtgacagccgccgatacagccgtgtattattgcaccagagaggacagcagcaactggcggagtagaggacagggcacactggtcacagtgtcctcttctggaggcggtggaagcggtggaggaggatctgaagtgcagctggttgaatctggcggaggactggttcaggctggcggatctctgagactgtcttgtgccgccagcggcagaacctttagcatgggctggtttagacaggcccctggcaaagagagagagttcgtcgccgccatcacatactctggcggcagcccttactacgccgactctgtgaagggcagattcaccatcagccgggacaacgccaagaacaccgtgtacctccagatgaacagcctgaagcctgaggacaccgccgtgtactactgcgccgccaatccaacatacggcagcgactggaacgccgagaattggggccagggaacccaagtgacagtgtctagcacgcgtgataaaactcatacctgtccgccatgcccggcaatccccgaggacacattcttcccaagccccgagagcagctgcgacgtgaagctggtggaaaagagcttcgagacagacaccaacctgaacttccagaacctgagcgtgatcggcttcagaatcctgctgctgaaagtggccggctttaacctgctgatgaccctgcggctgtggtccagccgcgccaagagaagcggatctggcgtgaagcagaccctgaatttcgacctgctgaagctggctggcgacgtggaatccaacccaggcccttctagaggccatatgaccgagtacaagcccacggtgcgcctcgccacccgcgacgacgtccccagggccgtacgcaccctcgccgccgcgttcgccgactaccccgccacgcgccacaccgtcgatccggaccgccacatcgagcgggtcaccgagctgcaagaactcttcctcacgcgcgtcgggctcgacatcggcaaggtgtgggtcgcggacgacggcgccgcggtggcggtctggaccacgccggagagcgtcgaagcgggggcggtgttcgccgagatcggcccgcgcatggccgagttgagcggttcccggctggccgcgcagcaacagatggaaggcctcctggcgccgcaccggcccaaggagcccgcgtggttcctggccaccgtcggcgtctcgcccgaccaccagggcaagggtctgggcagcgccgtcgtgctccccggagtggaggcggccgagcgcgccggggtgcccgccttcctggagacctccgcgccccgcaacctccccttctacgagcggctcggcttcaccgtcaccgccgacgtcgaggtgcccgaaggaccgcgcacctggtgcatgacccgcaagcccggtgcctga

SEQ ID NO: 6454 - DNA, 2805 bp, Artificial Sequence
  Synthetic Polynucloetide
atggccttaccagtgaccgccttgctcctgccgctggccttgctgctccacgccgccaggccggaggttcagctgcttgagtctggcggaggactggttcaacctggcggaagcctgagactgtcttgtgccgccagcggcttcacctttagcagctacgccatgagctgggtccgacaggctcctggcaaaggactggaatgggtgtccagcatcagcggcagcggcgactacatctactacgccgatagcgtgaagggcagattcaccatcagccgggacatcagcaagaacaccctgtacctccagatgaacagcctgagagccgaggacaccgccgtgtactactgtgccaaagaaggcaccggcgctaacagcagcctggccgattatagaggccagggcacactggtcaccgtgtctagtggcggaggaagcggcggaggatctgaagtgcaggttttggagtctggcggaggactggttcagcctggcggatctctgagactgtcttgtgccgccagcggcttcaccttcagcaactttgccatgagctgggtccgacaggcccctggcaaaggacttgaatgggtgtccacaatcagcggcagcgccggcacaacagattacgccgattctgtgaagggcagattcaccatcagccgggacaacagcaagaaaaccctgtacctccagatgaacagcctgcgcgtggaagataccgccgtgtactactgtgccgatggcagaggccccttcttcgattatcgcggccagggcacactggtcaccgtttcttctctcgaggacaaaactcacacatgcccaccgtgcccagcaggcagagccgattgcggctttaccagcgagagctaccagcagggcgtgctgagcgccaccatcctgtacgagatcctgctgggcaaggccaccctgtacgccgtgctggtgtctgccctggtgctgatggctatggtcaagcggaaggacagccggggaagggccaagcgatctggatctggagcaacaaacttctcactactcaaacaagcaggtgacgtggaggagaatcccgggcctactagtatggactggatttggcgcatccttttccttgtcggcgctgctaccggcgcgcattcccaactgcaactgcaagagtctggccctggcctggtcaagccttctgaaaccctgagcctgacctgtaccgtgtccggcggctctatcagcagcggcgattactactggggctggatcagacagcctccaggcaagggactcgaatggatcggcagcatcagctacagcggctccacctactacaacccaagcctgaagtccagagtgaccatcagcgtggacaccagcagaaaccagttctccctgaagctgagcagcgtgacagccgccgatacagccgtgtattattgcaccagagaggacagcagcaactggcggagtagaggacagggcacactggtcacagtgtcctcttctggaggcggtggaagcggtggaggaggatctgaagtgcagctggttgaatctggcggaggactggttcaggctggcggatctctgagactgtcttgtgccgccagcggcagaacctttagcatgggctggtttagacaggcccctggcaaagagagagagttcgtcgccgccatcacatactctggcggcagcccttactacgccgactctgtgaagggcagattcaccatcagccgggacaacgccaagaacaccgtgtacctccagatgaacagcctgaagcctgaggacaccgccgtgtactactgcgccgccaatccaacatacggcagcgactggaacgccgagaattggggccagggaacccaagtgacagtgtctagcacgcgtgataaaactcatacctgtccgccatgcccggcaatccccgaggacacattcttcccaagccccgagagcagctgcgacgtgaagctggtggaaaagagcttcgagacagacaccaacctgaacttccagaacctgagcgtgatcggcttcagaatcctgctgctgaaagtggccggctttaacctgctgatgaccctgcggctgtggtccagccgcgccaagagaagcggatctggcgtgaagcagaccctgaatttcgacctgctgaagctggctggcgacgtggaatccaacccaggcccttctagaggccatatgaccgagtacaagcccacggtgcgcctcgccacccgcgacgacgtccccagggccgtacgcaccctcgccgccgcgttcgccgactaccccgccacgcgccacaccgtcgatccggaccgccacatcgagcgggtcaccgagctgcaagaactcttcctcacgcgcgtcgggctcgacatcggcaaggtgtgggtcgcggacgacggcgccgcggtggcggtctggaccacgccggagagcgtcgaagcgggggcggtgttcgccgagatcggcccgcgcatggccgagttgagcggttcccggctggccgcgcagcaacagatggaaggcctcctggcgccgcaccggcccaaggagcccgcgtggttcctggccaccgtcggcgtctcgcccgaccaccagggcaagggtctgggcagcgccgtcgtgctccccggagtggaggcggccgagcgcgccggggtgcccgccttcctggagacctccgcgccccgcaacctccccttctacgagcggctcggcttcaccgtcaccgccgacgtcgaggtgcccgaaggaccgcgcacctggtgcatgacccgcaagcccggtgcctga

SEQ ID NO: 6455 - DNA, 2103 bp, Artificial Sequence
  Synthetic Polynucloetide
atggccttaccagtgaccgccttgctcctgccgctggccttgctgctccacgccgccaggccggaggttcagctgcttgagtctggcggaggactggttcaacctggcggaagcctgagactgtcttgtgccgccagcggcttcacctttagcagctacgccatgagctgggtccgacaggctcctggcaaaggactggaatgggtgtccagcatcagcggcagcggcgactacatctactacgccgatagcgtgaagggcagattcaccatcagccgggacatcagcaagaacaccctgtacctccagatgaacagcctgagagccgaggacaccgccgtgtactactgtgccaaagaaggcaccggcgctaacagcagcctggccgattatagaggccagggcacactggtcaccgtgtctagtggcggaggaagcggcggaggatctgaagtgcaggttttggagtctggcggaggactggttcagcctggcggatctctgagactgtcttgtgccgccagcggcttcaccttcagcaactttgccatgagctgggtccgacaggcccctggcaaaggacttgaatgggtgtccacaatcagcggcagcgccggcacaacagattacgccgattctgtgaagggcagattcaccatcagccgggacaacagcaagaaaaccctgtacctccagatgaacagcctgcgcgtggaagataccgccgtgtactactgtgccgatggcagaggccccttcttcgattatcgcggccagggcacactggtcaccgtttcttctctcgaggacaaaactcacacatgcccaccgtgcccagcaggcagagccgattgcggctttaccagcgagagctaccagcagggcgtgctgagcgccaccatcctgtacgagatcctgctgggcaaggccaccctgtacgccgtgctggtgtctgccctggtgctgatggctatggtcaagcggaaggacagccggggaagggccaagcgatctggatctggagcaacaaacttctcactactcaaacaagcaggtgacgtggaggagaatcccgggcctactagtatggactggatttggcgcatccttttccttgtcggcgctgctaccggcgcgcattcccaactgcaactgcaagagtctggccctggcctggtcaagccttctgaaaccctgagcctgacctgtaccgtgtccggcggctctatcagcagcggcgattactactggggctggatcagacagcctccaggcaagggactcgaatggatcggcagcatcagctacagcggctccacctactacaacccaagcctgaagtccagagtgaccatcagcgtggacaccagcagaaaccagttctccctgaagctgagcagcgtgacagccgccgatacagccgtgtattattgcaccagagaggacagcagcaactggcggagtagaggacagggcacactggtcacagtgtcctcttctggaggcggtggaagcggtggaggaggatctgaagtgcagctggttgaatctggcggaggactggttcaggctggcggatctctgagactgtcttgtgccgccagcggcagaacctttagcatgggctggtttagacaggcccctggcaaagagagagagttcgtcgccgccatcacatactctggcggcagcccttactacgccgactctgtgaagggcagattcaccatcagccgggacaacgccaagaacaccgtgtacctccagatgaacagcctgaagcctgaggacaccgccgtgtactactgcgccgccaatccaacatacggcagcgactggaacgccgagaattggggccagggaacccaagtgacagtgtctagcacgcgtgataaaactcatacctgtccgccatgcccggcaatccccgaggacacattcttcccaagccccgagagcagctgcgacgtgaagctggtggaaaagagcttcgagacagacaccaacctgaacttccagaacctgagcgtgatcggcttcagaatcctgctgctgaaagtggccggctttaacctgctgatgaccctgcggctgtggtccagc

SEQ ID NO: 6456 - DNA, 2076 bp, Artificial Sequence
  Synthetic Polynucloetide
atggccttaccagtgaccgccttgctcctgccgctggccttgctgctccacgccgccaggccggaggttcagctgcttgagtctggcggaggactggttcaacctggcggaagcctgagactgtcttgtgccgccagcggcttcacctttagcagctacgccatgagctgggtccgacaggctcctggcaaaggactggaatgggtgtccagcatcagcggcagcggcgactacatctactacgccgatagcgtgaagggcagattcaccatcagccgggacatcagcaagaacaccctgtacctccagatgaacagcctgagagccgaggacaccgccgtgtactactgtgccaaagaaggcaccggcgctaacagcagcctggccgattatagaggccagggcacactggtcaccgtgtctagtggcggaggaagcggcggaggatctgaagtgcaggttttggagtctggcggaggactggttcagcctggcggatctctgagactgtcttgtgccgccagcggcttcaccttcagcaactttgccatgagctgggtccgacaggcccctggcaaaggacttgaatgggtgtccacaatcagcggcagcgccggcacaacagattacgccgattctgtgaagggcagattcaccatcagccgggacaacagcaagaaaaccctgtacctccagatgaacagcctgcgcgtggaagataccgccgtgtactactgtgccgatggcagaggccccttcttcgattatcgcggccagggcacactggtcaccgtttcttctctcgagggatctggcagagccgattgcggctttaccagcgagagctaccagcagggcgtgctgagcgccaccatcctgtacgagatcctgctgggcaaggccaccctgtacgccgtgctggtgtctgccctggtgctgatggctatggtcaagcggaaggacagccggggaagggccaagcgatctggatctggagcaacaaacttctcactactcaaacaagcaggtgacgtggaggagaatcccgggcctactagtatggactggatttggcgcatccttttccttgtcggcgctgctaccggcgcgcattcccaactgcaactgcaagagtctggccctggcctggtcaagccttctgaaaccctgagcctgacctgtaccgtgtccggcggctctatcagcagcggcgattactactggggctggatcagacagcctccaggcaagggactcgaatggatcggcagcatcagctacagcggctccacctactacaacccaagcctgaagtccagagtgaccatcagcgtggacaccagcagaaaccagttctccctgaagctgagcagcgtgacagccgccgatacagccgtgtattattgcaccagagaggacagcagcaactggcggagtagaggacagggcacactggtcacagtgtcctcttctggaggcggtggaagcggtggaggaggatctgaagtgcagctggttgaatctggcggaggactggttcaggctggcggatctctgagactgtcttgtgccgccagcggcagaacctttagcatgggctggtttagacaggcccctggcaaagagagagagttcgtcgccgccatcacatactctggcggcagcccttactacgccgactctgtgaagggcagattcaccatcagccgggacaacgccaagaacaccgtgtacctccagatgaacagcctgaagcctgaggacaccgccgtgtactactgcgccgccaatccaacatacggcagcgactggaacgccgagaattggggccagggaacccaagtgacagtgtctagcacgcgtgataaaactcatacctgtccgccatgcccggcaatccccgaggacacattcttcccaagccccgagagcagctgcgacgtgaagctggtggaaaagagcttcgagacagacaccaacctgaacttccagaacctgagcgtgatcggcttcagaatcctgctgctgaaagtggccggctttaacctgctgatgaccctgcggctgtggtccagc

SEQ ID NO: 6457 - DNA, 3432 bp, Artificial Sequence
  Synthetic Polynucloetide
atggccttaccagtgaccgccttgctcctgccgctggccttgctgctccacgccgccaggccggaggttcagctgcttgagtctggcggaggactggttcaacctggcggaagcctgagactgtcttgtgccgccagcggcttcacctttagcagctacgccatgagctgggtccgacaggctcctggcaaaggactggaatgggtgtccagcatcagcggcagcggcgactacatctactacgccgatagcgtgaagggcagattcaccatcagccgggacatcagcaagaacaccctgtacctccagatgaacagcctgagagccgaggacaccgccgtgtactactgtgccaaagaaggcaccggcgctaacagcagcctggccgattatagaggccagggcacactggtcaccgtgtctagtggcggaggaagcggcggaggatctgaagtgcaggttttggagtctggcggaggactggttcagcctggcggatctctgagactgtcttgtgccgccagcggcttcaccttcagcaactttgccatgagctgggtccgacaggcccctggcaaaggacttgaatgggtgtccacaatcagcggcagcgccggcacaacagattacgccgattctgtgaagggcagattcaccatcagccgggacaacagcaagaaaaccctgtacctccagatgaacagcctgcgcgtggaagataccgccgtgtactactgtgccgatggcagaggccccttcttcgattatcgcggccagggcacactggtcaccgtttcttctctcgagggacagcctaaggccaatcctaccgtgacactgttccctccaagcagcgaagaactccaggccaacaaggccacacttgtgtgcctgatctccgacttctaccctggggctgtgacagtggcttggaaggccgatggatctcctgtgaaagccggcgtggaaaccaccaagccatccaagcagagcaacaacaaatacgccgccagctcctacctgagcctgacacctgagcagtggaagtcccacagatcctacagctgccaagtgacccacgaaggcagcaccgtggaaaagacagtggcccctacagagtgcagccccatcaagaccgatgtgattacaatggaccccaaggacaactgctccaaggacgccaacgataccctgctgctccagctgaccaacaccagcgcctactacatgtacttgttgctgctgctgaagtccgtggtgtacttcgccatcatcacatgctgcctgctgcggagaaccgccttctgctgcaacggcgagaagtctagggccaagcgatctggatctggagcaacaaacttctcactactcaaacaagcaggtgacgtggaggagaatcccgggcctactagtatggactggatttggcgcatccttttccttgtcggcgctgctaccggcgcgcattcccaactgcaactgcaagagtctggccctggcctggtcaagccttctgaaaccctgagcctgacctgtaccgtgtccggcggctctatcagcagcggcgattactactggggctggatcagacagcctccaggcaagggactcgaatggatcggcagcatcagctacagcggctccacctactacaacccaagcctgaagtccagagtgaccatcagcgtggacaccagcagaaaccagttctccctgaagctgagcagcgtgacagccgccgatacagccgtgtattattgcaccagagaggacagcagcaactggcggagtagaggacagggcacactggtcacagtgtcctcttctggaggcggtggaagcggtggaggaggatctgaagtgcagctggttgaatctggcggaggactggttcaggctggcggatctctgagactgtcttgtgccgccagcggcagaacctttagcatgggctggtttagacaggcccctggcaaagagagagagttcgtcgccgccatcacatactctggcggcagcccttactacgccgactctgtgaagggcagattcaccatcagccgggacaacgccaagaacaccgtgtacctccagatgaacagcctgaagcctgaggacaccgccgtgtactactgcgccgccaatccaacatacggcagcgactggaacgccgagaattggggccagggaacccaagtgacagtgtctagcacgcgtgcctctacaaagggaccctccgtgtttcctctggctcccagcagcaagtctacaagcggaggaacagccgctctgggctgcctggtcaaggattactttcccgagcctgtgaccgtgtcctggaatagcggagcactgacaagcggcgtgcacacctttccagccgtgctgcaaagcagcggcctgtactctctgagcagcgtggtcacagtgcctagctctagcctgggcacccagacctacatctgcaatgtgaaccacaagcctagcaacaccaaggtggacaagagagtggaacccaagagctgtgaagtgaaaaccgactccaccgaccacgtgaagcccaaagagacagagaacaccaagcagcccagcaagagctgccacaagcccaaggccatcgtgcacaccgagaaagtgaacatgatgagcctgaccgtgctgggcctgcggatgctgttcgccaaaaccgtggccgtgaacttcctgctgaccgccaagctgttcttcctccgcgccaagagaagcggatctggcgtgaagcagaccctgaatttcgacctgctgaagctggctggcgacgtggaatccaacccaggcccttctagaggccatatgaccgagtacaagcccacggtgcgcctcgccacccgcgacgacgtccccagggccgtacgcaccctcgccgccgcgttcgccgactaccccgccacgcgccacaccgtcgatccggaccgccacatcgagcgggtcaccgagctgcaagaactcttcctcacgcgcgtcgggctcgacatcggcaaggtgtgggtcgcggacgacggcgccgcggtggcggtctggaccacgccggagagcgtcgaagcgggggcggtgttcgccgagatcggcccgcgcatggccgagttgagcggttcccggctggccgcgcagcaacagatggaaggcctcctggcgccgcaccggcccaaggagcccgcgtggttcctggccaccgtcggcgtctcgcccgaccaccagggcaagggtctgggcagcgccgtcgtgctccccggagtggaggcggccgagcgcgccggggtgcccgccttcctggagacctccgcgccccgcaacctccccttctacgagcggctcggcttcaccgtcaccgccgacgtcgaggtgcccgaaggaccgcgcacctggtgcatgacccgcaagcccggtgcctga

SEQ ID NO: 6458 - DNA, 2730 bp, Artificial Sequence
  Synthetic Polynucloetide
atggccttaccagtgaccgccttgctcctgccgctggccttgctgctccacgccgccaggccggaggttcagctgcttgagtctggcggaggactggttcaacctggcggaagcctgagactgtcttgtgccgccagcggcttcacctttagcagctacgccatgagctgggtccgacaggctcctggcaaaggactggaatgggtgtccagcatcagcggcagcggcgactacatctactacgccgatagcgtgaagggcagattcaccatcagccgggacatcagcaagaacaccctgtacctccagatgaacagcctgagagccgaggacaccgccgtgtactactgtgccaaagaaggcaccggcgctaacagcagcctggccgattatagaggccagggcacactggtcaccgtgtctagtggcggaggaagcggcggaggatctgaagtgcaggttttggagtctggcggaggactggttcagcctggcggatctctgagactgtcttgtgccgccagcggcttcaccttcagcaactttgccatgagctgggtccgacaggcccctggcaaaggacttgaatgggtgtccacaatcagcggcagcgccggcacaacagattacgccgattctgtgaagggcagattcaccatcagccgggacaacagcaagaaaaccctgtacctccagatgaacagcctgcgcgtggaagataccgccgtgtactactgtgccgatggcagaggccccttcttcgattatcgcggccagggcacactggtcaccgtttcttctctcgagggacagcctaaggccaatcctaccgtgacactgttccctccaagcagcgaagaactccaggccaacaaggccacacttgtgtgcctgatctccgacttctaccctggggctgtgacagtggcttggaaggccgatggatctcctgtgaaagccggcgtggaaaccaccaagccatccaagcagagcaacaacaaatacgccgccagctcctacctgagcctgacacctgagcagtggaagtcccacagatcctacagctgccaagtgacccacgaaggcagcaccgtggaaaagacagtggcccctacagagtgcagccccatcaagaccgatgtgattacaatggaccccaaggacaactgctccaaggacgccaacgataccctgctgctccagctgaccaacaccagcgcctactacatgtacttgttgctgctgctgaagtccgtggtgtacttcgccatcatcacatgctgcctgctgcggagaaccgccttctgctgcaacggcgagaagtctagggccaagcgatctggatctggagcaacaaacttctcactactcaaacaagcaggtgacgtggaggagaatcccgggcctactagtatggactggatttggcgcatccttttccttgtcggcgctgctaccggcgcgcattcccaactgcaactgcaagagtctggccctggcctggtcaagccttctgaaaccctgagcctgacctgtaccgtgtccggcggctctatcagcagcggcgattactactggggctggatcagacagcctccaggcaagggactcgaatggatcggcagcatcagctacagcggctccacctactacaacccaagcctgaagtccagagtgaccatcagcgtggacaccagcagaaaccagttctccctgaagctgagcagcgtgacagccgccgatacagccgtgtattattgcaccagagaggacagcagcaactggcggagtagaggacagggcacactggtcacagtgtcctcttctggaggcggtggaagcggtggaggaggatctgaagtgcagctggttgaatctggcggaggactggttcaggctggcggatctctgagactgtcttgtgccgccagcggcagaacctttagcatgggctggtttagacaggcccctggcaaagagagagagttcgtcgccgccatcacatactctggcggcagcccttactacgccgactctgtgaagggcagattcaccatcagccgggacaacgccaagaacaccgtgtacctccagatgaacagcctgaagcctgaggacaccgccgtgtactactgcgccgccaatccaacatacggcagcgactggaacgccgagaattggggccagggaacccaagtgacagtgtctagcacgcgtgcctctacaaagggaccctccgtgtttcctctggctcccagcagcaagtctacaagcggaggaacagccgctctgggctgcctggtcaaggattactttcccgagcctgtgaccgtgtcctggaatagcggagcactgacaagcggcgtgcacacctttccagccgtgctgcaaagcagcggcctgtactctctgagcagcgtggtcacagtgcctagctctagcctgggcacccagacctacatctgcaatgtgaaccacaagcctagcaacaccaaggtggacaagagagtggaacccaagagctgtgaagtgaaaaccgactccaccgaccacgtgaagcccaaagagacagagaacaccaagcagcccagcaagagctgccacaagcccaaggccatcgtgcacaccgagaaagtgaacatgatgagcctgaccgtgctgggcctgcggatgctgttcgccaaaaccgtggccgtgaacttcctgctgaccgccaagctgttcttcctc

SEQ ID NO: 6459 - DNA, 2817 bp, Artificial Sequence
  Synthetic Polynucloetide
atggccttaccagtgaccgccttgctcctgccgctggccttgctgctccacgccgccaggccggaggttcagctgcttgagtctggcggaggactggttcaacctggcggaagcctgagactgtcttgtgccgccagcggcttcacctttagcagctacgccatgagctgggtccgacaggctcctggcaaaggactggaatgggtgtccagcatcagcggcagcggcgactacatctactacgccgatagcgtgaagggcagattcaccatcagccgggacatcagcaagaacaccctgtacctccagatgaacagcctgagagccgaggacaccgccgtgtactactgtgccaaagaaggcaccggcgctaacagcagcctggccgattatagaggccagggcacactggtcaccgtgtctagtggcggaggaagcggcggaggatctgaagtgcaggttttggagtctggcggaggactggttcagcctggcggatctctgagactgtcttgtgccgccagcggcttcaccttcagcaactttgccatgagctgggtccgacaggcccctggcaaaggacttgaatgggtgtccacaatcagcggcagcgccggcacaacagattacgccgattctgtgaagggcagattcaccatcagccgggacaacagcaagaaaaccctgtacctccagatgaacagcctgcgcgtggaagataccgccgtgtactactgtgccgatggcagaggccccttcttcgattatcgcggccagggcacactggtcaccgtttcttctctcgagggatctcccatcaagaccgatgtgattacaatggaccccaaggacaactgctccaaggacgccaacgataccctgctgctccagctgaccaacaccagcgcctactacatgtacttgttgctgctgctgaagtccgtggtgtacttcgccatcatcacatgctgcctgctgcggagaaccgccttctgctgcaacggcgagaagtctagggccaagcgatctggatctggagcaacaaacttctcactactcaaacaagcaggtgacgtggaggagaatcccgggcctactagtatggactggatttggcgcatccttttccttgtcggcgctgctaccggcgcgcattcccaactgcaactgcaagagtctggccctggcctggtcaagccttctgaaaccctgagcctgacctgtaccgtgtccggcggctctatcagcagcggcgattactactggggctggatcagacagcctccaggcaagggactcgaatggatcggcagcatcagctacagcggctccacctactacaacccaagcctgaagtccagagtgaccatcagcgtggacaccagcagaaaccagttctccctgaagctgagcagcgtgacagccgccgatacagccgtgtattattgcaccagagaggacagcagcaactggcggagtagaggacagggcacactggtcacagtgtcctcttctggaggcggtggaagcggtggaggaggatctgaagtgcagctggttgaatctggcggaggactggttcaggctggcggatctctgagactgtcttgtgccgccagcggcagaacctttagcatgggctggtttagacaggcccctggcaaagagagagagttcgtcgccgccatcacatactctggcggcagcccttactacgccgactctgtgaagggcagattcaccatcagccgggacaacgccaagaacaccgtgtacctccagatgaacagcctgaagcctgaggacaccgccgtgtactactgcgccgccaatccaacatacggcagcgactggaacgccgagaattggggccagggaacccaagtgacagtgtctagcacgcgtggcagcgaagtgaaaaccgactccaccgaccacgtgaagcccaaagagacagagaacaccaagcagcccagcaagagctgccacaagcccaaggccatcgtgcacaccgagaaagtgaacatgatgagcctgaccgtgctgggcctgcggatgctgttcgccaaaaccgtggccgtgaacttcctgctgaccgccaagctgttcttcctccgcgccaagagaagcggatctggcgtgaagcagaccctgaatttcgacctgctgaagctggctggcgacgtggaatccaacccaggcccttctagaggccatatgaccgagtacaagcccacggtgcgcctcgccacccgcgacgacgtccccagggccgtacgcaccctcgccgccgcgttcgccgactaccccgccacgcgccacaccgtcgatccggaccgccacatcgagcgggtcaccgagctgcaagaactcttcctcacgcgcgtcgggctcgacatcggcaaggtgtgggtcgcggacgacggcgccgcggtggcggtctggaccacgccggagagcgtcgaagcgggggcggtgttcgccgagatcggcccgcgcatggccgagttgagcggttcccggctggccgcgcagcaacagatggaaggcctcctggcgccgcaccggcccaaggagcccgcgtggttcctggccaccgtcggcgtctcgcccgaccaccagggcaagggtctgggcagcgccgtcgtgctccccggagtggaggcggccgagcgcgccggggtgcccgccttcctggagacctccgcgccccgcaacctccccttctacgagcggctcggcttcaccgtcaccgccgacgtcgaggtgcccgaaggaccgcgcacctggtgcatgacccgcaagcccggtgcctga

SEQ ID NO: 6460 - DNA, 2115 bp, Artificial Sequence
  Synthetic Polynucloetide
atggccttaccagtgaccgccttgctcctgccgctggccttgctgctccacgccgccaggccggaggttcagctgcttgagtctggcggaggactggttcaacctggcggaagcctgagactgtcttgtgccgccagcggcttcacctttagcagctacgccatgagctgggtccgacaggctcctggcaaaggactggaatgggtgtccagcatcagcggcagcggcgactacatctactacgccgatagcgtgaagggcagattcaccatcagccgggacatcagcaagaacaccctgtacctccagatgaacagcctgagagccgaggacaccgccgtgtactactgtgccaaagaaggcaccggcgctaacagcagcctggccgattatagaggccagggcacactggtcaccgtgtctagtggcggaggaagcggcggaggatctgaagtgcaggttttggagtctggcggaggactggttcagcctggcggatctctgagactgtcttgtgccgccagcggcttcaccttcagcaactttgccatgagctgggtccgacaggcccctggcaaaggacttgaatgggtgtccacaatcagcggcagcgccggcacaacagattacgccgattctgtgaagggcagattcaccatcagccgggacaacagcaagaaaaccctgtacctccagatgaacagcctgcgcgtggaagataccgccgtgtactactgtgccgatggcagaggccccttcttcgattatcgcggccagggcacactggtcaccgtttcttctctcgagggatctcccatcaagaccgatgtgattacaatggaccccaaggacaactgctccaaggacgccaacgataccctgctgctccagctgaccaacaccagcgcctactacatgtacttgttgctgctgctgaagtccgtggtgtacttcgccatcatcacatgctgcctgctgcggagaaccgccttctgctgcaacggcgagaagtctagggccaagcgatctggatctggagcaacaaacttctcactactcaaacaagcaggtgacgtggaggagaatcccgggcctactagtatggactggatttggcgcatccttttccttgtcggcgctgctaccggcgcgcattcccaactgcaactgcaagagtctggccctggcctggtcaagccttctgaaaccctgagcctgacctgtaccgtgtccggcggctctatcagcagcggcgattactactggggctggatcagacagcctccaggcaagggactcgaatggatcggcagcatcagctacagcggctccacctactacaacccaagcctgaagtccagagtgaccatcagcgtggacaccagcagaaaccagttctccctgaagctgagcagcgtgacagccgccgatacagccgtgtattattgcaccagagaggacagcagcaactggcggagtagaggacagggcacactggtcacagtgtcctcttctggaggcggtggaagcggtggaggaggatctgaagtgcagctggttgaatctggcggaggactggttcaggctggcggatctctgagactgtcttgtgccgccagcggcagaacctttagcatgggctggtttagacaggcccctggcaaagagagagagttcgtcgccgccatcacatactctggcggcagcccttactacgccgactctgtgaagggcagattcaccatcagccgggacaacgccaagaacaccgtgtacctccagatgaacagcctgaagcctgaggacaccgccgtgtactactgcgccgccaatccaacatacggcagcgactggaacgccgagaattggggccagggaacccaagtgacagtgtctagcacgcgtggcagcgaagtgaaaaccgactccaccgaccacgtgaagcccaaagagacagagaacaccaagcagcccagcaagagctgccacaagcccaaggccatcgtgcacaccgagaaagtgaacatgatgagcctgaccgtgctgggcctgcggatgctgttcgccaaaaccgtggccgtgaacttcctgctgaccgccaagctgttcttcctc

SEQ ID NO: 6461 - DNA, 2169 bp, Artificial Sequence
  Synthetic Polynucloetide
atggccttaccagtgaccgccttgctcctgccgctggccttgctgctccacgccgccaggccggaggttcagctgcttgagtctggcggaggactggttcaacctggcggaagcctgagactgtcttgtgccgccagcggcttcacctttagcagctacgccatgagctgggtccgacaggctcctggcaaaggactggaatgggtgtccagcatcagcggcagcggcgactacatctactacgccgatagcgtgaagggcagattcaccatcagccgggacatcagcaagaacaccctgtacctccagatgaacagcctgagagccgaggacaccgccgtgtactactgtgccaaagaaggcaccggcgctaacagcagcctggccgattatagaggccagggcacactggtcaccgtgtctagtggcggaggaagcggcggaggatctgaagtgcaggttttggagtctggcggaggactggttcagcctggcggatctctgagactgtcttgtgccgccagcggcttcaccttcagcaactttgccatgagctgggtccgacaggcccctggcaaaggacttgaatgggtgtccacaatcagcggcagcgccggcacaacagattacgccgattctgtgaagggcagattcaccatcagccgggacaacagcaagaaaaccctgtacctccagatgaacagcctgcgcgtggaagataccgccgtgtactactgtgccgatggcagaggccccttcttcgattatcgcggccagggcacactggtcaccgtttcttctctcgaggacaaaactcacacatgcccaccgtgcccagcacccatcaagaccgatgtgattacaatggaccccaaggacaactgctccaaggacgccaacgataccctgctgctccagctgaccaacaccagcgcctactacatgtacttgttgctgctgctgaagtccgtggtgtacttcgccatcatcacatgctgcctgctgcggagaaccgccttctgctgcaacggcgagaagtctagggccaagcgatctggatctggagcaacaaacttctcactactcaaacaagcaggtgacgtggaggagaatcccgggcctactagtatggactggatttggcgcatccttttccttgtcggcgctgctaccggcgcgcattcccaactgcaactgcaagagtctggccctggcctggtcaagccttctgaaaccctgagcctgacctgtaccgtgtccggcggctctatcagcagcggcgattactactggggctggatcagacagcctccaggcaagggactcgaatggatcggcagcatcagctacagcggctccacctactacaacccaagcctgaagtccagagtgaccatcagcgtggacaccagcagaaaccagttctccctgaagctgagcagcgtgacagccgccgatacagccgtgtattattgcaccagagaggacagcagcaactggcggagtagaggacagggcacactggtcacagtgtcctcttctggaggcggtggaagcggtggaggaggatctgaagtgcagctggttgaatctggcggaggactggttcaggctggcggatctctgagactgtcttgtgccgccagcggcagaacctttagcatgggctggtttagacaggcccctggcaaagagagagagttcgtcgccgccatcacatactctggcggcagcccttactacgccgactctgtgaagggcagattcaccatcagccgggacaacgccaagaacaccgtgtacctccagatgaacagcctgaagcctgaggacaccgccgtgtactactgcgccgccaatccaacatacggcagcgactggaacgccgagaattggggccagggaacccaagtgacagtgtctagcacgcgtgataaaactcatacctgtccgccatgcccggcagaagtgaaaaccgactccaccgaccacgtgaagcccaaagagacagagaacaccaagcagcccagcaagagctgccacaagcccaaggccatcgtgcacaccgagaaagtgaacatgatgagcctgaccgtgctgggcctgcggatgctgttcgccaaaaccgtggccgtgaacttcctgctgaccgccaagctgttcttcctc

SEQ ID NO: 6462 - DNA, 1293 bp, Artificial Sequence
  Synthetic Polynucloetide
atggactggatttggcgcatccttttccttgtcggcgctgctaccggcgcgcattcccaactgcaactgcaagagtctggccctggcctggtcaagccttctgaaaccctgagcctgacctgtaccgtgtccggcggctctatcagcagcggcgattactactggggctggatcagacagcctccaggcaagggactcgaatggatcggcagcatcagctacagcggctccacctactacaacccaagcctgaagtccagagtgaccatcagcgtggacaccagcagaaaccagttctccctgaagctgagcagcgtgacagccgccgatacagccgtgtattattgcaccagagaggacagcagcaactggcggagtagaggacagggcacactggtcacagtgtcctcttctggaggcggtggaagcggtggaggaggatctgaagtgcagctggttgaatctggcggaggactggttcaggctggcggatctctgagactgtcttgtgccgccagcggcagaacctttagcatgggctggtttagacaggcccctggcaaagagagagagttcgtcgccgccatcacatactctggcggcagcccttactacgccgactctgtgaagggcagattcaccatcagccgggacaacgccaagaacaccgtgtacctccagatgaacagcctgaagcctgaggacaccgccgtgtactactgcgccgccaatccaacatacggcagcgactggaacgccgagaattggggccagggaacccaagtgacagtgtctagcacgcgtgcctctacaaagggaccctccgtgtttcctctggctcccagcagcaagtctacaagcggaggaacagccgctctgggctgcctggtcaaggattactttcccgagcctgtgaccgtgtcctggaatagcggagcactgacaagcggcgtgcacacctttccagccgtgctgcaaagcagcggcctgtactctctgagcagcgtggtcacagtgcctagctctagcctgggcacccagacctacatctgcaatgtgaaccacaagcctagcaacaccaaggtggacaagagagtggaacccaagagctgtatccccgaggacacattcttcccaagccccgagagcagctgcgacgtgaagctggtggaaaagagcttcgagacagacaccaacctgaacttccagaacctgagcgtgatcggcttcagaatcctgctgctgaaagtggccggctttaacctgctgatgaccctgcggctgtggtccagc

SEQ ID NO: 6463 - DNA, 1317 bp, Artificial Sequence
  Synthetic Polynucloetide
atggactggatttggcgcatccttttccttgtcggcgctgctaccggcgcgcattcccaactgcaactgcaagagtctggccctggcctggtcaagccttctgaaaccctgagcctgacctgtaccgtgtccggcggctctatcagcagcggcgattactactggggctggatcagacagcctccaggcaagggactcgaatggatcggcagcatcagctacagcggctccacctactacaacccaagcctgaagtccagagtgaccatcagcgtggacaccagcagaaaccagttctccctgaagctgagcagcgtgacagccgccgatacagccgtgtattattgcaccagagaggacagcagcaactggcggagtagaggacagggcacactggtcacagtgtcctcttctggaggcggtggaagcggtggaggaggatctgaagtgcagctggttgaatctggcggaggactggttcaggctggcggatctctgagactgtcttgtgccgccagcggcagaacctttagcatgggctggtttagacaggcccctggcaaagagagagagttcgtcgccgccatcacatactctggcggcagcccttactacgccgactctgtgaagggcagattcaccatcagccgggacaacgccaagaacaccgtgtacctccagatgaacagcctgaagcctgaggacaccgccgtgtactactgcgccgccaatccaacatacggcagcgactggaacgccgagaattggggccagggaacccaagtgacagtgtctagcacgcgtgcctctacaaagggaccctccgtgtttcctctggctcccagcagcaagtctacaagcggaggaacagccgctctgggctgcctggtcaaggattactttcccgagcctgtgaccgtgtcctggaatagcggagcactgacaagcggcgtgcacacctttccagccgtgctgcaaagcagcggcctgtactctctgagcagcgtggtcacagtgcctagctctagcctgggcacccagacctacatctgcaatgtgaaccacaagcctagcaacaccaaggtggacaagagagtggaacccaagagctgtgaagtgaaaaccgactccaccgaccacgtgaagcccaaagagacagagaacaccaagcagcccagcaagagctgccacaagcccaaggccatcgtgcacaccgagaaagtgaacatgatgagcctgaccgtgctgggcctgcggatgctgttcgccaaaaccgtggccgtgaacttcctgctgaccgccaagctgttcttcctc

SEQ ID NO: 6464 - DNA, 2211 bp, Artificial Sequence
  Synthetic Polynucloetide
atggccttaccagtgaccgccttgctcctgccgctggccttgctgctccacgccgccaggccgcagctccagctgcaagagtctggacctggcctggtcaagcctagcgagacactgagcctgacctgtaccgtgtccggcgatagcatcagcagcggcgattactactggggctggatcagacagcctcctggcaaaggactggaatggatcggccacatctactacagcggcgtgacctactacaaccccagcctgaagtccagagtgaccatcagcgtggacaccagccggaaccagttctccctgaagctgtctagcgtgacagccgccgataccgccgtgtactactgcaccagagaggacagcagcaactggcggagtagaggccagggaacactggtcacagttagctctctcgagagcggcggaggcggatctttcgaagttcagttggtagagtctggaggcggagtggtacaaccggggcggtctcttagacttagttgcgcagcaagcggtttctctttctctggctatgggatgcactgggtgagacaggcccctgggaaaggactggagtgggtggcctacatttcatacgacgggagtaataaatactatgcagactccgttaagggcaggttcacgatctctcgggacaattccaagaatacattgtatcttcagatgaatagtctccgagctgaagacacggcggtttactactgcgctaaagacccggcctggggacttcgacttggagagagttctagctacgattttgacatttggggacaagggacaatggtcactgtctcaagtacgcgtgagcagaaactgatctcggaagaggatctggcgaagcccaccacgacgccagcgccgcgaccaccaacaccggcgcccaccatcgcgtcgcagcccctgtccctgcgcccagaggcgtgccggccagcggcggggggcgcagtgcacacgagggggctggacttcgcctgtgacatctacatctgggcgcccttggccgggacttgtggggtccttctcctgtcactggttatcaccctttactgcaaacggggcagaaagaaactcctgtatatattcaaacaaccatttatgagaccagtacaaactactcaagaggaagatggctgtagctgccgatttccagaagaagaagaaggaggatgtgaactgagagtgaagttcagcaggagcgcagacgcccccgcgtaccagcagggccagaaccagctctataacgagctgaatctaggacgaagagaggagtacgatgttttggacaagagacgtggccgggaccctgagatggggggaaagccgagaaggaagaaccctcaggaaggcctgtacaatgaactgcagaaagataagatggcggaggcctacagtgagattgggatgaaaggcgagcgccggaggggcaaggggcacgatggcctttaccagggtctcagtacagccaccaaggacacctacgacgcccttcacatgcaggccctgccccctcgctctagtggctccggcgagggcagaggaagtctactaacctgcggagatgtggaagaaaatcctggcccacatatgaccgagtacaagcccacggtgcgcctcgccacccgcgacgacgtccccagggccgtacgcaccctcgccgccgcgttcgccgactaccccgccacgcgccacaccgtcgatccggaccgccacatcgagcgggtcaccgagctgcaagaactcttcctcacgcgcgtcgggctcgacatcggcaaggtgtgggtcgcggacgacggcgccgcggtggcggtctggaccacgccggagagcgtcgaagcgggggcggtgttcgccgagatcggcccgcgcatggccgagttgagcggttcccggctggccgcgcagcaacagatggaaggcctcctggcgccgcaccggcccaaggagcccgcgtggttcctggccaccgtcggcgtctcgcccgaccaccagggcaagggtctgggcagcgccgtcgtgctccccggagtggaggcggccgagcgcgccggggtgcccgccttcctggagacctccgcgccccgcaacctccccttctacgagcggctcggcttcaccgtcaccgccgacgtcgaggtgcccgaaggaccgcgcacctggtgcatgacccgcaagcccggtgcctga

SEQ ID NO: 6465 - DNA, 2193 bp, Artificial Sequence
  Synthetic Polynucloetide
atggccttaccagtgaccgccttgctcctgccgctggccttgctgctccacgccgccaggccgcagctccagctgcaagagtctggacctggcctggtcaagcctagcgagacactgagcctgacctgtaccgtgtccggcgatagcatcagcagcggcgattactactggggctggatcagacagcctcctggcaaaggactggaatggatcggccacatctactacagcggcgtgacctactacaaccccagcctgaagtccagagtgaccatcagcgtggacaccagccggaaccagttctccctgaagctgtctagcgtgacagccgccgataccgccgtgtactactgcaccagagaggacagcagcaactggcggagtagaggccagggaacactggtcacagttagctctctcgagagcggcggaggcggatctttcgaagttcagttggtagagtctggaggcggagtggtacaaccggggcggtctcttagacttagttgcgcagcaagcggtttctctttctctggctatgggatgcactgggtgagacaggcccctgggaaaggactggagtgggtggcctacatttcatacgacgggagtaataaatactatgcagactccgttaagggcaggttcacgatctctcgggacaattccaagaatacattgtatcttcagatgaatagtctccgagctgaagacacggcggtttactactgcgctaaagacccggcctggggacttcgacttggagagagttctagctacgattttgacatttggggacaagggacaatggtcactgtctcaagtacgcgtgagcagaaactgatctcggaagaggatctgaaaattgaagttatgtatcctcctccttacctagacaatgagaagagcaatggaaccattatccatgtgaaagggaaacacctttgtccaagtcccctatttcccggaccttctaagcccttttgggtgctggtggtggttgggggagtcctggcttgctatagcttgctagtaacagtggcctttattattttctgggtgaggagtaagaggagcaggctcctgcacagtgactacatgaacatgactccacgccgccccggacccacccgcaagcattaccagccctatgccccaccacgcgacttcgcagcctatcgctccagagtgaagttcagcaggagcgcagacgcccccgcgtaccagcagggccagaaccagctctataacgagctcaatctaggacgaagagaggagtacgatgttttggacaagagacgtggccgggaccctgagatggggggaaagccgagaaggaagaaccctcaggaaggcctgtacaatgaactgcagaaagataagatggcggaggcctacagtgagattgggatgaaaggcgagcgccggaggggcaaggggcacgatggcctttaccagggtctcagtacagccaccaaggacacctacgacgcccttcacatgcaggccctgccccctcgctctagtggctccggcgagggcagaggaagtctactaacctgcggagatgtggaagaaaatcctggcccacatatgaccgagtacaagcccacggtgcgcctcgccacccgcgacgacgtccccagggccgtacgcaccctcgccgccgcgttcgccgactaccccgccacgcgccacaccgtcgatccggaccgccacatcgagcgggtcaccgagctgcaagaactcttcctcacgcgcgtcgggctcgacatcggcaaggtgtgggtcgcggacgacggcgccgcggtggcggtctggaccacgccggagagcgtcgaagcgggggcggtgttcgccgagatcggcccgcgcatggccgagttgagcggttcccggctggccgcgcagcaacagatggaaggcctcctggcgccgcaccggcccaaggagcccgcgtggttcctggccaccgtcggcgtctcgcccgaccaccagggcaagggtctgggcagcgccgtcgtgctccccggagtggaggcggccgagcgcgccggggtgcccgccttcctggagacctccgcgccccgcaacctccccttctacgagcggctcggcttcaccgtcaccgccgacgtcgaggtgcccgaaggaccgcgcacctggtgcatgacccgcaagcccggtgcctga

SEQ ID NO: 6466 - DNA, 1521 bp, Artificial Sequence
  Synthetic Polynucloetide
atggccttaccagtgaccgccttgctcctgccgctggccttgctgctccacgccgccaggccgcagctccagctgcaagagtctggacctggcctggtcaagcctagcgagacactgagcctgacctgtaccgtgtccggcgatagcatcagcagcggcgattactactggggctggatcagacagcctcctggcaaaggactggaatggatcggccacatctactacagcggcgtgacctactacaaccccagcctgaagtccagagtgaccatcagcgtggacaccagccggaaccagttctccctgaagctgtctagcgtgacagccgccgataccgccgtgtactactgcaccagagaggacagcagcaactggcggagtagaggccagggaacactggtcacagttagctctctcgagagcggcggaggcggatctttcgaagttcagttggtagagtctggaggcggagtggtacaaccggggcggtctcttagacttagttgcgcagcaagcggtttctctttctctggctatgggatgcactgggtgagacaggcccctgggaaaggactggagtgggtggcctacatttcatacgacgggagtaataaatactatgcagactccgttaagggcaggttcacgatctctcgggacaattccaagaatacattgtatcttcagatgaatagtctccgagctgaagacacggcggtttactactgcgctaaagacccggcctggggacttcgacttggagagagttctagctacgattttgacatttggggacaagggacaatggtcactgtctcaagtacgcgtgagcagaaactgatctcggaagaggatctgaaaattgaagttatgtatcctcctccttacctagacaatgagaagagcaatggaaccattatccatgtgaaagggaaacacctttgtccaagtcccctatttcccggaccttctaagcccttttgggtgctggtggtggttgggggagtcctggcttgctatagcttgctagtaacagtggcctttattattttctgggtgaggagtaagaggagcaggctcctgcacagtgactacatgaacatgactccacgccgccccggacccacccgcaagcattaccagccctatgccccaccacgcgacttcgcagcctatcgctccagagtgaagttcagcaggagcgcagacgcccccgcgtaccagcagggccagaaccagctctataacgagctcaatctaggacgaagagaggagtacgatgttttggacaagagacgtggccgggaccctgagatggggggaaagccgagaaggaagaaccctcaggaaggcctgtacaatgaactgcagaaagataagatggcggaggcctacagtgagattgggatgaaaggcgagcgccggaggggcaaggggcacgatggcctttaccagggtctcagtacagccaccaaggacacctacgacgcccttcacatgcaggccctgccccctcgc

SEQ ID NO: 6467 - DNA, 1542 bp, Artificial Sequence
  Synthetic Polynucloetide
atggccttaccagtgaccgccttgctcctgccgctggccttgctgctccacgccgccaggccgcagctccagctgcaagagtctggacctggcctggtcaagcctagcgagacactgagcctgacctgtaccgtgtccggcgatagcatcagcagcggcgattactactggggctggatcagacagcctcctggcaaaggactggaatggatcggccacatctactacagcggcgtgacctactacaaccccagcctgaagtccagagtgaccatcagcgtggacaccagccggaaccagttctccctgaagctgtctagcgtgacagccgccgataccgccgtgtactactgcaccagagaggacagcagcaactggcggagtagaggccagggaacactggtcacagttagctctctcgagagcggcggaggcggatctttcgaagttcagttggtagagtctggaggcggagtggtacaaccggggcggtctcttagacttagttgcgcagcaagcggtttctctttctctggctatgggatgcactgggtgagacaggcccctgggaaaggactggagtgggtggcctacatttcatacgacgggagtaataaatactatgcagactccgttaagggcaggttcacgatctctcgggacaattccaagaatacattgtatcttcagatgaatagtctccgagctgaagacacggcggtttactactgcgctaaagacccggcctggggacttcgacttggagagagttctagctacgattttgacatttggggacaagggacaatggtcactgtctcaagtacgcgtgagcagaaactgatctcggaagaggatctggcgaagcccaccacgacgccagcgccgcgaccaccaacaccggcgcccaccatcgcgtcgcagcccctgtccctgcgcccagaggcgtgccggccagcggcggggggcgcagtgcacacgagggggctggacttcgcctgtgacatctacatctgggcgcccttggccgggacttgtggggtccttctcctgtcactggttatcaccctttactgcaaacggggcagaaagaaactcctgtatatattcaaacaaccatttatgagaccagtacaaactactcaagaggaagatggctgtagctgccgatttccagaagaagaagaaggaggatgtgaactgagagtgaagttcagcaggagcgcagacgcccccgcgtaccagcagggccagaaccagctctataacgagctgaatctaggacgaagagaggagtacgatgttttggacaagagacgtggccgggaccctgagatggggggaaagccgagaaggaagaaccctcaggaaggcctgtacaatgaactgcagaaagataagatggcggaggcctacagtgagattgggatgaaaggcgagcgccggaggggcaaggggcacgatggcctttaccagggtctcagtacagccaccaaggacacctacgacgcccttcacatgcaggccctgccccctcgctga

SEQ ID NO: 6468 - DNA, 1545 bp, Artificial Sequence
  Synthetic Polynucloetide
atggccttaccagtgaccgccttgctcctgccgctggccttgctgctccacgccgccaggccggaagttcagttggtagagtctggaggcggagtggtacaaccggggcggtctcttagacttagttgcgcagcaagcggtttctctttctctggctatgggatgcactgggtgagacaggcccctgggaaaggactggagtgggtggcctacatttcatacgacgggagtaataaatactatgcagactccgttaagggcaggttcacgatctctcgggacaattccaagaatacattgtatcttcagatgaatagtctccgagctgaagacacggcggtttactactgcgctaaagacccggcctggggacttcgacttggagagagttctagctacgattttgacatttggggacaagggacaatggtcactgtctcaagtctcgagagcggcggaggcggatctttcgaacagctccagctgcaagagtctggacctggcctggtcaagcctagcgagacactgagcctgacctgtaccgtgtccggcgatagcatcagcagcggcgattactactggggctggatcagacagcctcctggcaaaggactggaatggatcggccacatctactacagcggcgtgacctactacaaccccagcctgaagtccagagtgaccatcagcgtggacaccagccggaaccagttctccctgaagctgtctagcgtgacagccgccgataccgccgtgtactactgcaccagagaggacagcagcaactggcggagtagaggccagggaacactggtcacagttagctctacgcgtgagcagaaactgatctcggaagaggatctggcgaagcccaccacgacgccagcgccgcgaccaccaacaccggcgcccaccatcgcgtcgcagcccctgtccctgcgcccagaggcgtgccggccagcggcggggggcgcagtgcacacgagggggctggacttcgcctgtgacatctacatctgggcgcccttggccgggacttgtggggtccttctcctgtcactggttatcaccctttactgcaaacggggcagaaagaaactcctgtatatattcaaacaaccatttatgagaccagtacaaactactcaagaggaagatggctgtagctgccgatttccagaagaagaagaaggaggatgtgaactgagagtgaagttcagcaggagcgcagacgcccccgcgtaccagcagggccagaaccagctctataacgagctgaatctaggacgaagagaggagtacgatgttttggacaagagacgtggccgggaccctgagatggggggaaagccgagaaggaagaaccctcaggaaggcctgtacaatgaactgcagaaagataagatggcggaggcctacagtgagattgggatgaaaggcgagcgccggaggggcaaggggcacgatggcctttaccagggtctcagtacagccaccaaggacacctacgacgcccttcacatgcaggccctgccccctcgctga

SEQ ID NO: 6469 - DNA, 2781 bp, Artificial Sequence
  Synthetic Polynucloetide
atggccttaccagtgaccgccttgctcctgccgctggccttgctgctccacgccgccaggccgcagctccagctgcaagagtctggacctggcctggtcaagcctagcgagacactgagcctgacctgtaccgtgtccggcgatagcatcagcagcggcgattactactggggctggatcagacagcctcctggcaaaggactggaatggatcggccacatctactacagcggcgtgacctactacaaccccagcctgaagtccagagtgaccatcagcgtggacaccagccggaaccagttctccctgaagctgtctagcgtgacagccgccgataccgccgtgtactactgcaccagagaggacagcagcaactggcggagtagaggccagggaacactggtcacagttagctctctcgagagcggcggaggcggatctttcgaagttcagttggtagagtctggaggcggagtggtacaaccggggcggtctcttagacttagttgcgcagcaagcggtttctctttctctggctatgggatgcactgggtgagacaggcccctgggaaaggactggagtgggtggcctacatttcatacgacgggagtaataaatactatgcagactccgttaagggcaggttcacgatctctcgggacaattccaagaatacattgtatcttcagatgaatagtctccgagctgaagacacggcggtttactactgcgctaaagacccggcctggggacttcgacttggagagagttctagctacgattttgacatttggggacaagggacaatggtcactgtctcaagtacgcgtgagcagaaactgatctcggaagaggatctggcgaagcccaccacgacgccagcgccgcgaccaccaacaccggcgcccaccatcgcgtcgcagcccctgtccctgcgcccagaggcgtgccggccagcggcggggggcgcagtgcacacgagggggctggacttcgcctgtgacatctacatctgggcgcccttggccgggacttgtggggtccttctcctgtcactggttatcaccctttactgcgggcgcgccagagtgaagttcagcaggagcgcagacgcccccgcgtaccagcagggccagaaccagctctataacgagctgaatctaggacgaagagaggagtacgatgttttggacaagagacgtggccgggaccctgagatggggggaaagccgagaaggaagaaccctcaggaaggcctgtacaatgaactgcagaaagataagatggcggaggcctacagtgagattgggatgaaaggcgagcgccggaggggcaaggggcacgatggcctttaccagggtctcagtacagccaccaaggacacctacgacgcccttcacatgcaggccctgccccctcgctctagaggatctggagcaacaaacttctcactactcaaacaagcaggtgacgtggaggagaatcccgggcctgggatccacatggccacttacgaggttctctgtgaggtggcgcggaaactgggcacggatgacagggaagtggtattgttcctcctaaacgtgttcatacctcaacccacactggcccaattaattggagctcttagagctttaaaggaggagggcaggttaacgtttcccctgttagcggaatgtctgtttcgtgcaggtcgcagagacctcttgcgcgacctgcttcacttagacccgcgttttttagagcgccacctagcgggcacaatgagttatttcagcccttatcagctcactgttctccacgtagacggggagctgtgtgcgagggatattaggtctttgatatttttaagcaaggacactatagggtctcgcagcacaccacagacattcttacactgggtgtactgtatggaaaacttagacctactgggtcccactgacgtggatgccctaatgtcaatgcttagatctttgtcaagagtagacctacagcgccaagtgcaaaccctaatgggccttcacctttccggcccatcacactcccaacactatcgccatacaccactcgagaccgatttctacgactacaaggacgacgatgacaagactagtggctccggcgagggcagaggaagtctactaacctgcggagatgtggaagaaaatcctggcccacatatgaccgagtacaagcccacggtgcgcctcgccacccgcgacgacgtccccagggccgtacgcaccctcgccgccgcgttcgccgactaccccgccacgcgccacaccgtcgatccggaccgccacatcgagcgggtcaccgagctgcaagaactcttcctcacgcgcgtcgggctcgacatcggcaaggtgtgggtcgcggacgacggcgccgcggtggcggtctggaccacgccggagagcgtcgaagcgggggcggtgttcgccgagatcggcccgcgcatggccgagttgagcggttcccggctggccgcgcagcaacagatggaaggcctcctggcgccgcaccggcccaaggagcccgcgtggttcctggccaccgtcggcgtctcgcccgaccaccagggcaagggtctgggcagcgccgtcgtgctccccggagtggaggcggccgagcgcgccggggtgcccgccttcctggagacctccgcgccccgcaacctccccttctacgagcggctcggcttcaccgtcaccgccgacgtcgaggtgcccgaaggaccgcgcacctggtgcatgacccgcaagcccggtgcctga

SEQ ID NO: 6470 - DNA, 2616 bp, Artificial Sequence
  Synthetic Polynucloetide
atggccttaccagtgaccgccttgctcctgccgctggccttgctgctccacgccgccaggccgcagctccagctgcaagagtctggacctggcctggtcaagcctagcgagacactgagcctgacctgtaccgtgtccggcgatagcatcagcagcggcgattactactggggctggatcagacagcctcctggcaaaggactggaatggatcggccacatctactacagcggcgtgacctactacaaccccagcctgaagtccagagtgaccatcagcgtggacaccagccggaaccagttctccctgaagctgtctagcgtgacagccgccgataccgccgtgtactactgcaccagagaggacagcagcaactggcggagtagaggccagggaacactggtcacagttagctctctcgagatccagaaccctgatcctgccgtgtaccagctgcgggatagcaagagcagcgacaagagcgtgtgtctgttcaccgacttcgacagccagaccaacgtgtcccagagcaaggactccgacgtgtacatcaccgataagtgcgtgctggacatgcggagcatggacttcaagagcaactccgccgtggcctggtccaacaagtccgatttcgcctgcgccaacgccttcaacaacagcattatccccgaggacacattcttcccaagcagcgacgtgccctgcgacgtgaagctggtggaaaagagcttcgagacagacaccaacctgaacttccagaacctgagcgtgatcggcttcagaatcctgctgctgaaagtggccggctttaacctgctgatgaccctgcggctgtggtccagccgcgccaagagaagcggatctggcgtgaagcagaccctgaatttcgacctgctgaagctggctggcgacgtggaatccaacccaggccctactagtatggactggatttggcgcatccttttccttgtcggcgctgctaccggcgcgcattccttcgaagttcagttggtagagtctggaggcggagtggtacaaccggggcggtctcttagacttagttgcgcagcaagcggtttctctttctctggctatgggatgcactgggtgagacaggcccctgggaaaggactggagtgggtggcctacatttcatacgacgggagtaataaatactatgcagactccgttaagggcaggttcacgatctctcgggacaattccaagaatacattgtatcttcagatgaatagtctccgagctgaagacacggcggtttactactgcgctaaagacccggcctggggacttcgacttggagagagttctagctacgattttgacatttggggacaagggacaatggtcactgtctcaagtacgcgtgaggacctgaagaacgtgttcccacctgaggtggccgtgttcgagcctagcaaggccgagatcgcccacacccagaaagccaccctcgtgtgcctggctaccggcttctaccccgaccatgtggaactgtcttggtgggtcaacggcaaagaggtgcacagcggcgtgtgtaccgacccccagccactgaaagaacagcccgccctgaacgacagccggtactgcctgagcagcagactgagagtgtccgccaccttctggcagaacccccggaaccacttcagatgccaggtgcagttctacggcctgagcgagaacgacgagtggacccaggacagagccaagcccgtgacccagatcgtgtctgccgaagcctggggcagagccgattgcggcatcaccagcgccagctaccaccagggcgtgctgagcgccaccatcctgtacgagatcctgctgggcaaggccaccctgtacgccgtgctggtgtctgccctggtgctgatggctatggtcaagcggaaggacagccggggaagggccaagcgatctggatctggagcaacaaacttctcactactcaaacaagcaggtgacgtggaggagaatcccgggccttctagaggccatatgaccgagtacaagcccacggtgcgcctcgccacccgcgacgacgtccccagggccgtacgcaccctcgccgccgcgttcgccgactaccccgccacgcgccacaccgtcgatccggaccgccacatcgagcgggtcaccgagctgcaagaactcttcctcacgcgcgtcgggctcgacatcggcaaggtgtgggtcgcggacgacggcgccgcggtggcggtctggaccacgccggagagcgtcgaagcgggggcggtgttcgccgagatcggcccgcgcatggccgagttgagcggttcccggctggccgcgcagcaacagatggaaggcctcctggcgccgcaccggcccaaggagcccgcgtggttcctggccaccgtcggcgtctcgcccgaccaccagggcaagggtctgggcagcgccgtcgtgctccccggagtggaggcggccgagcgcgccggggtgcccgccttcctggagacctccgcgccccgcaacctccccttctacgagcggctcggcttcaccgtcaccgccgacgtcgaggtgcccgaaggaccgcgcacctggtgcatgacccgcaagcccggtgcctga

SEQ ID NO: 6471 - DNA, 2613 bp, Artificial Sequence
  Synthetic Polynucloetide
atggccttaccagtgaccgccttgctcctgccgctggccttgctgctccacgccgccaggccgcagctccagctgcaagagtctggacctggcctggtcaagcctagcgagacactgagcctgacctgtaccgtgtccggcgatagcatcagcagcggcgattactactggggctggatcagacagcctcctggcaaaggactggaatggatcggccacatctactacagcggcgtgacctactacaaccccagcctgaagtccagagtgaccatcagcgtggacaccagccggaaccagttctccctgaagctgtctagcgtgacagccgccgataccgccgtgtactactgcaccagagaggacagcagcaactggcggagtagaggccagggaacactggtcacagttagctctctcgaggacctgaagaacgtgttcccacctgaggtggccgtgttcgagcctagcaaggccgagatcgcccacacccagaaagccaccctcgtgtgcctggctaccggcttctaccccgaccatgtggaactgtcttggtgggtcaacggcaaagaggtgcacagcggcgtgtgtaccgacccccagccactgaaagaacagcccgccctgaacgacagccggtactgcctgagcagcagactgagagtgtccgccaccttctggcagaacccccggaaccacttcagatgccaggtgcagttctacggcctgagcgagaacgacgagtggacccaggacagagccaagcccgtgacccagatcgtgtctgccgaagcctggggcagagccgattgcggcatcaccagcgccagctaccaccagggcgtgctgagcgccaccatcctgtacgagatcctgctgggcaaggccaccctgtacgccgtgctggtgtctgccctggtgctgatggctatggtcaagcggaaggacagccggggaagggccaagcgatctggatctggagcaacaaacttctcactactcaaacaagcaggtgacgtggaggagaatcccgggcctactagtatggactggatttggcgcatccttttccttgtcggcgctgctaccggcgcgcattccttcgaagttcagttggtagagtctggaggcggagtggtacaaccggggcggtctcttagacttagttgcgcagcaagcggtttctctttctctggctatgggatgcactgggtgagacaggcccctgggaaaggactggagtgggtggcctacatttcatacgacgggagtaataaatactatgcagactccgttaagggcaggttcacgatctctcgggacaattccaagaatacattgtatcttcagatgaatagtctccgagctgaagacacggcggtttactactgcgctaaagacccggcctggggacttcgacttggagagagttctagctacgattttgacatttggggacaagggacaatggtcactgtctcaagtacgcgtatccagaaccctgatcctgccgtgtaccagctgcgggatagcaagagcagcgacaagagcgtgtgtctgttcaccgacttcgacagccagaccaacgtgtcccagagcaaggactccgacgtgtacatcaccgataagtgcgtgctggacatgcggagcatggacttcaagagcaactccgccgtggcctggtccaacaagtccgatttcgcctgcgccaacgccttcaacaacagcattatccccgaggacacattcttcccaagcagcgacgtgccctgcgacgtgaagctggtggaaaagagcttcgagacagacaccaacctgaacttccagaacctgagcgtgatcggcttcagaatcctgctgctgaaagtggccggctttaacctgctgatgaccctgcggctgtggtccagccgcgccaagagaagcggatctggcgtgaagcagaccctgaatttcgacctgctgaagctggctggcgacgtggaatccaacccaggcccttctagaggccatatgaccgagtacaagcccacggtgcgcctcgccacccgcgacgacgtccccagggccgtacgcaccctcgccgccgcgttcgccgactaccccgccacgcgccacaccgtcgatccggaccgccacatcgagcgggtcaccgagctgcaagaactcttcctcacgcgcgtcgggctcgacatcggcaaggtgtgggtcgcggacgacggcgccgcggtggcggtctggaccacgccggagagcgtcgaagcgggggcggtgttcgccgagatcggcccgcgcatggccgagttgagcggttcccggctggccgcgcagcaacagatggaaggcctcctggcgccgcaccggcccaaggagcccgcgtggttcctggccaccgtcggcgtctcgcccgaccaccagggcaagggtctgggcagcgccgtcgtgctccccggagtggaggcggccgagcgcgccggggtgcccgccttcctggagacctccgcgccccgcaacctccccttctacgagcggctcggcttcaccgtcaccgccgacgtcgaggtgcccgaaggaccgcgcacctggtgcatgacccgcaagcccggtgcctga

SEQ ID NO: 6472 - DNA, 1911 bp, Artificial Sequence
  Synthetic Polynucloetide
atggccttaccagtgaccgccttgctcctgccgctggccttgctgctccacgccgccaggccgcagctccagctgcaagagtctggacctggcctggtcaagcctagcgagacactgagcctgacctgtaccgtgtccggcgatagcatcagcagcggcgattactactggggctggatcagacagcctcctggcaaaggactggaatggatcggccacatctactacagcggcgtgacctactacaaccccagcctgaagtccagagtgaccatcagcgtggacaccagccggaaccagttctccctgaagctgtctagcgtgacagccgccgataccgccgtgtactactgcaccagagaggacagcagcaactggcggagtagaggccagggaacactggtcacagttagctctctcgaggacctgaagaacgtgttcccacctgaggtggccgtgttcgagcctagcgaggccgagatcagccacacccagaaagccaccctcgtgtgcctggctaccggcttctaccccgaccatgtggaactgtcttggtgggtcaacggcaaagaggtgcacagcggcgtgtgtaccgacccccagccactgaaagaacagcccgccctgaacgacagccggtactgcctgagcagcagactgagagtgtccgccaccttctggcagaacccccggaaccacttcagatgccaggtgcagttctacggcctgagcgagaacgacgagtggacccaggacagagccaagcccgtgacccagatcgtgtctgccgaagcctggggcagagccgattgcggctttaccagcgagagctaccagcagggcgtgctgagcgccaccatcctgtacgagatcctgctgggcaaggccaccctgtacgccgtgctggtgtctgccctggtgctgatggctatggtcaagcggaaggacagccggggaagggccaagcgatctggatctggagcaacaaacttctcactactcaaacaagcaggtgacgtggaggagaatcccgggcctactagtatggactggatttggcgcatccttttccttgtcggcgctgctaccggcgcgcattccttcgaagttcagttggtagagtctggaggcggagtggtacaaccggggcggtctcttagacttagttgcgcagcaagcggtttctctttctctggctatgggatgcactgggtgagacaggcccctgggaaaggactggagtgggtggcctacatttcatacgacgggagtaataaatactatgcagactccgttaagggcaggttcacgatctctcgggacaattccaagaatacattgtatcttcagatgaatagtctccgagctgaagacacggcggtttactactgcgctaaagacccggcctggggacttcgacttggagagagttctagctacgattttgacatttggggacaagggacaatggtcactgtctcaagtacgcgtatccagaaccctgatcctgccgtgtaccagctgcgggatagcaagagcagcgacaagagcgtgtgtctgttcaccgacttcgacagccagaccaacgtgtcccagagcaaggactccgacgtgtacatcaccgataagtgcgtgctggacatgcggagcatggacttcaagagcaactccgccgtggcctggtccaacaagtccgatttcgcctgcgccaacgccttcaacaacagcattatccccgaggacacattcttcccaagccccgagagcagctgcgacgtgaagctggtggaaaagagcttcgagacagacaccaacctgaacttccagaacctgagcgtgatcggcttcagaatcctgctgctgaaagtggccggctttaacctgctgatgaccctgcggctgtggtccagc

SEQ ID NO: 6473 - DNA, 2586 bp, Artificial Sequence
  Synthetic Polynucloetide
atggccttaccagtgaccgccttgctcctgccgctggccttgctgctccacgccgccaggccgcagctccagctgcaagagtctggacctggcctggtcaagcctagcgagacactgagcctgacctgtaccgtgtccggcgatagcatcagcagcggcgattactactggggctggatcagacagcctcctggcaaaggactggaatggatcggccacatctactacagcggcgtgacctactacaaccccagcctgaagtccagagtgaccatcagcgtggacaccagccggaaccagttctccctgaagctgtctagcgtgacagccgccgataccgccgtgtactactgcaccagagaggacagcagcaactggcggagtagaggccagggaacactggtcacagttagctctctcgaggacctgaagaacgtgttcccacctgaggtggccgtgttcgagcctagcgaggccgagatcagccacacccagaaagccaccctcgtgtgcctggctaccggcttctaccccgaccatgtggaactgtcttggtgggtcaacggcaaagaggtgcacagcggcgtgtgtaccgacccccagccactgaaagaacagcccgccctgaacgacagccggtactgcctgagcagcagactgagagtgtccgccaccttctggcagaacccccggaaccacttcagatgccaggtgcagttctacggcctgagcgagaacgacgagtggacccaggacagagccaagcccgtgacccagatcgtgtctgccgaagcctggggcagagccgattgcggctttaccagcgagagctaccagcagggcgtgctgagcgccaccatcctgtacgagatcctgctgggcaaggccaccctgtacgccgtgctggtgtctgccctggtgctgatggctatggtcaagcggaaggacagccggggaagggccaagcgatctggatctggagcaacaaacttctcactactcaaacaagcaggtgacgtggaggagaatcccgggcctactagtatggactggatttggcgcatccttttccttgtcggcgctgctaccggcgcgcattccttcgaagttcagttggtagagtctggaggcggagtggtacaaccggggcggtctcttagacttagttgcgcagcaagcggtttctctttctctggctatgggatgcactgggtgagacaggcccctgggaaaggactggagtgggtggcctacatttcatacgacgggagtaataaatactatgcagactccgttaagggcaggttcacgatctctcgggacaattccaagaatacattgtatcttcagatgaatagtctccgagctgaagacacggcggtttactactgcgctaaagacccggcctggggacttcgacttggagagagttctagctacgattttgacatttggggacaagggacaatggtcactgtctcaagtacgcgtatccagaaccctgatcctgccgtgtaccagctgcgggatagcaagagcagcgacaagagcgtgtgtctgttcaccgacttcgacagccagaccaacgtgtcccagagcaaggactccgacgtgtacatcaccgataagtgcgtgctggacatgcggagcatggacttcaagagcaactccgccgtggcctggtccaacaagtccgatttcgcctgcgccaacgccttcaacaacagcattatccccgaggacacattcttcccaagccccgagagcagctgcgacgtgaagctggtggaaaagagcttcgagacagacaccaacctgaacttccagaacctgagcgtgatcggcttcagaatcctgctgctgaaagtggccggctttaacctgctgatgaccctgcggctgtggtccagccgcgccaagagaagcggatctggcgtgaagcagaccctgaatttcgacctgctgaagctggctggcgacgtggaatccaacccaggcccttctagaggcgggatccacaccatggctacctacgaggtgctgtgcgaggtggcaagaaagctgggcaccgacgacagagaagtggtgctgttcctgctgaacgtgttcatccctcagcctacactggcccagctgatcggtgcactgagagccctgaaagaggaaggccggctgacctttcctctgctggccgaatgcctgttcagagccggaagaagggatctgctgcgggacctgctgcatctggaccccagatttctggaaagacacctggccggcaccatgagctacttcagcccttaccagctgaccgtgctgcacgttgacggcgaactgtgcgccagagatattcggagcctgatcttcctgagcaaggacaccatcggcagccggtctacccctcagacatttctgcactgggtgtactgcatggaaaacctggacctgctcggccccacagatgtggatgccctgatgtccatgctgagaagcctgagcagagtggacctccagagacaggtgcagacactgatgggactgcacctgagcggacctagccacagccagcactacagacacacccct

SEQ ID NO: 6474 - DNA, 1923 bp, Artificial Sequence
  Synthetic Polynucloetide
atggccttaccagtgaccgccttgctcctgccgctggccttgctgctccacgccgccaggccgcagctccagctgcaagagtctggacctggcctggtcaagcctagcgagacactgagcctgacctgtaccgtgtccggcgatagcatcagcagcggcgattactactggggctggatcagacagcctcctggcaaaggactggaatggatcggccacatctactacagcggcgtgacctactacaaccccagcctgaagtccagagtgaccatcagcgtggacaccagccggaaccagttctccctgaagctgtctagcgtgacagccgccgataccgccgtgtactactgcaccagagaggacagcagcaactggcggagtagaggccagggaacactggtcacagttagctctctcgagatccagaaccctgatcctgccgtgtaccagctgcgggatagcaagagcagcgacaagagcgtgtgtctgttcaccgacttcgacagccagaccaacgtgtcccagagcaaggactccgacgtgtacatcaccgataagtgcgtgctggacatgcggagcatggacttcaagagcaactccgccgtggcctggtccaacaagtccgatttcgcctgcgccaacgccttcaacaacagcattatccccgaggacacattcttcccaagccccgagagcagctgcgacgtgaagctggtggaaaagagcttcgagacagacaccaacctgaacttccagaacctgagcgtgatcggcttcagaatcctgctgctgaaagtggccggctttaacctgctgatgaccctgcggctgtggtccagccgcgccaagagaagcggatctggcgtgaagcagaccctgaatttcgacctgctgaagctggctggcgacgtggaatccaacccaggccctactagtatggactggatttggcgcatccttttccttgtcggcgctgctaccggcgcgcattccttcgaagttcagttggtagagtctggaggcggagtggtacaaccggggcggtctcttagacttagttgcgcagcaagcggtttctctttctctggctatgggatgcactgggtgagacaggcccctgggaaaggactggagtgggtggcctacatttcatacgacgggagtaataaatactatgcagactccgttaagggcaggttcacgatctctcgggacaattccaagaatacattgtatcttcagatgaatagtctccgagctgaagacacggcggtttactactgcgctaaagacccggcctggggacttcgacttggagagagttctagctacgattttgacatttggggacaagggacaatggtcactgtctcaagtacgcgtgaggacctgaagaacgtgttcccacctgaggtggccgtgttcgagcctagcgaggccgagatcagccacacccagaaagccaccctcgtgtgcctggctaccggcttctaccccgaccatgtggaactgtcttggtgggtcaacggcaaagaggtgcacagcggcgtgtgtaccgacccccagccactgaaagaacagcccgccctgaacgacagccggtactgcctgagcagcagactgagagtgtccgccaccttctggcagaacccccggaaccacttcagatgccaggtgcagttctacggcctgagcgagaacgacgagtggacccaggacagagccaagcccgtgacccagatcgtgtctgccgaagcctggggcagagccgattgcggctttaccagcgagagctaccagcagggcgtgctgagcgccaccatcctgtacgagatcctgctgggcaaggccaccctgtacgccgtgctggtgtctgccctggtgctgatggctatggtcaagcggaaggacagccgggga

SEQ ID NO: 6475 - DNA, 2589 bp, Artificial Sequence
  Synthetic Polynucloetide
atggccttaccagtgaccgccttgctcctgccgctggccttgctgctccacgccgccaggccgcagctccagctgcaagagtctggacctggcctggtcaagcctagcgagacactgagcctgacctgtaccgtgtccggcgatagcatcagcagcggcgattactactggggctggatcagacagcctcctggcaaaggactggaatggatcggccacatctactacagcggcgtgacctactacaaccccagcctgaagtccagagtgaccatcagcgtggacaccagccggaaccagttctccctgaagctgtctagcgtgacagccgccgataccgccgtgtactactgcaccagagaggacagcagcaactggcggagtagaggccagggaacactggtcacagttagctctctcgagatccagaaccctgatcctgccgtgtaccagctgcgggatagcaagagcagcgacaagagcgtgtgtctgttcaccgacttcgacagccagaccaacgtgtcccagagcaaggactccgacgtgtacatcaccgataagtgcgtgctggacatgcggagcatggacttcaagagcaactccgccgtggcctggtccaacaagtccgatttcgcctgcgccaacgccttcaacaacagcattatccccgaggacacattcttcccaagccccgagagcagctgcgacgtgaagctggtggaaaagagcttcgagacagacaccaacctgaacttccagaacctgagcgtgatcggcttcagaatcctgctgctgaaagtggccggctttaacctgctgatgaccctgcggctgtggtccagccgcgccaagagaagcggatctggcgtgaagcagaccctgaatttcgacctgctgaagctggctggcgacgtggaatccaacccaggccctactagtatggactggatttggcgcatccttttccttgtcggcgctgctaccggcgcgcattccttcgaagttcagttggtagagtctggaggcggagtggtacaaccggggcggtctcttagacttagttgcgcagcaagcggtttctctttctctggctatgggatgcactgggtgagacaggcccctgggaaaggactggagtgggtggcctacatttcatacgacgggagtaataaatactatgcagactccgttaagggcaggttcacgatctctcgggacaattccaagaatacattgtatcttcagatgaatagtctccgagctgaagacacggcggtttactactgcgctaaagacccggcctggggacttcgacttggagagagttctagctacgattttgacatttggggacaagggacaatggtcactgtctcaagtacgcgtgaggacctgaagaacgtgttcccacctgaggtggccgtgttcgagcctagcgaggccgagatcagccacacccagaaagccaccctcgtgtgcctggctaccggcttctaccccgaccatgtggaactgtcttggtgggtcaacggcaaagaggtgcacagcggcgtgtgtaccgacccccagccactgaaagaacagcccgccctgaacgacagccggtactgcctgagcagcagactgagagtgtccgccaccttctggcagaacccccggaaccacttcagatgccaggtgcagttctacggcctgagcgagaacgacgagtggacccaggacagagccaagcccgtgacccagatcgtgtctgccgaagcctggggcagagccgattgcggctttaccagcgagagctaccagcagggcgtgctgagcgccaccatcctgtacgagatcctgctgggcaaggccaccctgtacgccgtgctggtgtctgccctggtgctgatggctatggtcaagcggaaggacagccggggaagggccaagcgatctggatctggagcaacaaacttctcactactcaaacaagcaggtgacgtggaggagaatcccgggccttctagaggcgggatccacaccatggctacctacgaggtgctgtgcgaggtggcaagaaagctgggcaccgacgacagagaagtggtgctgttcctgctgaacgtgttcatccctcagcctacactggcccagctgatcggtgcactgagagccctgaaagaggaaggccggctgacctttcctctgctggccgaatgcctgttcagagccggaagaagggatctgctgcgggacctgctgcatctggaccccagatttctggaaagacacctggccggcaccatgagctacttcagcccttaccagctgaccgtgctgcacgttgacggcgaactgtgcgccagagatattcggagcctgatcttcctgagcaaggacaccatcggcagccggtctacccctcagacatttctgcactgggtgtactgcatggaaaacctggacctgctcggccccacagatgtggatgccctgatgtccatgctgagaagcctgagcagagtggacctccagagacaggtgcagacactgatgggactgcacctgagcggacctagccacagccagcactacagacacacccct

SEQ ID NO: 6476 - DNA, 2733 bp, Artificial Sequence
  Synthetic Polynucloetide
atggccttaccagtgaccgccttgctcctgccgctggccttgctgctccacgccgccaggccgctcgaggggaaaccaattcccaaccctcttctgggactggattcaaccggcagcggcgaggacctgaagaacgtgttcccacctgaggtggccgtgttcgagcctagcaaggccgagatcgcccacacccagaaagccaccctcgtgtgcctggctaccggcttctaccccgaccatgtggaactgtcttggtgggtcaacggcaaagaggtgcacagcggcgtgtgtaccgacccccagccactgaaagaacagcccgccctgaacgacagccggtactgcctgagcagcagactgagagtgtccgccaccttctggcagaacccccggaaccacttcagatgccaggtgcagttctacggcctgagcgagaacgacgagtggacccaggacagagccaagcccgtgacccagatcgtgtctgccgaagcctggggcagagccgattgcggcatcaccagcgccagctaccaccagggcgtgctgagcgccaccatcctgtacgagatcctgctgggcaaggccaccctgtacgccgtgctggtgtctgccctggtgctgatggctatggtcaagcggaaggacagccggggaagggccaagcgatctggatctggagcaacaaacttctcactactcaaacaagcaggtgacgtggaggagaatcccgggcctactagcatggccttaccagtgaccgccttgctcctgccgctggccttgctgctccacgccgccaggccgcagctccagctgcaagagtctggacctggcctggtcaagcctagcgagacactgagcctgacctgtaccgtgtccggcgatagcatcagcagcggcgattactactggggctggatcagacagcctcctggcaaaggactggaatggatcggccacatctactacagcggcgtgacctactacaaccccagcctgaagtccagagtgaccatcagcgtggacaccagccggaaccagttctccctgaagctgtctagcgtgacagccgccgataccgccgtgtactactgcaccagagaggacagcagcaactggcggagtagaggccagggaacactggtcacagttagctctctcgagagcggcggaggcggatctttcgaagttcagttggtagagtctggaggcggagtggtacaaccggggcggtctcttagacttagttgcgcagcaagcggtttctctttctctggctatgggatgcactgggtgagacaggcccctgggaaaggactggagtgggtggcctacatttcatacgacgggagtaataaatactatgcagactccgttaagggcaggttcacgatctctcgggacaattccaagaatacattgtatcttcagatgaatagtctccgagctgaagacacggcggtttactactgcgctaaagacccggcctggggacttcgacttggagagagttctagctacgattttgacatttggggacaagggacaatggtcactgtctcaagtacgcgtgagcagaaactgatctcggaagaggatgggagcggcatccagaaccctgatcctgccgtgtaccagctgcgggatagcaagagcagcgacaagagcgtgtgtctgttcaccgacttcgacagccagaccaacgtgtcccagagcaaggactccgacgtgtacatcaccgataagtgcgtgctggacatgcggagcatggacttcaagagcaactccgccgtggcctggtccaacaagtccgatttcgcctgcgccaacgccttcaacaacagcattatccccgaggacacattcttcccaagcagcgacgtgccctgcgacgtgaagctggtggaaaagagcttcgagacagacaccaacctgaacttccagaacctgagcgtgatcggcttcagaatcctgctgctgaaagtggccggctttaacctgctgatgaccctgcggctgtggtccagccgcgccaagagaagcggatctggcgtgaagcagaccctgaatttcgacctgctgaagctggctggcgacgtggaatccaacccaggcccttctagaggccatatgaccgagtacaagcccacggtgcgcctcgccacccgcgacgacgtccccagggccgtacgcaccctcgccgccgcgttcgccgactaccccgccacgcgccacaccgtcgatccggaccgccacatcgagcgggtcaccgagctgcaagaactcttcctcacgcgcgtcgggctcgacatcggcaaggtgtgggtcgcggacgacggcgccgcggtggcggtctggaccacgccggagagcgtcgaagcgggggcggtgttcgccgagatcggcccgcgcatggccgagttgagcggttcccggctggccgcgcagcaacagatggaaggcctcctggcgccgcaccggcccaaggagcccgcgtggttcctggccaccgtcggcgtctcgcccgaccaccagggcaagggtctgggcagcgccgtcgtgctccccggagtggaggcggccgagcgcgccggggtgcccgccttcctggagacctccgcgccccgcaacctccccttctacgagcggctcggcttcaccgtcaccgccgacgtcgaggtgcccgaaggaccgcgcacctggtgcatgacccgcaagcccggtgcctga

SEQ ID NO: 6477 - DNA, 2736 bp, Artificial Sequence
  Synthetic Polynucloetide
atggccttaccagtgaccgccttgctcctgccgctggccttgctgctccacgccgccaggccgctcgagcagaaactgatctcggaagaggatctgggctccggcgatcgccctgatcctgccgtgtaccagctgcgggatagcaagagcagcgacaagagcgtgtgtctgttcaccgacttcgacagccagaccaacgtgtcccagagcaaggactccgacgtgtacatcaccgataagtgcgtgctggacatgcggagcatggacttcaagagcaactccgccgtggcctggtccaacaagtccgatttcgcctgcgccaacgccttcaacaacagcattatccccgaggacacattcttcccaagccccgagagcagctgcgacgtgaagctggtggaaaagagcttcgagacagacaccaacctgaacttccagaacctgagcgtgatcggcttcagaatcctgctgctgaaagtggccggctttaacctgctgatgaccctgcggctgtggtccagctctagtcgcgccaagagaagcggatctggcgtgaagcagaccctgaatttcgacctgctgaagctggctggcgacgtggaatccaacccaggccccactagcatggccttaccagtgaccgccttgctcctgccgctggccttgctgctccacgccgccaggccgcagctccagctgcaagagtctggacctggcctggtcaagcctagcgagacactgagcctgacctgtaccgtgtccggcgatagcatcagcagcggcgattactactggggctggatcagacagcctcctggcaaaggactggaatggatcggccacatctactacagcggcgtgacctactacaaccccagcctgaagtccagagtgaccatcagcgtggacaccagccggaaccagttctccctgaagctgtctagcgtgacagccgccgataccgccgtgtactactgcaccagagaggacagcagcaactggcggagtagaggccagggaacactggtcacagttagctctctcgagagcggcggaggcggatctttcgaagttcagttggtagagtctggaggcggagtggtacaaccggggcggtctcttagacttagttgcgcagcaagcggtttctctttctctggctatgggatgcactgggtgagacaggcccctgggaaaggactggagtgggtggcctacatttcatacgacgggagtaataaatactatgcagactccgttaagggcaggttcacgatctctcgggacaattccaagaatacattgtatcttcagatgaatagtctccgagctgaagacacggcggtttactactgcgctaaagacccggcctggggacttcgacttggagagagttctagctacgattttgacatttggggacaagggacaatggtcactgtctcaagtacgcgtgggaaaccaattcccaaccctcttctgggactggattcaaccggcagcggcgaggacctgaagaacgtgttcccacctgaggtggccgtgttcgagcctagcgaggccgagatcagccacacccagaaagccaccctcgtgtgcctggctaccggcttctaccccgaccatgtggaactgtcttggtgggtcaacggcaaagaggtgcacagcggcgtgtgtaccgacccccagccactgaaagaacagcccgccctgaacgacagccggtactgcctgagcagcagactgagagtgtccgccaccttctggcagaacccccggaaccacttcagatgccaggtgcagttctacggcctgagcgagaacgacgagtggacccaggacagagccaagcccgtgacccagatcgtgtctgccgaagcctggggcagagccgattgcggctttaccagcgagagctaccagcagggcgtgctgagcgccaccatcctgtacgagatcctgctgggcaaggccaccctgtacgccgtgctggtgtctgccctggtgctgatggctatggtcaagcggaaggacagccggggaagggccaagcgatctggatctggagcaacaaacttctcactactcaaacaagcaggtgacgtggaggagaatcccgggccttctagaggccatatgaccgagtacaagcccacggtgcgcctcgccacccgcgacgacgtccccagggccgtacgcaccctcgccgccgcgttcgccgactaccccgccacgcgccacaccgtcgatccggaccgccacatcgagcgggtcaccgagctgcaagaactcttcctcacgcgcgtcgggctcgacatcggcaaggtgtgggtcgcggacgacggcgccgcggtggcggtctggaccacgccggagagcgtcgaagcgggggcggtgttcgccgagatcggcccgcgcatggccgagttgagcggttcccggctggccgcgcagcaacagatggaaggcctcctggcgccgcaccggcccaaggagcccgcgtggttcctggccaccgtcggcgtctcgcccgaccaccagggcaagggtctgggcagcgccgtcgtgctccccggagtggaggcggccgagcgcgccggggtgcccgccttcctggagacctccgcgccccgcaacctccccttctacgagcggctcggcttcaccgtcaccgccgacgtcgaggtgcccgaaggaccgcgcacctggtgcatgacccgcaagcccggtgcctga

SEQ ID NO: 6478 - DNA, 2613 bp, Artificial Sequence
  Synthetic Polynucloetide
atggccttaccagtgaccgccttgctcctgccgctggccttgctgctccacgccgccaggccgcagctccagctgcaagagtctggacctggcctggtcaagcctagcgagacactgagcctgacctgtaccgtgtccggcgatagcatcagcagcggcgattactactggggctggatcagacagcctcctggcaaaggactggaatggatcggccacatctactacagcggcgtgacctactacaaccccagcctgaagtccagagtgaccatcagcgtggacaccagccggaaccagttctccctgaagctgtctagcgtgacagccgccgataccgccgtgtactactgcaccagagaggacagcagcaactggcggagtagaggccagggaacactggtcacagttagctctctcgaggacctgaagaacgtgttcccacctgaggtggccgtgttcgagcctagcgaggccgagatcagccacacccagaaagccaccctcgtgtgcctggctaccggcttctaccccgaccatgtggaactgtcttggtgggtcaacggcaaagaggtgcacagcggcgtgtctaccgacccccagccactgaaagaacagcccgccctgaacgacagccggtactgcctgagcagcagactgagagtgtccgccaccttctggcagaacccccggaaccacttcagatgccaggtgcagttctacggcctgagcgagaacgacgagtggacccaggacagagccaagcccgtgacccagatcgtgtctgccgaagcctggggcagagccgattgcggctttaccagcgagagctaccagcagggcgtgctgagcgccaccatcctgtacgagatcctgctgggcaaggccaccctgtacgccgtgctggtgtctgccctggtgctgatggctatggtcaagcggaaggacagccggggaagggccaagcgatctggatctggagcaacaaacttctcactactcaaacaagcaggtgacgtggaggagaatcccgggcctactagtatggactggatttggcgcatccttttccttgtcggcgctgctaccggcgcgcattccttcgaagttcagttggtagagtctggaggcggagtggtacaaccggggcggtctcttagacttagttgcgcagcaagcggtttctctttctctggctatgggatgcactgggtgagacaggcccctgggaaaggactggagtgggtggcctacatttcatacgacgggagtaataaatactatgcagactccgttaagggcaggttcacgatctctcgggacaattccaagaatacattgtatcttcagatgaatagtctccgagctgaagacacggcggtttactactgcgctaaagacccggcctggggacttcgacttggagagagttctagctacgattttgacatttggggacaagggacaatggtcactgtctcaagtacgcgtatccagaaccctgatcctgccgtgtaccagctgcgggatagcaagagcagcgacaagagcgtgtgtctgttcaccgacttcgacagccagaccaacgtgtcccagagcaaggactccgacgtgtacatcaccgataagaccgtgctggacatgcggagcatggacttcaagagcaactccgccgtggcctggtccaacaagtccgatttcgcctgcgccaacgccttcaacaacagcattatccccgaggacacattcttcccaagccccgagagcagctgcgacgtgaagctggtggaaaagagcttcgagacagacaccaacctgaacttccagaacctgagcgtgatcggcttcagaatcctgctgctgaaagtggccggctttaacctgctgatgaccctgcggctgtggtccagccgcgccaagagaagcggatctggcgtgaagcagaccctgaatttcgacctgctgaagctggctggcgacgtggaatccaacccaggcccttctagaggccatatgaccgagtacaagcccacggtgcgcctcgccacccgcgacgacgtccccagggccgtacgcaccctcgccgccgcgttcgccgactaccccgccacgcgccacaccgtcgatccggaccgccacatcgagcgggtcaccgagctgcaagaactcttcctcacgcgcgtcgggctcgacatcggcaaggtgtgggtcgcggacgacggcgccgcggtggcggtctggaccacgccggagagcgtcgaagcgggggcggtgttcgccgagatcggcccgcgcatggccgagttgagcggttcccggctggccgcgcagcaacagatggaaggcctcctggcgccgcaccggcccaaggagcccgcgtggttcctggccaccgtcggcgtctcgcccgaccaccagggcaagggtctgggcagcgccgtcgtgctccccggagtggaggcggccgagcgcgccggggtgcccgccttcctggagacctccgcgccccgcaacctccccttctacgagcggctcggcttcaccgtcaccgccgacgtcgaggtgcccgaaggaccgcgcacctggtgcatgacccgcaagcccggtgcctga

SEQ ID NO: 6479 - DNA, 2859 bp, Artificial Sequence
  Synthetic Polynucloetide
atggccttaccagtgaccgccttgctcctgccgctggccttgctgctccacgccgccaggccgcagctccagctgcaagagtctggacctggcctggtcaagcctagcgagacactgagcctgacctgtaccgtgtccggcgatagcatcagcagcggcgattactactggggctggatcagacagcctcctggcaaaggactggaatggatcggccacatctactacagcggcgtgacctactacaaccccagcctgaagtccagagtgaccatcagcgtggacaccagccggaaccagttctccctgaagctgtctagcgtgacagccgccgataccgccgtgtactactgcaccagagaggacagcagcaactggcggagtagaggccagggaacactggtcacagttagctctctcgaggacctgaagaacgtgttcccacctgaggtggccgtgttcgagcctagcgaggccgagatcagccacacccagaaagccaccctcgtgtgcctggctaccggcttctaccccgaccatgtggaactgtcttggtgggtcaacggcaaagaggtgcacagcggcgtgtctaccgacccccagccactgaaagaacagcccgccctgaacgacagccggtactgcctgagcagcagactgagagtgtccgccaccttctggcagaacccccggaaccacttcagatgccaggtgcagttctacggcctgagcgagaacgacgagtggacccaggacagagccaagcccgtgacccagatcgtgtctgccgaagcctggggcagagccgattgcggctttaccagcgagagctaccagcagggcgtgctgagcgccaccatcctgtacgagatcctgctgggcaaggccaccctgtacgccgtgctggtgtctgccctggtgctgatggctatggtcaagcggaaggacagccggggaagggccaagcgatctggatctggagcaacaaacttctcactactcaaacaagcaggtgacgtggaggagaatcccgggcctactagtatggactggatttggcgcatccttttccttgtcggcgctgctaccggcgcgcattccttcgaagttcagttggtagagtctggaggcggagtggtacaaccggggcggtctcttagacttagttgcgcagcaagcggtttctctttctctggctatgggatgcactgggtgagacaggcccctgggaaaggactggagtgggtggcctacatttcatacgacgggagtaataaatactatgcagactccgttaagggcaggttcacgatctctcgggacaattccaagaatacattgtatcttcagatgaatagtctccgagctgaagacacggcggtttactactgcgctaaagacccggcctggggacttcgacttggagagagttctagctacgattttgacatttggggacaagggacaatggtcactgtctcaagtacgcgtgagcagaaactgatctcggaagaggatgggagcggcaccccattcccttctctggcccctcccatcatgctgctggtggacggcaagcagcagatggtggtcgtgtgcctggtgctggatgtggccccacctggactggacagccccatctggtttagcgccggcaatggctctgccctggacgcctttacctacggcccaagccctgccaccgatggcacctggacaaatctggcccacctgagcctgcccagcgaggaactggcttcttgggagcctctcgtgtgccacacaggacctggcgctgagggacacagcagatccacccagcctatgcacctgtctggcgaggccagcaccgccagaacctgtcctcaggaacctctgagaggcacccctggcggagcactgtggctgggagtgctgagactgctgctgttcaagctgctgctgtttgacctgctgctgacctgctcctgtctgtgcgatcctgccggccctctgccttctcctgccaccaccacaagactgagagccctgggcagccacagactgcaccctgccacagagacaggcggcagagaggccacaagcagccctagaccccagcccagagacagaagatggggcgataccccccctggcagaaagcctggatctccagtccgcgccaagagaagcggatctggcgtgaagcagaccctgaatttcgacctgctgaagctggctggcgacgtggaatccaacccaggcccttctagaggccatatgaccgagtacaagcccacggtgcgcctcgccacccgcgacgacgtccccagggccgtacgcaccctcgccgccgcgttcgccgactaccccgccacgcgccacaccgtcgatccggaccgccacatcgagcgggtcaccgagctgcaagaactcttcctcacgcgcgtcgggctcgacatcggcaaggtgtgggtcgcggacgacggcgccgcggtggcggtctggaccacgccggagagcgtcgaagcgggggcggtgttcgccgagatcggcccgcgcatggccgagttgagcggttcccggctggccgcgcagcaacagatggaaggcctcctggcgccgcaccggcccaaggagcccgcgtggttcctggccaccgtcggcgtctcgcccgaccaccagggcaagggtctgggcagcgccgtcgtgctccccggagtggaggcggccgagcgcgccggggtgcccgccttcctggagacctccgcgccccgcaacctccccttctacgagcggctcggcttcaccgtcaccgccgacgtcgaggtgcccgaaggaccgcgcacctggtgcatgacccgcaagcccggtgcctga

SEQ ID NO: 6480 - DNA, 2898 bp, Artificial Sequence
  Synthetic Polynucloetide
atggccttaccagtgaccgccttgctcctgccgctggccttgctgctccacgccgccaggccgctcgaggacctgaagaacgtgttcccacctgaggtggccgtgttcgagcctagcgaggccgagatcagccacacccagaaagccaccctcgtgtgcctggctaccggcttctaccccgaccatgtggaactgtcttggtgggtcaacggcaaagaggtgcacagcggcgtgtctaccgacccccagccactgaaagaacagcccgccctgaacgacagccggtactgcctgagcagcagactgagagtgtccgccaccttctggcagaacccccggaaccacttcagatgccaggtgcagttctacggcctgagcgagaacgacgagtggacccaggacagagccaagcccgtgacccagatcgtgtctgccgaagcctggggcagagccgattgcggctttaccagcgagagctaccagcagggcgtgctgagcgccaccatcctgtacgagatcctgctgggcaaggccaccctgtacgccgtgctggtgtctgccctggtgctgatggctatggtcaagcggaaggacagccggggaagggccaagcgatctggatctggagcaacaaacttctcactactcaaacaagcaggtgacgtggaggagaatcccgggcctactagcatggccttaccagtgaccgccttgctcctgccgctggccttgctgctccacgccgccaggccgcagctccagctgcaagagtctggacctggcctggtcaagcctagcgagacactgagcctgacctgtaccgtgtccggcgatagcatcagcagcggcgattactactggggctggatcagacagcctcctggcaaaggactggaatggatcggccacatctactacagcggcgtgacctactacaaccccagcctgaagtccagagtgaccatcagcgtggacaccagccggaaccagttctccctgaagctgtctagcgtgacagccgccgataccgccgtgtactactgcaccagagaggacagcagcaactggcggagtagaggccagggaacactggtcacagttagctctctcgagagcggcggaggcggatctttcgaagttcagttggtagagtctggaggcggagtggtacaaccggggcggtctcttagacttagttgcgcagcaagcggtttctctttctctggctatgggatgcactgggtgagacaggcccctgggaaaggactggagtgggtggcctacatttcatacgacgggagtaataaatactatgcagactccgttaagggcaggttcacgatctctcgggacaattccaagaatacattgtatcttcagatgaatagtctccgagctgaagacacggcggtttactactgcgctaaagacccggcctggggacttcgacttggagagagttctagctacgattttgacatttggggacaagggacaatggtcactgtctcaagtacgcgtgagcagaaactgatctcggaagaggatctggggagcggcaccccattcccttctctggcccctcccatcatgctgctggtggacggcaagcagcagatggtggtcgtgtgcctggtgctggatgtggccccacctggactggacagccccatctggtttagcgccggcaatggctctgccctggacgcctttacctacggcccaagccctgccaccgatggcacctggacaaatctggcccacctgagcctgcccagcgaggaactggcttcttgggagcctctcgtgtgccacacaggacctggcgctgagggacacagcagatccacccagcctatgcacctgtctggcgaggccagcaccgccagaacctgtcctcaggaacctctgagaggcacccctggcggagcactgtggctgggagtgctgagactgctgctgttcaagctgctgctgtttgacctgctgctgacctgctcctgtctgtgcgatcctgccggccctctgccttctcctgccaccaccacaagactgagagccctgggcagccacagactgcaccctgccacagagacaggcggcagagaggccacaagcagccctagaccccagcccagagacagaagatggggcgataccccccctggcagaaagcctggatctccagtccgcgccaagagaagcggatctggcgtgaagcagaccctgaatttcgacctgctgaagctggctggcgacgtggaatccaacccaggcccttctagatctagaggccatatgaccgagtacaagcccacggtgcgcctcgccacccgcgacgacgtccccagggccgtacgcaccctcgccgccgcgttcgccgactaccccgccacgcgccacaccgtcgatccggaccgccacatcgagcgggtcaccgagctgcaagaactcttcctcacgcgcgtcgggctcgacatcggcaaggtgtgggtcgcggacgacggcgccgcggtggcggtctggaccacgccggagagcgtcgaagcgggggcggtgttcgccgagatcggcccgcgcatggccgagttgagcggttcccggctggccgcgcagcaacagatggaaggcctcctggcgccgcaccggcccaaggagcccgcgtggttcctggccaccgtcggcgtctcgcccgaccaccagggcaagggtctgggcagcgccgtcgtgctccccggagtggaggcggccgagcgcgccggggtgcccgccttcctggagacctccgcgccccgcaacctccccttctacgagcggctcggcttcaccgtcaccgccgacgtcgaggtgcccgaaggaccgcgcacctggtgcatgacccgcaagcccggtgcctga

SEQ ID NO: 6481 - DNA, 2724 bp, Artificial Sequence
  Synthetic Polynucloetide
atggccttaccagtgaccgccttgctcctgccgctggccttgctgctccacgccgccaggccgcagctccagctgcaagagtctggacctggcctggtcaagcctagcgagacactgagcctgacctgtaccgtgtccggcgatagcatcagcagcggcgattactactggggctggatcagacagcctcctggcaaaggactggaatggatcggccacatctactacagcggcgtgacctactacaaccccagcctgaagtccagagtgaccatcagcgtggacaccagccggaaccagttctccctgaagctgtctagcgtgacagccgccgataccgccgtgtactactgcaccagagaggacagcagcaactggcggagtagaggccagggaacactggtcacagttagctctctcgaggggaaaccaattcccaaccctcttctgggactggattcaaccggcagcggcgacaagcagctggacgccgacgtgtcccccaagcctaccatcttcctgccctctatcgccgagacaaagctccagaaggccggcacctacctgtgcctgctggaaaagttcttcccagatgtgattaagatccactggcaggaaaagaagtccaacaccatcctgggcagccaggaaggcaacaccatgaagaccaacgacacctacatgaagttcagctggctgaccgtgcccgagaagtccctggacaaagaacacagatgcatcgtgcggcacgaaaacaacaagaacggcgtggaccaggaaatcatcttcccacccatcaagaccgatgtgattacaatggaccccaaggacaactgctccaaggacgccaacgataccctgctgctccagctgaccaacaccagcgcctactacatgtacttgttgctgctgctgaagtccgtggtgtacttcgccatcatcacatgctgcctgctgcggagaaccgccttctgctgcaacggcgagaagtctagggccaagcgatctggatctggagcaacaaacttctcactactcaaacaagcaggtgacgtggaggagaatcccgggcctactagtatggactggatttggcgcatccttttccttgtcggcgctgctaccggcgcgcattccttcgaagttcagttggtagagtctggaggcggagtggtacaaccggggcggtctcttagacttagttgcgcagcaagcggtttctctttctctggctatgggatgcactgggtgagacaggcccctgggaaaggactggagtgggtggcctacatttcatacgacgggagtaataaatactatgcagactccgttaagggcaggttcacgatctctcgggacaattccaagaatacattgtatcttcagatgaatagtctccgagctgaagacacggcggtttactactgcgctaaagacccggcctggggacttcgacttggagagagttctagctacgattttgacatttggggacaagggacaatggtcactgtctcaagtacgcgtgagcagaaactgatctcggaagaggatgggagcggcagccagcctcacaccaagcccagcgtgttcgtgatgaagaacggcaccaacgtggcctgcctcgtgaaagagttctaccccaaggacatcaggatcaacctggtgtccagcaagaagatcaccgagttcgaccccgccatcgtgatctcccccagcggcaagtacaacgccgtgaagctggggaagtacgaggacagcaacagcgtgacctgctccgtgcagcacgacaacaagaccgtgcacagcaccgactttgaagtgaaaaccgactccaccgaccacgtgaagcccaaagagacagagaacaccaagcagcccagcaagagctgccacaagcccaaggccatcgtgcacaccgagaaagtgaacatgatgagcctgaccgtgctgggcctgcggatgctgttcgccaaaaccgtggccgtgaacttcctgctgaccgccaagctgttcttcctccgcgccaagagaagcggatctggcgtgaagcagaccctgaatttcgacctgctgaagctggctggcgacgtggaatccaacccaggcccttctagaggccatatgaccgagtacaagcccacggtgcgcctcgccacccgcgacgacgtccccagggccgtacgcaccctcgccgccgcgttcgccgactaccccgccacgcgccacaccgtcgatccggaccgccacatcgagcgggtcaccgagctgcaagaactcttcctcacgcgcgtcgggctcgacatcggcaaggtgtgggtcgcggacgacggcgccgcggtggcggtctggaccacgccggagagcgtcgaagcgggggcggtgttcgccgagatcggcccgcgcatggccgagttgagcggttcccggctggccgcgcagcaacagatggaaggcctcctggcgccgcaccggcccaaggagcccgcgtggttcctggccaccgtcggcgtctcgcccgaccaccagggcaagggtctgggcagcgccgtcgtgctccccggagtggaggcggccgagcgcgccggggtgcccgccttcctggagacctccgcgccccgcaacctccccttctacgagcggctcggcttcaccgtcaccgccgacgtcgaggtgcccgaaggaccgcgcacctggtgcatgacccgcaagcccggtgcctga

SEQ ID NO: 6482 - DNA, 1935 bp, Artificial Sequence
  Synthetic Polynucloetide
atggccttaccagtgaccgccttgctcctgccgctggccttgctgctccacgccgccaggccgcagctccagctgcaagagtctggacctggcctggtcaagcctagcgagacactgagcctgacctgtaccgtgtccggcgatagcatcagcagcggcgattactactggggctggatcagacagcctcctggcaaaggactggaatggatcggccacatctactacagcggcgtgacctactacaaccccagcctgaagtccagagtgaccatcagcgtggacaccagccggaaccagttctccctgaagctgtctagcgtgacagccgccgataccgccgtgtactactgcaccagagaggacagcagcaactggcggagtagaggccagggaacactggtcacagttagctctctcgagagccagcctcacaccaagcccagcgtgttcgtgatgaagaacggcaccaacgtggcctgcctcgtgaaagagttctaccccaaggacatcaggatcaacctggtgtccagcaagaagatcaccgagttcgaccccgccatcgtgatctcccccagcggcaagtacaacgccgtgaagctggggaagtacgaggacagcaacagcgtgacctgctccgtgcagcacgacaacaagaccgtgcacagcaccgactttgaagtgaaaaccgactccaccgaccacgtgaagcccaaagagacagagaacaccaagcagcccagcaagagctgccacaagcccaaggccatcgtgcacaccgagaaagtgaacatgatgagcctgaccgtgctgggcctgcggatgctgttcgccaaaaccgtggccgtgaacttcctgctgaccgccaagctgttcttcctcagggccaagcgatctggatctggagcaacaaacttctcactactcaaacaagcaggtgacgtggaggagaatcccgggcctactagtatggactggatttggcgcatccttttccttgtcggcgctgctaccggcgcgcattccttcgaagttcagttggtagagtctggaggcggagtggtacaaccggggcggtctcttagacttagttgcgcagcaagcggtttctctttctctggctatgggatgcactgggtgagacaggcccctgggaaaggactggagtgggtggcctacatttcatacgacgggagtaataaatactatgcagactccgttaagggcaggttcacgatctctcgggacaattccaagaatacattgtatcttcagatgaatagtctccgagctgaagacacggcggtttactactgcgctaaagacccggcctggggacttcgacttggagagagttctagctacgattttgacatttggggacaagggacaatggtcactgtctcaagtacgcgtgacaagcagctggacgccgacgtgtcccccaagcctaccatcttcctgccctctatcgccgagacaaagctccagaaggccggcacctacctgtgcctgctggaaaagttcttcccagatgtgattaagatccactggcaggaaaagaagtccaacaccatcctgggcagccaggaaggcaacaccatgaagaccaacgacacctacatgaagttcagctggctgaccgtgcccgagaagtccctggacaaagaacacagatgcatcgtgcggcacgaaaacaacaagaacggcgtggaccaggaaatcatcttcccacccatcaagaccgatgtgattacaatggaccccaaggacaactgctccaaggacgccaacgataccctgctgctccagctgaccaacaccagcgcctactacatgtacttgttgctgctgctgaagtccgtggtgtacttcgccatcatcacatgctgcctgctgcggagaaccgccttctgctgcaacggcgagaagtct

SEQ ID NO: 6483 - DNA, 2754 bp, Artificial Sequence
  Synthetic Polynucloetide
atggccttaccagtgaccgccttgctcctgccgctggccttgctgctccacgccgccaggccgctcgaggggaaaccaattcccaaccctcttctgggactggattcaaccggcagcggcgacaagcagctggacgccgacgtgtcccccaagcctaccatcttcctgccctctatcgccgagacaaagctccagaaggccggcacctacctgtgcctgctggaaaagttcttcccagatgtgattaagatccactggcaggaaaagaagtccaacaccatcctgggcagccaggaaggcaacaccatgaagaccaacgacacctacatgaagttcagctggctgaccgtgcccgagaagtccctggacaaagaacacagatgcatcgtgcggcacgaaaacaacaagaacggcgtggaccaggaaatcatcttcccacccatcaagaccgatgtgattacaatggaccccaaggacaactgctccaaggacgccaacgataccctgctgctccagctgaccaacaccagcgcctactacatgtacttgttgctgctgctgaagtccgtggtgtacttcgccatcatcacatgctgcctgctgcggagaaccgccttctgctgcaacggcgagaagtctagggccaagcgatctggatctggagcaacaaacttctcactactcaaacaagcaggtgacgtggaggagaatcccgggcctactagcatggccttaccagtgaccgccttgctcctgccgctggccttgctgctccacgccgccaggccgcagctccagctgcaagagtctggacctggcctggtcaagcctagcgagacactgagcctgacctgtaccgtgtccggcgatagcatcagcagcggcgattactactggggctggatcagacagcctcctggcaaaggactggaatggatcggccacatctactacagcggcgtgacctactacaaccccagcctgaagtccagagtgaccatcagcgtggacaccagccggaaccagttctccctgaagctgtctagcgtgacagccgccgataccgccgtgtactactgcaccagagaggacagcagcaactggcggagtagaggccagggaacactggtcacagttagctctctcgagagcggcggaggcggatctttcgaagttcagttggtagagtctggaggcggagtggtacaaccggggcggtctcttagacttagttgcgcagcaagcggtttctctttctctggctatgggatgcactgggtgagacaggcccctgggaaaggactggagtgggtggcctacatttcatacgacgggagtaataaatactatgcagactccgttaagggcaggttcacgatctctcgggacaattccaagaatacattgtatcttcagatgaatagtctccgagctgaagacacggcggtttactactgcgctaaagacccggcctggggacttcgacttggagagagttctagctacgattttgacatttggggacaagggacaatggtcactgtctcaagtacgcgtgagcagaaactgatctcggaagaggatgggagcggcagccagcctcacaccaagcccagcgtgttcgtgatgaagaacggcaccaacgtggcctgcctcgtgaaagagttctaccccaaggacatcaggatcaacctggtgtccagcaagaagatcaccgagttcgaccccgccatcgtgatctcccccagcggcaagtacaacgccgtgaagctggggaagtacgaggacagcaacagcgtgacctgctccgtgcagcacgacaacaagaccgtgcacagcaccgactttgaagtgaaaaccgactccaccgaccacgtgaagcccaaagagacagagaacaccaagcagcccagcaagagctgccacaagcccaaggccatcgtgcacaccgagaaagtgaacatgatgagcctgaccgtgctgggcctgcggatgctgttcgccaaaaccgtggccgtgaacttcctgctgaccgccaagctgttcttcctccgcgccaagagaagcggatctggcgtgaagcagaccctgaatttcgacctgctgaagctggctggcgacgtggaatccaacccaggcccttctagaggccatatgaccgagtacaagcccacggtgcgcctcgccacccgcgacgacgtccccagggccgtacgcaccctcgccgccgcgttcgccgactaccccgccacgcgccacaccgtcgatccggaccgccacatcgagcgggtcaccgagctgcaagaactcttcctcacgcgcgtcgggctcgacatcggcaaggtgtgggtcgcggacgacggcgccgcggtggcggtctggaccacgccggagagcgtcgaagcgggggcggtgttcgccgagatcggcccgcgcatggccgagttgagcggttcccggctggccgcgcagcaacagatggaaggcctcctggcgccgcaccggcccaaggagcccgcgtggttcctggccaccgtcggcgtctcgcccgaccaccagggcaagggtctgggcagcgccgtcgtgctccccggagtggaggcggccgagcgcgccggggtgcccgccttcctggagacctccgcgccccgcaacctccccttctacgagcggctcggcttcaccgtcaccgccgacgtcgaggtgcccgaaggaccgcgcacctggtgcatgacccgcaagcccggtgcctga

SEQ ID NO: 6484 - DNA, 3144 bp, Artificial Sequence
  Synthetic Polynucloetide
atggccttaccagtgaccgccttgctcctgccgctggccttgctgctccacgccgccaggccgcagctccagctgcaagagtctggacctggcctggtcaagcctagcgagacactgagcctgacctgtaccgtgtccggcgatagcatcagcagcggcgattactactggggctggatcagacagcctcctggcaaaggactggaatggatcggccacatctactacagcggcgtgacctactacaaccccagcctgaagtccagagtgaccatcagcgtggacaccagccggaaccagttctccctgaagctgtctagcgtgacagccgccgataccgccgtgtactactgcaccagagaggacagcagcaactggcggagtagaggccagggaacactggtcacagttagctctggacagcctaaggccaatcctaccgtgacactgttccctccaagcagcgaagaactccaggccaacaaggccacacttgtgtgcctgatctccgacttctaccctggggctgtgacagtggcttggaaggccgatggatctcctgtgaaagccggcgtggaaaccaccaagccatccaagcagagcaacaacaaatacgccgccagctcctacctgagcctgacacctgagcagtggaagtcccacagatcctacagctgccaagtgacccacgaaggcagcaccgtggaaaagacagtggcccctacagagtgcagcggatcccagagcttcggcctgctggaccccaagctgtgctacctgctggatggcatcctgttcatctacggcgtgatcctgaccgccctgttcctgagagtgaagttcagcagaagcgccgacgcccctgcctaccagcagggacagaaccaactgtacaacgagctgaacctgggcagacgggaagagtacgacgtgctggacaagcggagaggcagggaccctgagatgggcggaaagccccagcggagaaagaacccccaggaaggactgtataacgaactccagaaagacaagatggccgaagcctacagcgagatcggcatgaagggcgagcggagaagaggcaagggccacgatggcctgtaccagggcctgagcaccgccaccaaggacacctatgacgccctgcacatgcaggccctgcctccaagaagggccaagcgatctggatctggagcaacaaacttctcactactcaaacaagcaggtgacgtggaggagaatcccgggcctactagtatggactggatttggcgcatccttttccttgtcggcgctgctaccggcgcgcattccttcgaagttcagttggtagagtctggaggcggagtggtacaaccggggcggtctcttagacttagttgcgcagcaagcggtttctctttctctggctatgggatgcactgggtgagacaggcccctgggaaaggactggagtgggtggcctacatttcatacgacgggagtaataaatactatgcagactccgttaagggcaggttcacgatctctcgggacaattccaagaatacattgtatcttcagatgaatagtctccgagctgaagacacggcggtttactactgcgctaaagacccggcctggggacttcgacttggagagagttctagctacgattttgacatttggggacaagggacaatggtcactgtctcaagtgcctctacaaagggaccctccgtgtttcctctggctcccagcagcaagtctacaagcggaggaacagccgctctgggctgcctggtcaaggattactttcccgagcctgtgaccgtgtcctggaatagcggagcactgacaagcggcgtgcacacctttccagccgtgctgcaaagcagcggcctgtactctctgagcagcgtggtcacagtgcctagctctagcctgggcacccagacctacatctgcaatgtgaaccacaagcctagcaacaccaaggtggacaagagagtggaacccaagagctgtggtacccagagttttgggttgttggaccctaaattgtgctatctgttggacggaatcctgttcatttacggagtgatcctgaccgcattgttcctgcgggttaagttttccagatccgcagacgcacccgcttaccaacaagggcagaaccaactctacaatgaacttaatttggggcggagggaagagtacgacgttctggacaaaaggaggggacgagatcccgagatgggcggaaagcctcagcgaaggaagaatccgcaagaggggctttataacgaactccagaaagataaaatggcagaagcctatagtgagattgggatgaagggagaaaggaggaggggtaaaggtcacgatgggttgtaccaaggattgagcacagccactaaagatacctatgatgcgctccacatgcaggccctgccgccaagacgcgccaagagaagcggatctggcgtgaagcagaccctgaatttcgacctgctgaagctggctggcgacgtggaatccaacccaggcccttctagaggccatatgaccgagtacaagcccacggtgcgcctcgccacccgcgacgacgtccccagggccgtacgcaccctcgccgccgcgttcgccgactaccccgccacgcgccacaccgtcgatccggaccgccacatcgagcgggtcaccgagctgcaagaactcttcctcacgcgcgtcgggctcgacatcggcaaggtgtgggtcgcggacgacggcgccgcggtggcggtctggaccacgccggagagcgtcgaagcgggggcggtgttcgccgagatcggcccgcgcatggccgagttgagcggttcccggctggccgcgcagcaacagatggaaggcctcctggcgccgcaccggcccaaggagcccgcgtggttcctggccaccgtcggcgtctcgcccgaccaccagggcaagggtctgggcagcgccgtcgtgctccccggagtggaggcggccgagcgcgccggggtgcccgccttcctggagacctccgcgccccgcaacctccccttctacgagcggctcggcttcaccgtcaccgccgacgtcgaggtgcccgaaggaccgcgcacctggtgcatgacccgcaagcccggtgcctga

SEQ ID NO: 6485 - DNA, 2499 bp, Artificial Sequence
  Synthetic Polynucloetide
atggccttaccagtgaccgccttgctcctgccgctggccttgctgctccacgccgccaggccgcagctccagctgcaagagtctggacctggcctggtcaagcctagcgagacactgagcctgacctgtaccgtgtccggcgatagcatcagcagcggcgattactactggggctggatcagacagcctcctggcaaaggactggaatggatcggccacatctactacagcggcgtgacctactacaaccccagcctgaagtccagagtgaccatcagcgtggacaccagccggaaccagttctccctgaagctgtctagcgtgacagccgccgataccgccgtgtactactgcaccagagaggacagcagcaactggcggagtagaggccagggaacactggtcacagttagctctctcgaggacctgaagaacgtgttcccacctgaggtggccgtgttcgagcctagcgaggccgagatcagccacacccagaaagccaccctcgtgtgcctggctaccggcttctaccccgaccatgtggaactgtcttggtgggtcaacggcaaagaggtgcacagcggcgtgtctaccgacccccagccactgaaagaacagcccgccctgaacgacagccggtactgcctgagcagcagactgagagtgtccgccaccttctggcagaacccccggaaccacttcagatgccaggtgcagttctacggcctgagcgagaacgacgagtggacccaggacagagccaagcccgtgacccagatcgtgtctgccgaagcctggggcagagccgattgcggatcccagagcttcggcctgctggaccccaagctgtgctacctgctggatggcatcctgttcatctacggcgtgatcctgaccgccctgttcctgagagtgaagttcagcagaagcgccgacgcccctgcctaccagcagggacagaaccaactgtacaacgagctgaacctgggcagacgggaagagtacgacgtgctggacaagcggagaggcagggaccctgagatgggcggaaagccccagcggagaaagaacccccaggaaggactgtataacgaactccagaaagacaagatggccgaagcctacagcgagatcggcatgaagggcgagcggagaagaggcaagggccacgatggcctgtaccagggcctgagcaccgccaccaaggacacctatgacgccctgcacatgcaggccctgcctccaagaagggccaagcgatctggatctggagcaacaaacttctcactactcaaacaagcaggtgacgtggaggagaatcccgggcctactagtatggactggatttggcgcatccttttccttgtcggcgctgctaccggcgcgcattccttcgaagttcagttggtagagtctggaggcggagtggtacaaccggggcggtctcttagacttagttgcgcagcaagcggtttctctttctctggctatgggatgcactgggtgagacaggcccctgggaaaggactggagtgggtggcctacatttcatacgacgggagtaataaatactatgcagactccgttaagggcaggttcacgatctctcgggacaattccaagaatacattgtatcttcagatgaatagtctccgagctgaagacacggcggtttactactgcgctaaagacccggcctggggacttcgacttggagagagttctagctacgattttgacatttggggacaagggacaatggtcactgtctcaagtacgcgtatccagaaccctgatcctgccgtgtaccagctgcgggatagcaagagcagcgacaagagcgtgtgtctgttcaccgacttcgacagccagaccaacgtgtcccagagcaaggactccgacgtgtacatcaccgataagaccgtgctggacatgcggagcatggacttcaagagcaactccgccgtggcctggtccaacaagtccgatttcgcctgcgccaacgccttcaacaacagcattatccccgaggacacattcttcccaagccccgagagcagctgcggtacccagagttttgggttgttggaccctaaattgtgctatctgttggacggaatcctgttcatttacggagtgatcctgaccgcattgttcctgcgggttaagttttccagatccgcagacgcacccgcttaccaacaagggcagaaccaactctacaatgaacttaatttggggcggagggaagagtacgacgttctggacaaaaggaggggacgagatcccgagatgggcggaaagcctcagcgaaggaagaatccgcaagaggggctttataacgaactccagaaagataaaatggcagaagcctatagtgagattgggatgaagggagaaaggaggaggggtaaaggtcacgatgggttgtaccaaggattgagcacagccactaaagatacctatgatgcgctccacatgcaggccctgccgccaaga

SEQ ID NO: 6486 - DNA, 2499 bp, Artificial Sequence
  Synthetic Polynucloetide
atggccttaccagtgaccgccttgctcctgccgctggccttgctgctccacgccgccaggccgcagctccagctgcaagagtctggacctggcctggtcaagcctagcgagacactgagcctgacctgtaccgtgtccggcgatagcatcagcagcggcgattactactggggctggatcagacagcctcctggcaaaggactggaatggatcggccacatctactacagcggcgtgacctactacaaccccagcctgaagtccagagtgaccatcagcgtggacaccagccggaaccagttctccctgaagctgtctagcgtgacagccgccgataccgccgtgtactactgcaccagagaggacagcagcaactggcggagtagaggccagggaacactggtcacagttagctctctcgaggacctgaagaacgtgttcccacctgaggtggccgtgttcgagcctagcaaggccgagatcgcccacacccagaaagccaccctcgtgtgcctggctaccggcttctaccccgaccatgtggaactgtcttggtgggtcaacggcaaagaggtgcacagcggcgtgtgtaccgacccccagccactgaaagaacagcccgccctgaacgacagccggtactgcctgagcagcagactgagagtgtccgccaccttctggcagaacccccggaaccacttcagatgccaggtgcagttctacggcctgagcgagaacgacgagtggacccaggacagagccaagcccgtgacccagatcgtgtctgccgaagcctggggcagagccgattgcggatcccagagcttcggcctgctggaccccaagctgtgctacctgctggatggcatcctgttcatctacggcgtgatcctgaccgccctgttcctgagagtgaagttcagcagaagcgccgacgcccctgcctaccagcagggacagaaccaactgtacaacgagctgaacctgggcagacgggaagagtacgacgtgctggacaagcggagaggcagggaccctgagatgggcggaaagccccagcggagaaagaacccccaggaaggactgtataacgaactccagaaagacaagatggccgaagcctacagcgagatcggcatgaagggcgagcggagaagaggcaagggccacgatggcctgtaccagggcctgagcaccgccaccaaggacacctatgacgccctgcacatgcaggccctgcctccaagaagggccaagcgatctggatctggagcaacaaacttctcactactcaaacaagcaggtgacgtggaggagaatcccgggcctactagtatggactggatttggcgcatccttttccttgtcggcgctgctaccggcgcgcattccttcgaagttcagttggtagagtctggaggcggagtggtacaaccggggcggtctcttagacttagttgcgcagcaagcggtttctctttctctggctatgggatgcactgggtgagacaggcccctgggaaaggactggagtgggtggcctacatttcatacgacgggagtaataaatactatgcagactccgttaagggcaggttcacgatctctcgggacaattccaagaatacattgtatcttcagatgaatagtctccgagctgaagacacggcggtttactactgcgctaaagacccggcctggggacttcgacttggagagagttctagctacgattttgacatttggggacaagggacaatggtcactgtctcaagtacgcgtatccagaaccctgatcctgccgtgtaccagctgcgggatagcaagagcagcgacaagagcgtgtgtctgttcaccgacttcgacagccagaccaacgtgtcccagagcaaggactccgacgtgtacatcaccgataagtgcgtgctggacatgcggagcatggacttcaagagcaactccgccgtggcctggtccaacaagtccgatttcgcctgcgccaacgccttcaacaacagcattatccccgaggacacattcttcccaagcagcgacgtgccctgcggtacccagagttttgggttgttggaccctaaattgtgctatctgttggacggaatcctgttcatttacggagtgatcctgaccgcattgttcctgcgggttaagttttccagatccgcagacgcacccgcttaccaacaagggcagaaccaactctacaatgaacttaatttggggcggagggaagagtacgacgttctggacaaaaggaggggacgagatcccgagatgggcggaaagcctcagcgaaggaagaatccgcaagaggggctttataacgaactccagaaagataaaatggcagaagcctatagtgagattgggatgaagggagaaaggaggaggggtaaaggtcacgatgggttgtaccaaggattgagcacagccactaaagatacctatgatgcgctccacatgcaggccctgccgccaaga

SEQ ID NO: 6487 - DNA, 2712 bp, Artificial Sequence
  Synthetic Polynucloetide
atggccttaccagtgaccgccttgctcctgccgctggccttgctgctccacgccgccaggccgcagctccagctgcaagagtctggacctggcctggtcaagcctagcgagacactgagcctgacctgtaccgtgtccggcgatagcatcagcagcggcgattactactggggctggatcagacagcctcctggcaaaggactggaatggatcggccacatctactacagcggcgtgacctactacaaccccagcctgaagtccagagtgaccatcagcgtggacaccagccggaaccagttctccctgaagctgtctagcgtgacagccgccgataccgccgtgtactactgcaccagagaggacagcagcaactggcggagtagaggccagggaacactggtcacagttagctctctcgaggggaaaccaattcccaaccctcttctgggactggattcaaccggcagcggcgaggacctgaagaacgtgttcccacctgaggtggccgtgttcgagcctagcgaggccgagatcagccacacccagaaagccaccctcgtgtgcctggctaccggcttctaccccgaccatgtggaactgtcttggtgggtcaacggcaaagaggtgcacagcggcgtgtctaccgacccccagccactgaaagaacagcccgccctgaacgacagccggtactgcctgagcagcagactgagagtgtccgccaccttctggcagaacccccggaaccacttcagatgccaggtgcagttctacggcctgagcgagaacgacgagtggacccaggacagagccaagcccgtgacccagatcgtgtctgccgaagcctggggcagagccgattgcggatcccagagcttcggcctgctggaccccaagctgtgctacctgctggatggcatcctgttcatctacggcgtgatcctgaccgccctgttcctgagagtgaagttcagcagaagcgccgacgcccctgcctaccagcagggacagaaccaactgtacaacgagctgaacctgggcagacgggaagagtacgacgtgctggacaagcggagaggcagggaccctgagatgggcggaaagccccagcggagaaagaacccccaggaaggactgtataacgaactccagaaagacaagatggccgaagcctacagcgagatcggcatgaagggcgagcggagaagaggcaagggccacgatggcctgtaccagggcctgagcaccgccaccaaggacacctatgacgccctgcacatgcaggccctgcctccaagaagggccaagcgatctggatctggagcaacaaacttctcactactcaaacaagcaggtgacgtggaggagaatcccgggcctactagtatggactggatttggcgcatccttttccttgtcggcgctgctaccggcgcgcattccttcgaagttcagttggtagagtctggaggcggagtggtacaaccggggcggtctcttagacttagttgcgcagcaagcggtttctctttctctggctatgggatgcactgggtgagacaggcccctgggaaaggactggagtgggtggcctacatttcatacgacgggagtaataaatactatgcagactccgttaagggcaggttcacgatctctcgggacaattccaagaatacattgtatcttcagatgaatagtctccgagctgaagacacggcggtttactactgcgctaaagacccggcctggggacttcgacttggagagagttctagctacgattttgacatttggggacaagggacaatggtcactgtctcaagtacgcgtgagcagaaactgatctcggaagaggatgggagcggcatccagaaccctgatcctgccgtgtaccagctgcgggatagcaagagcagcgacaagagcgtgtgtctgttcaccgacttcgacagccagaccaacgtgtcccagagcaaggactccgacgtgtacatcaccgataagaccgtgctggacatgcggagcatggacttcaagagcaactccgccgtggcctggtccaacaagtccgatttcgcctgcgccaacgccttcaacaacagcattatccccgaggacacattcttcccaagccccgagagcagctgcggtacccagagttttgggttgttggaccctaaattgtgctatctgttggacggaatcctgttcatttacggagtgatcctgaccgcattgttcctgaggagcaagcggtcacggctgctccacagcgattacatgaatatgacaccacgaagaccgggtcctactcgcaaacactaccaaccctacgcacctccccgcgactttgcagcgtaccgatctcgggttaagttttccagatccgcagacgcacccgcttaccaacaagggcagaaccaactctacaatgaacttaatttggggcggagggaagagtacgacgttctggacaaaaggaggggacgagatcccgagatgggcggaaagcctcagcgaaggaagaatccgcaagaggggctttataacgaactccagaaagataaaatggcagaagcctatagtgagattgggatgaagggagaaaggaggaggggtaaaggtcacgatgggttgtaccaaggattgagcacagccactaaagatacctatgatgcgctccacatgcaggccctgccgccaaga

SEQ ID NO: 6488 - DNA, 2835 bp, Artificial Sequence
  Synthetic Polynucloetide
atggccttaccagtgaccgccttgctcctgccgctggccttgctgctccacgccgccaggccgcagctccagctgcaagagtctggacctggcctggtcaagcctagcgagacactgagcctgacctgtaccgtgtccggcgatagcatcagcagcggcgattactactggggctggatcagacagcctcctggcaaaggactggaatggatcggccacatctactacagcggcgtgacctactacaaccccagcctgaagtccagagtgaccatcagcgtggacaccagccggaaccagttctccctgaagctgtctagcgtgacagccgccgataccgccgtgtactactgcaccagagaggacagcagcaactggcggagtagaggccagggaacactggtcacagttagctctctcgaggggaaaccaattcccaaccctcttctgggactggattcaaccggcagcggcgaggacctgaagaacgtgttcccacctgaggtggccgtgttcgagcctagcgaggccgagatcagccacacccagaaagccaccctcgtgtgcctggctaccggcttctaccccgaccatgtggaactgtcttggtgggtcaacggcaaagaggtgcacagcggcgtgtctaccgacccccagccactgaaagaacagcccgccctgaacgacagccggtactgcctgagcagcagactgagagtgtccgccaccttctggcagaacccccggaaccacttcagatgccaggtgcagttctacggcctgagcgagaacgacgagtggacccaggacagagccaagcccgtgacccagatcgtgtctgccgaagcctggggcagagccgattgcggatcccagagcttcggcctgctggaccccaagctgtgctacctgctggatggcatcctgttcatctacggcgtgatcctgaccgccctgttcctgaggagtaagaggagcaggctcctgcacagtgactacatgaacatgactccacgccgccccggacccacccgcaagcattaccagccctatgccccaccacgcgacttcgcagcctatcgctccagagtgaagttcagcagaagcgccgacgcccctgcctaccagcagggacagaaccaactgtacaacgagctgaacctgggcagacgggaagagtacgacgtgctggacaagcggagaggcagggaccctgagatgggcggaaagccccagcggagaaagaacccccaggaaggactgtataacgaactccagaaagacaagatggccgaagcctacagcgagatcggcatgaagggcgagcggagaagaggcaagggccacgatggcctgtaccagggcctgagcaccgccaccaaggacacctatgacgccctgcacatgcaggccctgcctccaagaagggccaagcgatctggatctggagcaacaaacttctcactactcaaacaagcaggtgacgtggaggagaatcccgggcctactagtatggactggatttggcgcatccttttccttgtcggcgctgctaccggcgcgcattccttcgaagttcagttggtagagtctggaggcggagtggtacaaccggggcggtctcttagacttagttgcgcagcaagcggtttctctttctctggctatgggatgcactgggtgagacaggcccctgggaaaggactggagtgggtggcctacatttcatacgacgggagtaataaatactatgcagactccgttaagggcaggttcacgatctctcgggacaattccaagaatacattgtatcttcagatgaatagtctccgagctgaagacacggcggtttactactgcgctaaagacccggcctggggacttcgacttggagagagttctagctacgattttgacatttggggacaagggacaatggtcactgtctcaagtacgcgtgagcagaaactgatctcggaagaggatgggagcggcatccagaaccctgatcctgccgtgtaccagctgcgggatagcaagagcagcgacaagagcgtgtgtctgttcaccgacttcgacagccagaccaacgtgtcccagagcaaggactccgacgtgtacatcaccgataagaccgtgctggacatgcggagcatggacttcaagagcaactccgccgtggcctggtccaacaagtccgatttcgcctgcgccaacgccttcaacaacagcattatccccgaggacacattcttcccaagccccgagagcagctgcggtacccagagttttgggttgttggaccctaaattgtgctatctgttggacggaatcctgttcatttacggagtgatcctgaccgcattgttcctgaggagcaagcggtcacggctgctccacagcgattacatgaatatgacaccacgaagaccgggtcctactcgcaaacactaccaaccctacgcacctccccgcgactttgcagcgtaccgatctcgggttaagttttccagatccgcagacgcacccgcttaccaacaagggcagaaccaactctacaatgaacttaatttggggcggagggaagagtacgacgttctggacaaaaggaggggacgagatcccgagatgggcggaaagcctcagcgaaggaagaatccgcaagaggggctttataacgaactccagaaagataaaatggcagaagcctatagtgagattgggatgaagggagaaaggaggaggggtaaaggtcacgatgggttgtaccaaggattgagcacagccactaaagatacctatgatgcgctccacatgcaggccctgccgccaaga

SEQ ID NO: 6489 - DNA, 2718 bp, Artificial Sequence
  Synthetic Polynucloetide
atggccttaccagtgaccgccttgctcctgccgctggccttgctgctccacgccgccaggccgcagctccagctgcaagagtctggacctggcctggtcaagcctagcgagacactgagcctgacctgtaccgtgtccggcgatagcatcagcagcggcgattactactggggctggatcagacagcctcctggcaaaggactggaatggatcggccacatctactacagcggcgtgacctactacaaccccagcctgaagtccagagtgaccatcagcgtggacaccagccggaaccagttctccctgaagctgtctagcgtgacagccgccgataccgccgtgtactactgcaccagagaggacagcagcaactggcggagtagaggccagggaacactggtcacagttagctctctcgaggggaaaccaattcccaaccctcttctgggactggattcaaccggcagcggcgaggacctgaagaacgtgttcccacctgaggtggccgtgttcgagcctagcgaggccgagatcagccacacccagaaagccaccctcgtgtgcctggctaccggcttctaccccgaccatgtggaactgtcttggtgggtcaacggcaaagaggtgcacagcggcgtgtctaccgacccccagccactgaaagaacagcccgccctgaacgacagccggtactgcctgagcagcagactgagagtgtccgccaccttctggcagaacccccggaaccacttcagatgccaggtgcagttctacggcctgagcgagaacgacgagtggacccaggacagagccaagcccgtgacccagatcgtgtctgccgaagcctggggcagagccgattgcggatcccagagcttcggcctgctggaccccaagctgtgctacctgctggatggcatcctgttcatctacggcgtgatcctgaccgccctgttcctgagagtgaagttcagcagaagcgccgacgcccctgcctaccagcagggacagaaccaactgtacaacgagctgaacctgggcagacgggaagagtacgacgtgctggacaagcggagaggcagggaccctgagatgggcggaaagccccagcggagaaagaacccccaggaaggactgtataacgaactccagaaagacaagatggccgaagcctacagcgagatcggcatgaagggcgagcggagaagaggcaagggccacgatggcctgtaccagggcctgagcaccgccaccaaggacacctatgacgccctgcacatgcaggccctgcctccaagaagggccaagcgatctggatctggagcaacaaacttctcactactcaaacaagcaggtgacgtggaggagaatcccgggcctactagtatggactggatttggcgcatccttttccttgtcggcgctgctaccggcgcgcattccttcgaagttcagttggtagagtctggaggcggagtggtacaaccggggcggtctcttagacttagttgcgcagcaagcggtttctctttctctggctatgggatgcactgggtgagacaggcccctgggaaaggactggagtgggtggcctacatttcatacgacgggagtaataaatactatgcagactccgttaagggcaggttcacgatctctcgggacaattccaagaatacattgtatcttcagatgaatagtctccgagctgaagacacggcggtttactactgcgctaaagacccggcctggggacttcgacttggagagagttctagctacgattttgacatttggggacaagggacaatggtcactgtctcaagtacgcgtgagcagaaactgatctcggaagaggatctggggagcggcatccagaaccctgatcctgccgtgtaccagctgcgggatagcaagagcagcgacaagagcgtgtgtctgttcaccgacttcgacagccagaccaacgtgtcccagagcaaggactccgacgtgtacatcaccgataagaccgtgctggacatgcggagcatggacttcaagagcaactccgccgtggcctggtccaacaagtccgatttcgcctgcgccaacgccttcaacaacagcattatccccgaggacacattcttcccaagccccgagagcagctgcggtacccagagttttgggttgttggaccctaaattgtgctatctgttggacggaatcctgttcatttacggagtgatcctgaccgcattgttcctgaagagaggccggaagaagctgctgtacatcttcaagcagcctttcatgcggcccgtgcagaccacccaggaagaggacggctgctcctgccggttccccgaggaagaagaaggcggctgcgagctgcgggttaagttttccagatccgcagacgcacccgcttaccaacaagggcagaaccaactctacaatgaacttaatttggggcggagggaagagtacgacgttctggacaaaaggaggggacgagatcccgagatgggcggaaagcctcagcgaaggaagaatccgcaagaggggctttataacgaactccagaaagataaaatggcagaagcctatagtgagattgggatgaagggagaaaggaggaggggtaaaggtcacgatgggttgtaccaaggattgagcacagccactaaagatacctatgatgcgctccacatgcaggccctgccgccaaga

SEQ ID NO: 6490 - DNA, 2844 bp, Artificial Sequence
  Synthetic Polynucloetide
atggccttaccagtgaccgccttgctcctgccgctggccttgctgctccacgccgccaggccgcagctccagctgcaagagtctggacctggcctggtcaagcctagcgagacactgagcctgacctgtaccgtgtccggcgatagcatcagcagcggcgattactactggggctggatcagacagcctcctggcaaaggactggaatggatcggccacatctactacagcggcgtgacctactacaaccccagcctgaagtccagagtgaccatcagcgtggacaccagccggaaccagttctccctgaagctgtctagcgtgacagccgccgataccgccgtgtactactgcaccagagaggacagcagcaactggcggagtagaggccagggaacactggtcacagttagctctctcgaggggaaaccaattcccaaccctcttctgggactggattcaaccggcagcggcgaggacctgaagaacgtgttcccacctgaggtggccgtgttcgagcctagcgaggccgagatcagccacacccagaaagccaccctcgtgtgcctggctaccggcttctaccccgaccatgtggaactgtcttggtgggtcaacggcaaagaggtgcacagcggcgtgtctaccgacccccagccactgaaagaacagcccgccctgaacgacagccggtactgcctgagcagcagactgagagtgtccgccaccttctggcagaacccccggaaccacttcagatgccaggtgcagttctacggcctgagcgagaacgacgagtggacccaggacagagccaagcccgtgacccagatcgtgtctgccgaagcctggggcagagccgattgcggatcccagagcttcggcctgctggaccccaagctgtgctacctgctggatggcatcctgttcatctacggcgtgatcctgaccgccctgttcctgaaacggggcagaaagaaactcctgtatatattcaaacaaccatttatgagaccagtacaaactactcaagaggaagatggctgtagctgccgatttccagaagaagaagaaggaggatgtgaactgagagtgaagttcagcagaagcgccgacgcccctgcctaccagcagggacagaaccaactgtacaacgagctgaacctgggcagacgggaagagtacgacgtgctggacaagcggagaggcagggaccctgagatgggcggaaagccccagcggagaaagaacccccaggaaggactgtataacgaactccagaaagacaagatggccgaagcctacagcgagatcggcatgaagggcgagcggagaagaggcaagggccacgatggcctgtaccagggcctgagcaccgccaccaaggacacctatgacgccctgcacatgcaggccctgcctccaagaagggccaagcgatctggatctggagcaacaaacttctcactactcaaacaagcaggtgacgtggaggagaatcccgggcctactagtatggactggatttggcgcatccttttccttgtcggcgctgctaccggcgcgcattccttcgaagttcagttggtagagtctggaggcggagtggtacaaccggggcggtctcttagacttagttgcgcagcaagcggtttctctttctctggctatgggatgcactgggtgagacaggcccctgggaaaggactggagtgggtggcctacatttcatacgacgggagtaataaatactatgcagactccgttaagggcaggttcacgatctctcgggacaattccaagaatacattgtatcttcagatgaatagtctccgagctgaagacacggcggtttactactgcgctaaagacccggcctggggacttcgacttggagagagttctagctacgattttgacatttggggacaagggacaatggtcactgtctcaagtacgcgtgagcagaaactgatctcggaagaggatctggggagcggcatccagaaccctgatcctgccgtgtaccagctgcgggatagcaagagcagcgacaagagcgtgtgtctgttcaccgacttcgacagccagaccaacgtgtcccagagcaaggactccgacgtgtacatcaccgataagaccgtgctggacatgcggagcatggacttcaagagcaactccgccgtggcctggtccaacaagtccgatttcgcctgcgccaacgccttcaacaacagcattatccccgaggacacattcttcccaagccccgagagcagctgcggtacccagagttttgggttgttggaccctaaattgtgctatctgttggacggaatcctgttcatttacggagtgatcctgaccgcattgttcctgaagagaggccggaagaagctgctgtacatcttcaagcagcctttcatgcggcccgtgcagaccacccaggaagaggacggctgctcctgccggttccccgaggaagaagaaggcggctgcgagctgcgggttaagttttccagatccgcagacgcacccgcttaccaacaagggcagaaccaactctacaatgaacttaatttggggcggagggaagagtacgacgttctggacaaaaggaggggacgagatcccgagatgggcggaaagcctcagcgaaggaagaatccgcaagaggggctttataacgaactccagaaagataaaatggcagaagcctatagtgagattgggatgaagggagaaaggaggaggggtaaaggtcacgatgggttgtaccaaggattgagcacagccactaaagatacctatgatgcgctccacatgcaggccctgccgccaaga

SEQ ID NO: 6491 - DNA, 2517 bp, Artificial Sequence
  Synthetic Polynucloetide
atggccttaccagtgaccgccttgctcctgccgctggccttgctgctccacgccgccaggccgcagctccagctgcaagagtctggacctggcctggtcaagcctagcgagacactgagcctgacctgtaccgtgtccggcgatagcatcagcagcggcgattactactggggctggatcagacagcctcctggcaaaggactggaatggatcggccacatctactacagcggcgtgacctactacaaccccagcctgaagtccagagtgaccatcagcgtggacaccagccggaaccagttctccctgaagctgtctagcgtgacagccgccgataccgccgtgtactactgcaccagagaggacagcagcaactggcggagtagaggccagggaacactggtcacagttagctctctcgagcagagcttcggcctgctggaccccaagctgtgctacctgctggatggcatcctgttcatctacggcgtgatcctgaccgccctgttcctgagagtgaagttcagcagaagcgccgacgcccctgcctaccagcagggacagaaccaactgtacaacgagctgaacctgggcagacgggaagagtacgacgtgctggacaagcggagaggcagggaccctgagatgggcggaaagccccagcggagaaagaacccccaggaaggactgtataacgaactccagaaagacaagatggccgaagcctacagcgagatcggcatgaagggcgagcggagaagaggcaagggccacgatggcctgtaccagggcctgagcaccgccaccaaggacacctatgacgccctgcacatgcaggccctgcctccaagaagggccaagcgatctggatctggagcaacaaacttctcactactcaaacaagcaggtgacgtggaggagaatcccgggcctactagtatggactggatttggcgcatccttttccttgtcggcgctgctaccggcgcgcattccttcgaagttcagttggtagagtctggaggcggagtggtacaaccggggcggtctcttagacttagttgcgcagcaagcggtttctctttctctggctatgggatgcactgggtgagacaggcccctgggaaaggactggagtgggtggcctacatttcatacgacgggagtaataaatactatgcagactccgttaagggcaggttcacgatctctcgggacaattccaagaatacattgtatcttcagatgaatagtctccgagctgaagacacggcggtttactactgcgctaaagacccggcctggggacttcgacttggagagagttctagctacgattttgacatttggggacaagggacaatggtcactgtctcaagtacgcgtcagagttttgggttgttggaccctaaattgtgctatctgttggacggaatcctgttcatttacggagtgatcctgaccgcattgttcctgcgggttaagttttccagatccgcagacgcacccgcttaccaacaagggcagaaccaactctacaatgaacttaatttggggcggagggaagagtacgacgttctggacaaaaggaggggacgagatcccgagatgggcggaaagcctcagcgaaggaagaatccgcaagaggggctttataacgaactccagaaagataaaatggcagaagcctatagtgagattgggatgaagggagaaaggaggaggggtaaaggtcacgatgggttgtaccaaggattgagcacagccactaaagatacctatgatgcgctccacatgcaggccctgccgccaagacgcgccaagagaagcggatctggcgtgaagcagaccctgaatttcgacctgctgaagctggctggcgacgtggaatccaacccaggcccttctagaggccatatgaccgagtacaagcccacggtgcgcctcgccacccgcgacgacgtccccagggccgtacgcaccctcgccgccgcgttcgccgactaccccgccacgcgccacaccgtcgatccggaccgccacatcgagcgggtcaccgagctgcaagaactcttcctcacgcgcgtcgggctcgacatcggcaaggtgtgggtcgcggacgacggcgccgcggtggcggtctggaccacgccggagagcgtcgaagcgggggcggtgttcgccgagatcggcccgcgcatggccgagttgagcggttcccggctggccgcgcagcaacagatggaaggcctcctggcgccgcaccggcccaaggagcccgcgtggttcctggccaccgtcggcgtctcgcccgaccaccagggcaagggtctgggcagcgccgtcgtgctccccggagtggaggcggccgagcgcgccggggtgcccgccttcctggagacctccgcgccccgcaacctccccttctacgagcggctcggcttcaccgtcaccgccgacgtcgaggtgcccgaaggaccgcgcacctggtgcatgacccgcaagcccggtgcctga

SEQ ID NO: 6492 - DNA, 1989 bp, Artificial Sequence
  Synthetic Polynucloetide
atggccttaccagtgaccgccttgctcctgccgctggccttgctgctccacgccgccaggccgcagctccagctgcaagagtctggacctggcctggtcaagcctagcgagacactgagcctgacctgtaccgtgtccggcgatagcatcagcagcggcgattactactggggctggatcagacagcctcctggcaaaggactggaatggatcggccacatctactacagcggcgtgacctactacaaccccagcctgaagtccagagtgaccatcagcgtggacaccagccggaaccagttctccctgaagctgtctagcgtgacagccgccgataccgccgtgtactactgcaccagagaggacagcagcaactggcggagtagaggccagggaacactggtcacagttagctctctcgagggacagcctaaggccaatcctaccgtgacactgttccctccaagcagcgaagaactccaggccaacaaggccacacttgtgtgcctgatctccgacttctaccctggggctgtgacagtggcttggaaggccgatggatctcctgtgaaagccggcgtggaaaccaccaagccatccaagcagagcaacaacaaatacgccgccagctcctacctgagcctgacacctgagcagtggaagtcccacagatcctacagctgccaagtgacccacgaaggcagcaccgtggaaaagacagtggcccctacagagtgcagccccatcaagaccgatgtgattacaatggaccccaaggacaactgctccaaggacgccaacgataccctgctgctccagctgaccaacaccagcgcctactacatgtacttgttgctgctgctgaagtccgtggtgtacttcgccatcatcacatgctgcctgctgcggagaaccgccttctgctgcaacggcgagaagtctagggccaagcgatctggatctggagcaacaaacttctcactactcaaacaagcaggtgacgtggaggagaatcccgggcctactagtatggactggatttggcgcatccttttccttgtcggcgctgctaccggcgcgcattccttcgaagttcagttggtagagtctggaggcggagtggtacaaccggggcggtctcttagacttagttgcgcagcaagcggtttctctttctctggctatgggatgcactgggtgagacaggcccctgggaaaggactggagtgggtggcctacatttcatacgacgggagtaataaatactatgcagactccgttaagggcaggttcacgatctctcgggacaattccaagaatacattgtatcttcagatgaatagtctccgagctgaagacacggcggtttactactgcgctaaagacccggcctggggacttcgacttggagagagttctagctacgattttgacatttggggacaagggacaatggtcactgtctcaagtacgcgtgcctctacaaagggaccctccgtgtttcctctggctcccagcagcaagtctacaagcggaggaacagccgctctgggctgcctggtcaaggattactttcccgagcctgtgaccgtgtcctggaatagcggagcactgacaagcggcgtgcacacctttccagccgtgctgcaaagcagcggcctgtactctctgagcagcgtggtcacagtgcctagctctagcctgggcacccagacctacatctgcaatgtgaaccacaagcctagcaacaccaaggtggacaagagagtggaacccaagagctgtgaagtgaaaaccgactccaccgaccacgtgaagcccaaagagacagagaacaccaagcagcccagcaagagctgccacaagcccaaggccatcgtgcacaccgagaaagtgaacatgatgagcctgaccgtgctgggcctgcggatgctgttcgccaaaaccgtggccgtgaacttcctgctgaccgccaagctgttcttcctc

SEQ ID NO: 6493 - DNA, 1923 bp, Artificial Sequence
  Synthetic Polynucloetide
atggccttaccagtgaccgccttgctcctgccgctggccttgctgctccacgccgccaggccgcagctccagctgcaagagtctggacctggcctggtcaagcctagcgagacactgagcctgacctgtaccgtgtccggcgatagcatcagcagcggcgattactactggggctggatcagacagcctcctggcaaaggactggaatggatcggccacatctactacagcggcgtgacctactacaaccccagcctgaagtccagagtgaccatcagcgtggacaccagccggaaccagttctccctgaagctgtctagcgtgacagccgccgataccgccgtgtactactgcaccagagaggacagcagcaactggcggagtagaggccagggaacactggtcacagttagctctctcgagggacagcctaaggccaatcctaccgtgacactgttccctccaagcagcgaagaactccaggccaacaaggccacacttgtgtgcctgatctccgacttctaccctggggctgtgacagtggcttggaaggccgatggatctcctgtgaaagccggcgtggaaaccaccaagccatccaagcagagcaacaacaaatacgccgccagctcctacctgagcctgacacctgagcagtggaagtcccacagatcctacagctgccaagtgacccacgaaggcagcaccgtggaaaagacagtggcccctacagagtgcagcggcagagccgattgcggcatcaccagcgccagctaccaccagggcgtgctgagcgccaccatcctgtacgagatcctgctgggcaaggccaccctgtacgccgtgctggtgtctgccctggtgctgatggctatggtcaagcggaaggacagccggggaagggccaagcgatctggatctggagcaacaaacttctcactactcaaacaagcaggtgacgtggaggagaatcccgggcctactagtatggactggatttggcgcatccttttccttgtcggcgctgctaccggcgcgcattccttcgaagttcagttggtagagtctggaggcggagtggtacaaccggggcggtctcttagacttagttgcgcagcaagcggtttctctttctctggctatgggatgcactgggtgagacaggcccctgggaaaggactggagtgggtggcctacatttcatacgacgggagtaataaatactatgcagactccgttaagggcaggttcacgatctctcgggacaattccaagaatacattgtatcttcagatgaatagtctccgagctgaagacacggcggtttactactgcgctaaagacccggcctggggacttcgacttggagagagttctagctacgattttgacatttggggacaagggacaatggtcactgtctcaagtacgcgtgcctctacaaagggaccctccgtgtttcctctggctcccagcagcaagtctacaagcggaggaacagccgctctgggctgcctggtcaaggattactttcccgagcctgtgaccgtgtcctggaatagcggagcactgacaagcggcgtgcacacctttccagccgtgctgcaaagcagcggcctgtactctctgagcagcgtggtcacagtgcctagctctagcctgggcacccagacctacatctgcaatgtgaaccacaagcctagcaacaccaaggtggacaagagagtggaacccaagagctgtatccccgaggacacattcttcccaagcagcgacgtgccctgcgacgtgaagctggtggaaaagagcttcgagacagacaccaacctgaacttccagaacctgagcgtgatcggcttcagaatcctgctgctgaaagtggccggctttaacctgctgatgaccctgcggctgtggtccagc

SEQ ID NO: 6494 - DNA, 1923 bp, Artificial Sequence
  Synthetic Polynucloetide
atggccttaccagtgaccgccttgctcctgccgctggccttgctgctccacgccgccaggccgcagctccagctgcaagagtctggacctggcctggtcaagcctagcgagacactgagcctgacctgtaccgtgtccggcgatagcatcagcagcggcgattactactggggctggatcagacagcctcctggcaaaggactggaatggatcggccacatctactacagcggcgtgacctactacaaccccagcctgaagtccagagtgaccatcagcgtggacaccagccggaaccagttctccctgaagctgtctagcgtgacagccgccgataccgccgtgtactactgcaccagagaggacagcagcaactggcggagtagaggccagggaacactggtcacagttagctctctcgagggacagcctaaggccaatcctaccgtgacactgttccctccaagcagcgaagaactccaggccaacaaggccacacttgtgtgcctgatctccgacttctaccctggggctgtgacagtggcttggaaggccgatggatctcctgtgaaagccggcgtggaaaccaccaagccatccaagcagagcaacaacaaatacgccgccagctcctacctgagcctgacacctgagcagtggaagtcccacagatcctacagctgccaagtgacccacgaaggcagcaccgtggaaaagacagtggcccctacagagtgcagcggcagagccgattgcggctttaccagcgagagctaccagcagggcgtgctgagcgccaccatcctgtacgagatcctgctgggcaaggccaccctgtacgccgtgctggtgtctgccctggtgctgatggctatggtcaagcggaaggacagccggggaagggccaagcgatctggatctggagcaacaaacttctcactactcaaacaagcaggtgacgtggaggagaatcccgggcctactagtatggactggatttggcgcatccttttccttgtcggcgctgctaccggcgcgcattccttcgaagttcagttggtagagtctggaggcggagtggtacaaccggggcggtctcttagacttagttgcgcagcaagcggtttctctttctctggctatgggatgcactgggtgagacaggcccctgggaaaggactggagtgggtggcctacatttcatacgacgggagtaataaatactatgcagactccgttaagggcaggttcacgatctctcgggacaattccaagaatacattgtatcttcagatgaatagtctccgagctgaagacacggcggtttactactgcgctaaagacccggcctggggacttcgacttggagagagttctagctacgattttgacatttggggacaagggacaatggtcactgtctcaagtacgcgtgcctctacaaagggaccctccgtgtttcctctggctcccagcagcaagtctacaagcggaggaacagccgctctgggctgcctggtcaaggattactttcccgagcctgtgaccgtgtcctggaatagcggagcactgacaagcggcgtgcacacctttccagccgtgctgcaaagcagcggcctgtactctctgagcagcgtggtcacagtgcctagctctagcctgggcacccagacctacatctgcaatgtgaaccacaagcctagcaacaccaaggtggacaagagagtggaacccaagagctgtatccccgaggacacattcttcccaagccccgagagcagctgcgacgtgaagctggtggaaaagagcttcgagacagacaccaacctgaacttccagaacctgagcgtgatcggcttcagaatcctgctgctgaaagtggccggctttaacctgctgatgaccctgcggctgtggtccagc

SEQ ID NO: 6495 - DNA, 1386 bp, Artificial Sequence
  Synthetic Polynucloetide
atggccttaccagtgaccgccttgctcctgccgctggccttgctgctccacgccgccaggccgcagctccagctgcaagagtctggacctggcctggtcaagcctagcgagacactgagcctgacctgtaccgtgtccggcgatagcatcagcagcggcgattactactggggctggatcagacagcctcctggcaaaggactggaatggatcggccacatctactacagcggcgtgacctactacaaccccagcctgaagtccagagtgaccatcagcgtggacaccagccggaaccagttctccctgaagctgtctagcgtgacagccgccgataccgccgtgtactactgcaccagagaggacagcagcaactggcggagtagaggccagggaacactggtcacagttagctctctcgagagcggcggaggcggatctttcgaagttcagttggtagagtctggaggcggagtggtacaaccggggcggtctcttagacttagttgcgcagcaagcggtttctctttctctggctatgggatgcactgggtgagacaggcccctgggaaaggactggagtgggtggcctacatttcatacgacgggagtaataaatactatgcagactccgttaagggcaggttcacgatctctcgggacaattccaagaatacattgtatcttcagatgaatagtctccgagctgaagacacggcggtttactactgcgctaaagacccggcctggggacttcgacttggagagagttctagctacgattttgacatttggggacaagggacaatggtcactgtctcaagtacgcgtgacggtaacgaggagatgggaggaatcactcaaaccccttacaaagtctcaatttcaggaacaactgttatccttacatgtccccagtatcctggcagcgagatcctttggcagcataacgacaagaatatagggggagatgaagacgataagaatatcggatctgacgaggatcacttgagcctgaaagagttctccgagcttgaacaaagcggatattatgtgtgctatccgcgcgggtcaaagccggaagacgctaacttttacctttatctccgagccagagtgtgcgaaaattgcatggaaatggacgttatgtccgttgctacaatagttatcgtagatatatgcatcacgggtggactgcttctgctggtttattattggtccaagaatagaaaggccaaagctaaacccgtgaccagaggcgctggcgcaggcggaaggcaaaggggacaaaacaaagaacggccaccaccagtgccaaatccagattatgagcctattcggaaaggacagagggacctgtactctggcctgaatcagagaagaatc

SEQ ID NO: 6496 - DNA, 1281 bp, Artificial Sequence
  Synthetic Polynucloetide
atggccttaccagtgaccgccttgctcctgccgctggccttgctgctccacgccgccaggccgcagctccagctgcaagagtctggacctggcctggtcaagcctagcgagacactgagcctgacctgtaccgtgtccggcgatagcatcagcagcggcgattactactggggctggatcagacagcctcctggcaaaggactggaatggatcggccacatctactacagcggcgtgacctactacaaccccagcctgaagtccagagtgaccatcagcgtggacaccagccggaaccagttctccctgaagctgtctagcgtgacagccgccgataccgccgtgtactactgcaccagagaggacagcagcaactggcggagtagaggccagggaacactggtcacagttagctctctcgagagcggcggaggcggatctttcgaagttcagttggtagagtctggaggcggagtggtacaaccggggcggtctcttagacttagttgcgcagcaagcggtttctctttctctggctatgggatgcactgggtgagacaggcccctgggaaaggactggagtgggtggcctacatttcatacgacgggagtaataaatactatgcagactccgttaagggcaggttcacgatctctcgggacaattccaagaatacattgtatcttcagatgaatagtctccgagctgaagacacggcggtttactactgcgctaaagacccggcctggggacttcgacttggagagagttctagctacgattttgacatttggggacaagggacaatggtcactgtctcaagtacgcgtttcaagatccccatcgaggaactggaagatcgggtgttcgtgaactgcaacacctctatcacctgggtggaaggcaccgtgggaacactgctgagcgacatcaccagactggacctcggcaagcggattctggaccctcggggcatctacagatgcaacggcaccgacatctacaaggacaaagaaagcaccgtgcaggtccactacagaatgtgccagtcctgcgtggaactggaccctgctacagtggccggcatcatcgtgaccgatgtgatcgctactctgctgctggctctgggagtgttctgcttcgccggacacgaaacaggcagactgtctggcgctgccgatacacaggccctgctgagaaacgaccaagtgtatcagcccctgcgcgacagagatgatgcccagtattctcacctcggcggcaactgggctagaaacaag

SEQ ID NO: 6497 - DNA, 1311 bp, Artificial Sequence
  Synthetic Polynucloetide
atggccttaccagtgaccgccttgctcctgccgctggccttgctgctccacgccgccaggccgcagctccagctgcaagagtctggacctggcctggtcaagcctagcgagacactgagcctgacctgtaccgtgtccggcgatagcatcagcagcggcgattactactggggctggatcagacagcctcctggcaaaggactggaatggatcggccacatctactacagcggcgtgacctactacaaccccagcctgaagtccagagtgaccatcagcgtggacaccagccggaaccagttctccctgaagctgtctagcgtgacagccgccgataccgccgtgtactactgcaccagagaggacagcagcaactggcggagtagaggccagggaacactggtcacagttagctctctcgagagcggcggaggcggatctttcgaagttcagttggtagagtctggaggcggagtggtacaaccggggcggtctcttagacttagttgcgcagcaagcggtttctctttctctggctatgggatgcactgggtgagacaggcccctgggaaaggactggagtgggtggcctacatttcatacgacgggagtaataaatactatgcagactccgttaagggcaggttcacgatctctcgggacaattccaagaatacattgtatcttcagatgaatagtctccgagctgaagacacggcggtttactactgcgctaaagacccggcctggggacttcgacttggagagagttctagctacgattttgacatttggggacaagggacaatggtcactgtctcaagtacgcgtcagagcatcaagggcaaccacctggtcaaggtgtacgactaccaagaggacggcagcgtgctgctgacatgtgatgccgaggccaagaacatcacctggtttaaggacggcaagatgatcggcttcctgaccgaggacaagaagaagtggaacctgggcagcaacgctaaggaccccagaggcatgtatcagtgcaagggcagccagaacaagagcaagcccctccaggtgtactaccggatgtgccagaactgcatcgagctgaacgccgctaccatcagcggctttctgttcgccgagatcgtgtccatcttcgtgctggccgtgggcgtgtactttatcgctggacaggatggcgtgcggcagagcagagcttccgataagcaaaccctgctgcctaacgaccagctgtaccagcctctgaaggacagagaggacgaccagtacagccacctccagggcaatcagctgagaagaaac

SEQ ID NO: 6498 - DNA, 1260 bp, Artificial Sequence
  Synthetic Polynucloetide
atggccttaccagtgaccgccttgctcctgccgctggccttgctgctccacgccgccaggccgcagctccagctgcaagagtctggacctggcctggtcaagcctagcgagacactgagcctgacctgtaccgtgtccggcgatagcatcagcagcggcgattactactggggctggatcagacagcctcctggcaaaggactggaatggatcggccacatctactacagcggcgtgacctactacaaccccagcctgaagtccagagtgaccatcagcgtggacaccagccggaaccagttctccctgaagctgtctagcgtgacagccgccgataccgccgtgtactactgcaccagagaggacagcagcaactggcggagtagaggccagggaacactggtcacagttagctctctcgagagcggcggaggcggatctttcgaagttcagttggtagagtctggaggcggagtggtacaaccggggcggtctcttagacttagttgcgcagcaagcggtttctctttctctggctatgggatgcactgggtgagacaggcccctgggaaaggactggagtgggtggcctacatttcatacgacgggagtaataaatactatgcagactccgttaagggcaggttcacgatctctcgggacaattccaagaatacattgtatcttcagatgaatagtctccgagctgaagacacggcggtttactactgcgctaaagacccggcctggggacttcgacttggagagagttctagctacgattttgacatttggggacaagggacaatggtcactgtctcaagtacgcgtcagagttttgggttgttggaccctaaattgtgctatctgttggacggaatcctgttcatttacggagtgatcctgaccgcattgttcctgcgggttaagttttccagatccgcagacgcacccgcttaccaacaagggcagaaccaactctacaatgaacttaatttggggcggagggaagagtacgacgttctggacaaaaggaggggacgagatcccgagatgggcggaaagcctcagcgaaggaagaatccgcaagaggggctttataacgaactccagaaagataaaatggcagaagcctatagtgagattgggatgaagggagaaaggaggaggggtaaaggtcacgatgggttgtaccaaggattgagcacagccactaaagatacctatgatgcgctccacatgcaggccctgccgccaaga

SEQ ID NO: 6499 - DNA, 1389 bp, Artificial Sequence
  Synthetic Polynucloetide
atggccttaccagtgaccgccttgctcctgccgctggccttgctgctccacgccgccaggccggaagttcagttggtagagtctggaggcggagtggtacaaccggggcggtctcttagacttagttgcgcagcaagcggtttctctttctctggctatgggatgcactgggtgagacaggcccctgggaaaggactggagtgggtggcctacatttcatacgacgggagtaataaatactatgcagactccgttaagggcaggttcacgatctctcgggacaattccaagaatacattgtatcttcagatgaatagtctccgagctgaagacacggcggtttactactgcgctaaagacccggcctggggacttcgacttggagagagttctagctacgattttgacatttggggacaagggacaatggtcactgtctcaagtctcgagagcggcggaggcggatctttcgaacagctccagctgcaagagtctggacctggcctggtcaagcctagcgagacactgagcctgacctgtaccgtgtccggcgatagcatcagcagcggcgattactactggggctggatcagacagcctcctggcaaaggactggaatggatcggccacatctactacagcggcgtgacctactacaaccccagcctgaagtccagagtgaccatcagcgtggacaccagccggaaccagttctccctgaagctgtctagcgtgacagccgccgataccgccgtgtactactgcaccagagaggacagcagcaactggcggagtagaggccagggaacactggtcacagttagctctacgcgtgacggtaacgaggagatgggaggaatcactcaaaccccttacaaagtctcaatttcaggaacaactgttatccttacatgtccccagtatcctggcagcgagatcctttggcagcataacgacaagaatatagggggagatgaagacgataagaatatcggatctgacgaggatcacttgagcctgaaagagttctccgagcttgaacaaagcggatattatgtgtgctatccgcgcgggtcaaagccggaagacgctaacttttacctttatctccgagccagagtgtgcgaaaattgcatggaaatggacgttatgtccgttgctacaatagttatcgtagatatatgcatcacgggtggactgcttctgctggtttattattggtccaagaatagaaaggccaaagctaaacccgtgaccagaggcgctggcgcaggcggaaggcaaaggggacaaaacaaagaacggccaccaccagtgccaaatccagattatgagcctattcggaaaggacagagggacctgtactctggcctgaatcagagaagaatc

SEQ ID NO: 6500 - DNA, 1284 bp, Artificial Sequence
  Synthetic Polynucloetide
atggccttaccagtgaccgccttgctcctgccgctggccttgctgctccacgccgccaggccggaagttcagttggtagagtctggaggcggagtggtacaaccggggcggtctcttagacttagttgcgcagcaagcggtttctctttctctggctatgggatgcactgggtgagacaggcccctgggaaaggactggagtgggtggcctacatttcatacgacgggagtaataaatactatgcagactccgttaagggcaggttcacgatctctcgggacaattccaagaatacattgtatcttcagatgaatagtctccgagctgaagacacggcggtttactactgcgctaaagacccggcctggggacttcgacttggagagagttctagctacgattttgacatttggggacaagggacaatggtcactgtctcaagtctcgagagcggcggaggcggatctttcgaacagctccagctgcaagagtctggacctggcctggtcaagcctagcgagacactgagcctgacctgtaccgtgtccggcgatagcatcagcagcggcgattactactggggctggatcagacagcctcctggcaaaggactggaatggatcggccacatctactacagcggcgtgacctactacaaccccagcctgaagtccagagtgaccatcagcgtggacaccagccggaaccagttctccctgaagctgtctagcgtgacagccgccgataccgccgtgtactactgcaccagagaggacagcagcaactggcggagtagaggccagggaacactggtcacagttagctctacgcgtttcaagatccccatcgaggaactggaagatcgggtgttcgtgaactgcaacacctctatcacctgggtggaaggcaccgtgggaacactgctgagcgacatcaccagactggacctcggcaagcggattctggaccctcggggcatctacagatgcaacggcaccgacatctacaaggacaaagaaagcaccgtgcaggtccactacagaatgtgccagtcctgcgtggaactggaccctgctacagtggccggcatcatcgtgaccgatgtgatcgctactctgctgctggctctgggagtgttctgcttcgccggacacgaaacaggcagactgtctggcgctgccgatacacaggccctgctgagaaacgaccaagtgtatcagcccctgcgcgacagagatgatgcccagtattctcacctcggcggcaactgggctagaaacaag

SEQ ID NO: 6501 - DNA, 1314 bp, Artificial Sequence
  Synthetic Polynucloetide
atggccttaccagtgaccgccttgctcctgccgctggccttgctgctccacgccgccaggccggaagttcagttggtagagtctggaggcggagtggtacaaccggggcggtctcttagacttagttgcgcagcaagcggtttctctttctctggctatgggatgcactgggtgagacaggcccctgggaaaggactggagtgggtggcctacatttcatacgacgggagtaataaatactatgcagactccgttaagggcaggttcacgatctctcgggacaattccaagaatacattgtatcttcagatgaatagtctccgagctgaagacacggcggtttactactgcgctaaagacccggcctggggacttcgacttggagagagttctagctacgattttgacatttggggacaagggacaatggtcactgtctcaagtctcgagagcggcggaggcggatctttcgaacagctccagctgcaagagtctggacctggcctggtcaagcctagcgagacactgagcctgacctgtaccgtgtccggcgatagcatcagcagcggcgattactactggggctggatcagacagcctcctggcaaaggactggaatggatcggccacatctactacagcggcgtgacctactacaaccccagcctgaagtccagagtgaccatcagcgtggacaccagccggaaccagttctccctgaagctgtctagcgtgacagccgccgataccgccgtgtactactgcaccagagaggacagcagcaactggcggagtagaggccagggaacactggtcacagttagctctacgcgtcagagcatcaagggcaaccacctggtcaaggtgtacgactaccaagaggacggcagcgtgctgctgacatgtgatgccgaggccaagaacatcacctggtttaaggacggcaagatgatcggcttcctgaccgaggacaagaagaagtggaacctgggcagcaacgctaaggaccccagaggcatgtatcagtgcaagggcagccagaacaagagcaagcccctccaggtgtactaccggatgtgccagaactgcatcgagctgaacgccgctaccatcagcggctttctgttcgccgagatcgtgtccatcttcgtgctggccgtgggcgtgtactttatcgctggacaggatggcgtgcggcagagcagagcttccgataagcaaaccctgctgcctaacgaccagctgtaccagcctctgaaggacagagaggacgaccagtacagccacctccagggcaatcagctgagaagaaac

SEQ ID NO: 6502 - DNA, 1263 bp, Artificial Sequence
  Synthetic Polynucloetide
atggccttaccagtgaccgccttgctcctgccgctggccttgctgctccacgccgccaggccggaagttcagttggtagagtctggaggcggagtggtacaaccggggcggtctcttagacttagttgcgcagcaagcggtttctctttctctggctatgggatgcactgggtgagacaggcccctgggaaaggactggagtgggtggcctacatttcatacgacgggagtaataaatactatgcagactccgttaagggcaggttcacgatctctcgggacaattccaagaatacattgtatcttcagatgaatagtctccgagctgaagacacggcggtttactactgcgctaaagacccggcctggggacttcgacttggagagagttctagctacgattttgacatttggggacaagggacaatggtcactgtctcaagtctcgagagcggcggaggcggatctttcgaacagctccagctgcaagagtctggacctggcctggtcaagcctagcgagacactgagcctgacctgtaccgtgtccggcgatagcatcagcagcggcgattactactggggctggatcagacagcctcctggcaaaggactggaatggatcggccacatctactacagcggcgtgacctactacaaccccagcctgaagtccagagtgaccatcagcgtggacaccagccggaaccagttctccctgaagctgtctagcgtgacagccgccgataccgccgtgtactactgcaccagagaggacagcagcaactggcggagtagaggccagggaacactggtcacagttagctctacgcgtcagagttttgggttgttggaccctaaattgtgctatctgttggacggaatcctgttcatttacggagtgatcctgaccgcattgttcctgcgggttaagttttccagatccgcagacgcacccgcttaccaacaagggcagaaccaactctacaatgaacttaatttggggcggagggaagagtacgacgttctggacaaaaggaggggacgagatcccgagatgggcggaaagcctcagcgaaggaagaatccgcaagaggggctttataacgaactccagaaagataaaatggcagaagcctatagtgagattgggatgaagggagaaaggaggaggggtaaaggtcacgatgggttgtaccaaggattgagcacagccactaaagatacctatgatgcgctccacatgcaggccctgccgccaaga

SEQ ID NO: 6503 - DNA, 1962 bp, Artificial Sequence
  Synthetic Polynucloetide
atggccttaccagtgaccgccttgctcctgccgctggccttgctgctccacgccgccaggccgcagctccagctgcaagagtctggacctggcctggtcaagcctagcgagacactgagcctgacctgtaccgtgtccggcgatagcatcagcagcggcgattactactggggctggatcagacagcctcctggcaaaggactggaatggatcggccacatctactacagcggcgtgacctactacaaccccagcctgaagtccagagtgaccatcagcgtggacaccagccggaaccagttctccctgaagctgtctagcgtgacagccgccgataccgccgtgtactactgcaccagagaggacagcagcaactggcggagtagaggccagggaacactggtcacagttagctctctcgagagcggcggaggcggatctttcgaagttcagttggtagagtctggaggcggagtggtacaaccggggcggtctcttagacttagttgcgcagcaagcggtttctctttctctggctatgggatgcactgggtgagacaggcccctgggaaaggactggagtgggtggcctacatttcatacgacgggagtaataaatactatgcagactccgttaagggcaggttcacgatctctcgggacaattccaagaatacattgtatcttcagatgaatagtctccgagctgaagacacggcggtttactactgcgctaaagacccggcctggggacttcgacttggagagagttctagctacgattttgacatttggggacaagggacaatggtcactgtctcaagtacgcgtgggagcggcatccagaaccctgatcctgccgtgtaccagctgcgggatagcaagagcagcgacaagagcgtgtgtctgttcaccgacttcgacagccagaccaacgtgtcccagagcaaggactccgacgtgtacatcaccgataagaccgtgctggacatgcggagcatggacttcaagagcaactccgccgtggcctggtccaacaagtccgatttcgcctgcgccaacgccttcaacaacagcattatccccgaggacacattcttcccaagccccgagagcagctgcgacgtgaagctggtggaaaagagcttcgagacagacaccaacctgaacttccagaacctgagcgtgatcggcttcagaatcctgctgctgaaagtggccggctttaacctgctgatgaccctgcggctgtggtccagccgcgccaagagaagcggatctggcgtgaagcagaccctgaatttcgacctgctgaagctggctggcgacgtggaatccaacccaggcccttctagaggccatatgaccgagtacaagcccacggtgcgcctcgccacccgcgacgacgtccccagggccgtacgcaccctcgccgccgcgttcgccgactaccccgccacgcgccacaccgtcgatccggaccgccacatcgagcgggtcaccgagctgcaagaactcttcctcacgcgcgtcgggctcgacatcggcaaggtgtgggtcgcggacgacggcgccgcggtggcggtctggaccacgccggagagcgtcgaagcgggggcggtgttcgccgagatcggcccgcgcatggccgagttgagcggttcccggctggccgcgcagcaacagatggaaggcctcctggcgccgcaccggcccaaggagcccgcgtggttcctggccaccgtcggcgtctcgcccgaccaccagggcaagggtctgggcagcgccgtcgtgctccccggagtggaggcggccgagcgcgccggggtgcccgccttcctggagacctccgcgccccgcaacctccccttctacgagcggctcggcttcaccgtcaccgccgacgtcgaggtgcccgaaggaccgcgcacctggtgcatgacccgcaagcccggtgcctga

SEQ ID NO: 6504 - DNA, 2058 bp, Artificial Sequence
  Synthetic Polynucloetide
atggccttaccagtgaccgccttgctcctgccgctggccttgctgctccacgccgccaggccgcagctccagctgcaagagtctggacctggcctggtcaagcctagcgagacactgagcctgacctgtaccgtgtccggcgatagcatcagcagcggcgattactactggggctggatcagacagcctcctggcaaaggactggaatggatcggccacatctactacagcggcgtgacctactacaaccccagcctgaagtccagagtgaccatcagcgtggacaccagccggaaccagttctccctgaagctgtctagcgtgacagccgccgataccgccgtgtactactgcaccagagaggacagcagcaactggcggagtagaggccagggaacactggtcacagttagctctctcgagagcggcggaggcggatctttcgaagttcagttggtagagtctggaggcggagtggtacaaccggggcggtctcttagacttagttgcgcagcaagcggtttctctttctctggctatgggatgcactgggtgagacaggcccctgggaaaggactggagtgggtggcctacatttcatacgacgggagtaataaatactatgcagactccgttaagggcaggttcacgatctctcgggacaattccaagaatacattgtatcttcagatgaatagtctccgagctgaagacacggcggtttactactgcgctaaagacccggcctggggacttcgacttggagagagttctagctacgattttgacatttggggacaagggacaatggtcactgtctcaagtctcgaggacctgaagaacgtgttcccacctgaggtggccgtgttcgagcctagcgaggccgagatcagccacacccagaaagccaccctcgtgtgcctggctaccggcttctaccccgaccatgtggaactgtcttggtgggtcaacggcaaagaggtgcacagcggcgtgtctaccgacccccagccactgaaagaacagcccgccctgaacgacagccggtactgcctgagcagcagactgagagtgtccgccaccttctggcagaacccccggaaccacttcagatgccaggtgcagttctacggcctgagcgagaacgacgagtggacccaggacagagccaagcccgtgacccagatcgtgtctgccgaagcctggggcagagccgattgcggctttaccagcgagagctaccagcagggcgtgctgagcgccaccatcctgtacgagatcctgctgggcaaggccaccctgtacgccgtgctggtgtctgccctggtgctgatggctatggtcaagcggaaggacagccggggaagggccaagcgatctggatctggagcaacaaacttctcactactcaaacaagcaggtgacgtggaggagaatcccgggcctactagaggccatatgaccgagtacaagcccacggtgcgcctcgccacccgcgacgacgtccccagggccgtacgcaccctcgccgccgcgttcgccgactaccccgccacgcgccacaccgtcgatccggaccgccacatcgagcgggtcaccgagctgcaagaactcttcctcacgcgcgtcgggctcgacatcggcaaggtgtgggtcgcggacgacggcgccgcggtggcggtctggaccacgccggagagcgtcgaagcgggggcggtgttcgccgagatcggcccgcgcatggccgagttgagcggttcccggctggccgcgcagcaacagatggaaggcctcctggcgccgcaccggcccaaggagcccgcgtggttcctggccaccgtcggcgtctcgcccgaccaccagggcaagggtctgggcagcgccgtcgtgctccccggagtggaggcggccgagcgcgccggggtgcccgccttcctggagacctccgcgccccgcaacctccccttctacgagcggctcggcttcaccgtcaccgccgacgtcgaggtgcccgaaggaccgcgcacctggtgcatgacccgcaagcccggtgcctga

SEQ ID NO: 6505 - DNA, 2208 bp, Artificial Sequence
  Synthetic Polynucloetide
atggccttaccagtgaccgccttgctcctgccgctggccttgctgctccacgccgccaggccgcagctccagctgcaagagtctggacctggcctggtcaagcctagcgagacactgagcctgacctgtaccgtgtccggcgatagcatcagcagcggcgattactactggggctggatcagacagcctcctggcaaaggactggaatggatcggccacatctactacagcggcgtgacctactacaaccccagcctgaagtccagagtgaccatcagcgtggacaccagccggaaccagttctccctgaagctgtctagcgtgacagccgccgataccgccgtgtactactgcaccagagaggacagcagcaactggcggagtagaggccagggaacactggtcacagttagctctctcgagagcggcggaggcggatctttcgaagttcagttggtagagtctggaggcggagtggtacaaccggggcggtctcttagacttagttgcgcagcaagcggtttctctttctctggctatgggatgcactgggtgagacaggcccctgggaaaggactggagtgggtggcctacatttcatacgacgggagtaataaatactatgcagactccgttaagggcaggttcacgatctctcgggacaattccaagaatacattgtatcttcagatgaatagtctccgagctgaagacacggcggtttactactgcgctaaagacccggcctggggacttcgacttggagagagttctagctacgattttgacatttggggacaagggacaatggtcactgtctcaagtacgcgtgagcagaaactgatctcggaagaggatctggggagcggcaccccattcccttctctggcccctcccatcatgctgctggtggacggcaagcagcagatggtggtcgtgtgcctggtgctggatgtggccccacctggactggacagccccatctggtttagcgccggcaatggctctgccctggacgcctttacctacggcccaagccctgccaccgatggcacctggacaaatctggcccacctgagcctgcccagcgaggaactggcttcttgggagcctctcgtgtgccacacaggacctggcgctgagggacacagcagatccacccagcctatgcacctgtctggcgaggccagcaccgccagaacctgtcctcaggaacctctgagaggcacccctggcggagcactgtggctgggagtgctgagactgctgctgttcaagctgctgctgtttgacctgctgctgacctgctcctgtctgtgcgatcctgccggccctctgccttctcctgccaccaccacaagactgagagccctgggcagccacagactgcaccctgccacagagacaggcggcagagaggccacaagcagccctagaccccagcccagagacagaagatggggcgataccccccctggcagaaagcctggatctccagtccgcgccaagagaagcggatctggcgtgaagcagaccctgaatttcgacctgctgaagctggctggcgacgtggaatccaacccaggcccttctagatctagaggccatatgaccgagtacaagcccacggtgcgcctcgccacccgcgacgacgtccccagggccgtacgcaccctcgccgccgcgttcgccgactaccccgccacgcgccacaccgtcgatccggaccgccacatcgagcgggtcaccgagctgcaagaactcttcctcacgcgcgtcgggctcgacatcggcaaggtgtgggtcgcggacgacggcgccgcggtggcggtctggaccacgccggagagcgtcgaagcgggggcggtgttcgccgagatcggcccgcgcatggccgagttgagcggttcccggctggccgcgcagcaacagatggaaggcctcctggcgccgcaccggcccaaggagcccgcgtggttcctggccaccgtcggcgtctcgcccgaccaccagggcaagggtctgggcagcgccgtcgtgctccccggagtggaggcggccgagcgcgccggggtgcccgccttcctggagacctccgcgccccgcaacctccccttctacgagcggctcggcttcaccgtcaccgccgacgtcgaggtgcccgaaggaccgcgcacctggtgcatgacccgcaagcccggtgcctga

SEQ ID NO: 6506 - DNA, 1650 bp, Artificial Sequence
  Synthetic Polynucloetide
atggccttaccagtgaccgccttgctcctgccgctggccttgctgctccacgccgccaggccgcagctccagctgcaagagtctggacctggcctggtcaagcctagcgagacactgagcctgacctgtaccgtgtccggcgatagcatcagcagcggcgattactactggggctggatcagacagcctcctggcaaaggactggaatggatcggccacatctactacagcggcgtgacctactacaaccccagcctgaagtccagagtgaccatcagcgtggacaccagccggaaccagttctccctgaagctgtctagcgtgacagccgccgataccgccgtgtactactgcaccagagaggacagcagcaactggcggagtagaggccagggaacactggtcacagttagctctctcgaggacctgaagaacgtgttcccacctgaggtggccgtgttcgagcctagcgaggccgagatcagccacacccagaaagccaccctcgtgtgcctggctaccggcttctaccccgaccatgtggaactgtcttggtgggtcaacggcaaagaggtgcacagcggcgtgtctaccgacccccagccactgaaagaacagcccgccctgaacgacagccggtactgcctgagcagcagactgagagtgtccgccaccttctggcagaacccccggaaccacttcagatgccaggtgcagttctacggcctgagcgagaacgacgagtggacccaggacagagccaagcccgtgacccagatcgtgtctgccgaagcctggggcagagccgattgcggctttaccagcgagagctaccagcagggcgtgctgagcgccaccatcctgtacgagatcctgctgggcaaggccaccctgtacgccgtgctggtgtctgccctggtgctgatggctatggtcaagcggaaggacagccggggaagggccaagcgatctggatctggagcaacaaacttctcactactcaaacaagcaggtgacgtggaggagaatcccgggcctactagaggccatatgaccgagtacaagcccacggtgcgcctcgccacccgcgacgacgtccccagggccgtacgcaccctcgccgccgcgttcgccgactaccccgccacgcgccacaccgtcgatccggaccgccacatcgagcgggtcaccgagctgcaagaactcttcctcacgcgcgtcgggctcgacatcggcaaggtgtgggtcgcggacgacggcgccgcggtggcggtctggaccacgccggagagcgtcgaagcgggggcggtgttcgccgagatcggcccgcgcatggccgagttgagcggttcccggctggccgcgcagcaacagatggaaggcctcctggcgccgcaccggcccaaggagcccgcgtggttcctggccaccgtcggcgtctcgcccgaccaccagggcaagggtctgggcagcgccgtcgtgctccccggagtggaggcggccgagcgcgccggggtgcccgccttcctggagacctccgcgccccgcaacctccccttctacgagcggctcggcttcaccgtcaccgccgacgtcgaggtgcccgaaggaccgcgcacctggtgcatgacccgcaagcccggtgcctga

SEQ ID NO: 6507 - DNA, 957 bp, Artificial Sequence
  Synthetic Polynucloetide
atggccttaccagtgaccgccttgctcctgccgctggccttgctgctccacgccgccaggccgcagctccagctgcaagagtctggacctggcctggtcaagcctagcgagacactgagcctgacctgtaccgtgtccggcgatagcatcagcagcggcgattactactggggctggatcagacagcctcctggcaaaggactggaatggatcggccacatctactacagcggcgtgacctactacaaccccagcctgaagtccagagtgaccatcagcgtggacaccagccggaaccagttctccctgaagctgtctagcgtgacagccgccgataccgccgtgtactactgcaccagagaggacagcagcaactggcggagtagaggccagggaacactggtcacagttagctctctcgaggacctgaagaacgtgttcccacctgaggtggccgtgttcgagcctagcgaggccgagatcagccacacccagaaagccaccctcgtgtgcctggctaccggcttctaccccgaccatgtggaactgtcttggtgggtcaacggcaaagaggtgcacagcggcgtgtctaccgacccccagccactgaaagaacagcccgccctgaacgacagccggtactgcctgagcagcagactgagagtgtccgccaccttctggcagaacccccggaaccacttcagatgccaggtgcagttctacggcctgagcgagaacgacgagtggacccaggacagagccaagcccgtgacccagatcgtgtctgccgaagcctggggcagagccgattgcggctttaccagcgagagctaccagcagggcgtgctgagcgccaccatcctgtacgagatcctgctgggcaaggccaccctgtacgccgtgctggtgtctgccctggtgctgatggctatggtcaagcggaaggacagccgggga

SEQ ID NO: 6508 - DNA, 1368 bp, Artificial Sequence
  Synthetic Polynucloetide
atggactggatttggcgcatccttttccttgtcggcgctgctaccggcgcgcattccttcgaagttcagttggtagagtctggaggcggagtggtacaaccggggcggtctcttagacttagttgcgcagcaagcggtttctctttctctggctatgggatgcactgggtgagacaggcccctgggaaaggactggagtgggtggcctacatttcatacgacgggagtaataaatactatgcagactccgttaagggcaggttcacgatctctcgggacaattccaagaatacattgtatcttcagatgaatagtctccgagctgaagacacggcggtttactactgcgctaaagacccggcctggggacttcgacttggagagagttctagctacgattttgacatttggggacaagggacaatggtcactgtctcaagtacgcgtatccagaaccctgatcctgccgtgtaccagctgcgggatagcaagagcagcgacaagagcgtgtgtctgttcaccgacttcgacagccagaccaacgtgtcccagagcaaggactccgacgtgtacatcaccgataagaccgtgctggacatgcggagcatggacttcaagagcaactccgccgtggcctggtccaacaagtccgatttcgcctgcgccaacgccttcaacaacagcattatccccgaggacacattcttcccaagccccgagagcagctgcgacgtgaagctggtggaaaagagcttcgagacagacaccaacctgaacttccagaacctgagcgtgatcggcttcagaatcctgctgctgaaagtggccggctttaacctgctgatgaccctgcggctgtggtccagccgcgccaagagaagcggatctggcgtgaagcagaccctgaatttcgacctgctgaagctggctggcgacgtggaatccaacccaggcccttctagaggccatatggccaagcctttgtctcaagaagaatccaccctcattgaaagagcaacggctacaatcaacagcatccccatctctgaagactacagcgtcgccagcgcagctctctctagcgacggccgcatcttcactggtgtcaatgtatatcattttactgggggaccttgtgcagaactcgtggtgctgggcactgctgctgctgcggcagctggcaacctgacttgtatcgtcgcgatcggaaatgagaacaggggcatcttgagcccctgcggacggtgccgacaggtgcttctcgatctgcatcctgggatcaaagccatagtgaaggacagtgatggacagccgacggcagttgggattcgtgaattgctgccctctggttatgtgtgggagggctga

SEQ ID NO: 6509 - DNA, 867 bp, Artificial Sequence
  Synthetic Polynucloetide
atggactggatttggcgcatccttttccttgtcggcgctgctaccggcgcgcattccttcgaagttcagttggtagagtctggaggcggagtggtacaaccggggcggtctcttagacttagttgcgcagcaagcggtttctctttctctggctatgggatgcactgggtgagacaggcccctgggaaaggactggagtgggtggcctacatttcatacgacgggagtaataaatactatgcagactccgttaagggcaggttcacgatctctcgggacaattccaagaatacattgtatcttcagatgaatagtctccgagctgaagacacggcggtttactactgcgctaaagacccggcctggggacttcgacttggagagagttctagctacgattttgacatttggggacaagggacaatggtcactgtctcaagtacgcgtatccagaaccctgatcctgccgtgtaccagctgcgggatagcaagagcagcgacaagagcgtgtgtctgttcaccgacttcgacagccagaccaacgtgtcccagagcaaggactccgacgtgtacatcaccgataagaccgtgctggacatgcggagcatggacttcaagagcaactccgccgtggcctggtccaacaagtccgatttcgcctgcgccaacgccttcaacaacagcattatccccgaggacacattcttcccaagccccgagagcagctgcgacgtgaagctggtggaaaagagcttcgagacagacaccaacctgaacttccagaacctgagcgtgatcggcttcagaatcctgctgctgaaagtggccggctttaacctgctgatgaccctgcggctgtggtccagc

SEQ ID NO: 6510 - DNA, 1704 bp, Artificial Sequence
  Synthetic Polynucloetide
atggccttaccagtgaccgccttgctcctgccgctggccttgctgctccacgccgccaggccgcagctccagctgcaagagtctggacctggcctggtcaagcctagcgagacactgagcctgacctgtaccgtgtccggcgatagcatcagcagcggcgattactactggggctggatcagacagcctcctggcaaaggactggaatggatcggccacatctactacagcggcgtgacctactacaaccccagcctgaagtccagagtgaccatcagcgtggacaccagccggaaccagttctccctgaagctgtctagcgtgacagccgccgataccgccgtgtactactgcaccagagaggacagcagcaactggcggagtagaggccagggaacactggtcacagttagctctctcgaggggaaaccaattcccaaccctcttctgggactggattcaaccggcagcggcgaggacctgaagaacgtgttcccacctgaggtggccgtgttcgagcctagcgaggccgagatcagccacacccagaaagccaccctcgtgtgcctggctaccggcttctaccccgaccatgtggaactgtcttggtgggtcaacggcaaagaggtgcacagcggcgtgtgtaccgacccccagccactgaaagaacagcccgccctgaacgacagccggtactgcctgagcagcagactgagagtgtccgccaccttctggcagaacccccggaaccacttcagatgccaggtgcagttctacggcctgagcgagaacgacgagtggacccaggacagagccaagcccgtgacccagatcgtgtctgccgaagcctggggcagagccgattgcggctttaccagcgagagctaccagcagggcgtgctgagcgccaccatcctgtacgagatcctgctgggcaaggccaccctgtacgccgtgctggtgtctgccctggtgctgatggctatggtcaagcggaaggacagccggggaagggccaagcgatctggatctggagcaacaaacttctcactactcaaacaagcaggtgacgtggaggagaatcccgggcctactagaggccatatgaccgagtacaagcccacggtgcgcctcgccacccgcgacgacgtccccagggccgtacgcaccctcgccgccgcgttcgccgactaccccgccacgcgccacaccgtcgatccggaccgccacatcgagcgggtcaccgagctgcaagaactcttcctcacgcgcgtcgggctcgacatcggcaaggtgtgggtcgcggacgacggcgccgcggtggcggtctggaccacgccggagagcgtcgaagcgggggcggtgttcgccgagatcggcccgcgcatggccgagttgagcggttcccggctggccgcgcagcaacagatggaaggcctcctggcgccgcaccggcccaaggagcccgcgtggttcctggccaccgtcggcgtctcgcccgaccaccagggcaagggtctgggcagcgccgtcgtgctccccggagtggaggcggccgagcgcgccggggtgcccgccttcctggagacctccgcgccccgcaacctccccttctacgagcggctcggcttcaccgtcaccgccgacgtcgaggtgcccgaaggaccgcgcacctggtgcatgacccgcaagcccggtgcctga

SEQ ID NO: 6511 - DNA, 1014 bp, Artificial Sequence
  Synthetic Polynucloetide
atggccttaccagtgaccgccttgctcctgccgctggccttgctgctccacgccgccaggccgcagctccagctgcaagagtctggacctggcctggtcaagcctagcgagacactgagcctgacctgtaccgtgtccggcgatagcatcagcagcggcgattactactggggctggatcagacagcctcctggcaaaggactggaatggatcggccacatctactacagcggcgtgacctactacaaccccagcctgaagtccagagtgaccatcagcgtggacaccagccggaaccagttctccctgaagctgtctagcgtgacagccgccgataccgccgtgtactactgcaccagagaggacagcagcaactggcggagtagaggccagggaacactggtcacagttagctctctcgaggggaaaccaattcccaaccctcttctgggactggattcaaccggcagcggcgaggacctgaagaacgtgttcccacctgaggtggccgtgttcgagcctagcgaggccgagatcagccacacccagaaagccaccctcgtgtgcctggctaccggcttctaccccgaccatgtggaactgtcttggtgggtcaacggcaaagaggtgcacagcggcgtgtgtaccgacccccagccactgaaagaacagcccgccctgaacgacagccggtactgcctgagcagcagactgagagtgtccgccaccttctggcagaacccccggaaccacttcagatgccaggtgcagttctacggcctgagcgagaacgacgagtggacccaggacagagccaagcccgtgacccagatcgtgtctgccgaagcctggggcagagccgattgcggctttaccagcgagagctaccagcagggcgtgctgagcgccaccatcctgtacgagatcctgctgggcaaggccaccctgtacgccgtgctggtgtctgccctggtgctgatggctatggtcaagcggaaggacagccggggatga

SEQ ID NO: 6512 - DNA, 1404 bp, Artificial Sequence
  Synthetic Polynucloetide
atggactggatttggcgcatccttttccttgtcggcgctgctaccggcgcgcattccttcgaagttcagttggtagagtctggaggcggagtggtacaaccggggcggtctcttagacttagttgcgcagcaagcggtttctctttctctggctatgggatgcactgggtgagacaggcccctgggaaaggactggagtgggtggcctacatttcatacgacgggagtaataaatactatgcagactccgttaagggcaggttcacgatctctcgggacaattccaagaatacattgtatcttcagatgaatagtctccgagctgaagacacggcggtttactactgcgctaaagacccggcctggggacttcgacttggagagagttctagctacgattttgacatttggggacaagggacaatggtcactgtctcaagtacgcgtgagcagaaactgatctcggaagaggatgggagcggcatccagaaccctgatcctgccgtgtaccagctgcgggatagcaagagcagcgacaagagcgtgtgtctgttcaccgacttcgacagccagaccaacgtgtcccagagcaaggactccgacgtgtacatcaccgataagtgcgtgctggacatgcggagcatggacttcaagagcaactccgccgtggcctggtccaacaagtccgatttcgcctgcgccaacgccttcaacaacagcattatccccgaggacacattcttcccaagccccgagagcagctgcgacgtgaagctggtggaaaagagcttcgagacagacaccaacctgaacttccagaacctgagcgtgatcggcttcagaatcctgctgctgaaagtggccggctttaacctgctgatgaccctgcggctgtggtccagccgcgccaagagaagcggatctggcgtgaagcagaccctgaatttcgacctgctgaagctggctggcgacgtggaatccaacccaggcccttctagaggccatatggccaagcctttgtctcaagaagaatccaccctcattgaaagagcaacggctacaatcaacagcatccccatctctgaagactacagcgtcgccagcgcagctctctctagcgacggccgcatcttcactggtgtcaatgtatatcattttactgggggaccttgtgcagaactcgtggtgctgggcactgctgctgctgcggcagctggcaacctgacttgtatcgtcgcgatcggaaatgagaacaggggcatcttgagcccctgcggacggtgccgacaggtgcttctcgatctgcatcctgggatcaaagccatagtgaaggacagtgatggacagccgacggcagttgggattcgtgaattgctgccctctggttatgtgtgggagggctga

SEQ ID NO: 6513 - DNA, 906 bp, Artificial Sequence
  Synthetic Polynucloetide
atggactggatttggcgcatccttttccttgtcggcgctgctaccggcgcgcattccttcgaagttcagttggtagagtctggaggcggagtggtacaaccggggcggtctcttagacttagttgcgcagcaagcggtttctctttctctggctatgggatgcactgggtgagacaggcccctgggaaaggactggagtgggtggcctacatttcatacgacgggagtaataaatactatgcagactccgttaagggcaggttcacgatctctcgggacaattccaagaatacattgtatcttcagatgaatagtctccgagctgaagacacggcggtttactactgcgctaaagacccggcctggggacttcgacttggagagagttctagctacgattttgacatttggggacaagggacaatggtcactgtctcaagtacgcgtgagcagaaactgatctcggaagaggatgggagcggcatccagaaccctgatcctgccgtgtaccagctgcgggatagcaagagcagcgacaagagcgtgtgtctgttcaccgacttcgacagccagaccaacgtgtcccagagcaaggactccgacgtgtacatcaccgataagtgcgtgctggacatgcggagcatggacttcaagagcaactccgccgtggcctggtccaacaagtccgatttcgcctgcgccaacgccttcaacaacagcattatccccgaggacacattcttcccaagccccgagagcagctgcgacgtgaagctggtggaaaagagcttcgagacagacaccaacctgaacttccagaacctgagcgtgatcggcttcagaatcctgctgctgaaagtggccggctttaacctgctgatgaccctgcggctgtggtccagctga

SEQ ID NO: 6514 - DNA, 1962 bp, Artificial Sequence
  Synthetic Polynucloetide
atggccttaccagtgaccgccttgctcctgccgctggccttgctgctccacgccgccaggccgcagctccagctgcaagagtctggacctggcctggtcaagcctagcgagacactgagcctgacctgtaccgtgtccggcgatagcatcagcagcggcgattactactggggctggatcagacagcctcctggcaaaggactggaatggatcggccacatctactacagcggcgtgacctactacaaccccagcctgaagtccagagtgaccatcagcgtggacaccagccggaaccagttctccctgaagctgtctagcgtgacagccgccgataccgccgtgtactactgcaccagagaggacagcagcaactggcggagtagaggccagggaacactggtcacagttagctctctcgagagcggcggaggcggatctttcgaagttcagttggtagagtctggaggcggagtggtacaaccggggcggtctcttagacttagttgcgcagcaagcggtttctctttctctggctatgggatgcactgggtgagacaggcccctgggaaaggactggagtgggtggcctacatttcatacgacgggagtaataaatactatgcagactccgttaagggcaggttcacgatctctcgggacaattccaagaatacattgtatcttcagatgaatagtctccgagctgaagacacggcggtttactactgcgctaaagacccggcctggggacttcgacttggagagagttctagctacgattttgacatttggggacaagggacaatggtcactgtctcaagtacgcgtgggagcggcatccagaaccctgatcctgccgtgtaccagctgcgggatagcaagagcagcgacaagagcgtgtgtctgttcaccgacttcgacagccagaccaacgtgtcccagagcaaggactccgacgtgtacatcaccgataagaccgtgctggacatgcggagcatggacttcaagagcaactccgccgtggcctggtccaacaagtccgatttcgcctgcgccaacgccttcaacaacagcattatccccgaggacacattcttcccaagcagcgacgtgccctgcgacgtgaagctggtggaaaagagcttcgagacagacaccaacctgaacttccagaacctgagcgtgatcggcttcagaatcctgctgctgaaagtggccggctttaacctgctgatgaccctgcggctgtggtccagccgcgccaagagaagcggatctggcgtgaagcagaccctgaatttcgacctgctgaagctggctggcgacgtggaatccaacccaggcccttctagaggccatatgaccgagtacaagcccacggtgcgcctcgccacccgcgacgacgtccccagggccgtacgcaccctcgccgccgcgttcgccgactaccccgccacgcgccacaccgtcgatccggaccgccacatcgagcgggtcaccgagctgcaagaactcttcctcacgcgcgtcgggctcgacatcggcaaggtgtgggtcgcggacgacggcgccgcggtggcggtctggaccacgccggagagcgtcgaagcgggggcggtgttcgccgagatcggcccgcgcatggccgagttgagcggttcccggctggccgcgcagcaacagatggaaggcctcctggcgccgcaccggcccaaggagcccgcgtggttcctggccaccgtcggcgtctcgcccgaccaccagggcaagggtctgggcagcgccgtcgtgctccccggagtggaggcggccgagcgcgccggggtgcccgccttcctggagacctccgcgccccgcaacctccccttctacgagcggctcggcttcaccgtcaccgccgacgtcgaggtgcccgaaggaccgcgcacctggtgcatgacccgcaagcccggtgcctga

SEQ ID NO: 6515 - DNA, 2058 bp, Artificial Sequence
  Synthetic Polynucloetide
atggccttaccagtgaccgccttgctcctgccgctggccttgctgctccacgccgccaggccgcagctccagctgcaagagtctggacctggcctggtcaagcctagcgagacactgagcctgacctgtaccgtgtccggcgatagcatcagcagcggcgattactactggggctggatcagacagcctcctggcaaaggactggaatggatcggccacatctactacagcggcgtgacctactacaaccccagcctgaagtccagagtgaccatcagcgtggacaccagccggaaccagttctccctgaagctgtctagcgtgacagccgccgataccgccgtgtactactgcaccagagaggacagcagcaactggcggagtagaggccagggaacactggtcacagttagctctctcgagagcggcggaggcggatctttcgaagttcagttggtagagtctggaggcggagtggtacaaccggggcggtctcttagacttagttgcgcagcaagcggtttctctttctctggctatgggatgcactgggtgagacaggcccctgggaaaggactggagtgggtggcctacatttcatacgacgggagtaataaatactatgcagactccgttaagggcaggttcacgatctctcgggacaattccaagaatacattgtatcttcagatgaatagtctccgagctgaagacacggcggtttactactgcgctaaagacccggcctggggacttcgacttggagagagttctagctacgattttgacatttggggacaagggacaatggtcactgtctcaagtctcgaggacctgaagaacgtgttcccacctgaggtggccgtgttcgagcctagcaaggccgagatcgcccacacccagaaagccaccctcgtgtgcctggctaccggcttctaccccgaccatgtggaactgtcttggtgggtcaacggcaaagaggtgcacagcggcgtgtctaccgacccccagccactgaaagaacagcccgccctgaacgacagccggtactgcctgagcagcagactgagagtgtccgccaccttctggcagaacccccggaaccacttcagatgccaggtgcagttctacggcctgagcgagaacgacgagtggacccaggacagagccaagcccgtgacccagatcgtgtctgccgaagcctggggcagagccgattgcggcatcaccagcgccagctaccaccagggcgtgctgagcgccaccatcctgtacgagatcctgctgggcaaggccaccctgtacgccgtgctggtgtctgccctggtgctgatggctatggtcaagcggaaggacagccggggaagggccaagcgatctggatctggagcaacaaacttctcactactcaaacaagcaggtgacgtggaggagaatcccgggcctactagaggccatatgaccgagtacaagcccacggtgcgcctcgccacccgcgacgacgtccccagggccgtacgcaccctcgccgccgcgttcgccgactaccccgccacgcgccacaccgtcgatccggaccgccacatcgagcgggtcaccgagctgcaagaactcttcctcacgcgcgtcgggctcgacatcggcaaggtgtgggtcgcggacgacggcgccgcggtggcggtctggaccacgccggagagcgtcgaagcgggggcggtgttcgccgagatcggcccgcgcatggccgagttgagcggttcccggctggccgcgcagcaacagatggaaggcctcctggcgccgcaccggcccaaggagcccgcgtggttcctggccaccgtcggcgtctcgcccgaccaccagggcaagggtctgggcagcgccgtcgtgctccccggagtggaggcggccgagcgcgccggggtgcccgccttcctggagacctccgcgccccgcaacctccccttctacgagcggctcggcttcaccgtcaccgccgacgtcgaggtgcccgaaggaccgcgcacctggtgcatgacccgcaagcccggtgcctga

SEQ ID NO: 6516 - DNA, 2127 bp, Artificial Sequence
  Synthetic Polynucloetide
atggccttaccagtgaccgccttgctcctgccgctggccttgctgctccacgccgccaggccgcagctccagctgcaagagtctggacctggcctggtcaagcctagcgagacactgagcctgacctgtaccgtgtccggcgatagcatcagcagcggcgattactactggggctggatcagacagcctcctggcaaaggactggaatggatcggccacatctactacagcggcgtgacctactacaaccccagcctgaagtccagagtgaccatcagcgtggacaccagccggaaccagttctccctgaagctgtctagcgtgacagccgccgataccgccgtgtactactgcaccagagaggacagcagcaactggcggagtagaggccagggaacactggtcacagttagctctctcgagagcggcggaggcggatctttcgaagttcagttggtagagtctggaggcggagtggtacaaccggggcggtctcttagacttagttgcgcagcaagcggtttctctttctctggctatgggatgcactgggtgagacaggcccctgggaaaggactggagtgggtggcctacatttcatacgacgggagtaataaatactatgcagactccgttaagggcaggttcacgatctctcgggacaattccaagaatacattgtatcttcagatgaatagtctccgagctgaagacacggcggtttactactgcgctaaagacccggcctggggacttcgacttggagagagttctagctacgattttgacatttggggacaagggacaatggtcactgtctcaagtacgcgtgggtctggaggcggaggcagcggcggaggcgggagcggcgacggtaacgaggagatgggaggaatcactcaaaccccttacaaagtctcaatttcaggaacaactgttatccttacatgtccccagtatcctggcagcgagatcctttggcagcataacgacaagaatatagggggagatgaagacgataagaatatcggatctgacgaggatcacttgagcctgaaagagttctccgagcttgaacaaagcggatattatgtgtgctatccgcgcgggtcaaagccggaagacgctaacttttacctttatctccgagccagagtgtgcgaaaattgcatggaaatggacgttatgtccgttgctacaatagttatcgtagatatatgcatcacgggtggactgcttctgctggtttattattggtccaagaatagaaaggccaaagctaaacccgtgaccagaggcgctggcgcaggcggaaggcaaaggggacaaaacaaagaacggccaccaccagtgccaaatccagattatgagcctattcggaaaggacagagggacctgtactctggcctgaatcagagaagaatccgcgccaagagaagcggatctggcgtgaagcagaccctgaatttcgacctgctgaagctggctggcgacgtggaatccaacccaggcccttctagaggccatatgaccgagtacaagcccacggtgcgcctcgccacccgcgacgacgtccccagggccgtacgcaccctcgccgccgcgttcgccgactaccccgccacgcgccacaccgtcgatccggaccgccacatcgagcgggtcaccgagctgcaagaactcttcctcacgcgcgtcgggctcgacatcggcaaggtgtgggtcgcggacgacggcgccgcggtggcggtctggaccacgccggagagcgtcgaagcgggggcggtgttcgccgagatcggcccgcgcatggccgagttgagcggttcccggctggccgcgcagcaacagatggaaggcctcctggcgccgcaccggcccaaggagcccgcgtggttcctggccaccgtcggcgtctcgcccgaccaccagggcaagggtctgggcagcgccgtcgtgctccccggagtggaggcggccgagcgcgccggggtgcccgccttcctggagacctccgcgccccgcaacctccccttctacgagcggctcggcttcaccgtcaccgccgacgtcgaggtgcccgaaggaccgcgcacctggtgcatgacccgcaagcccggtgcctga

SEQ ID NO: 6517 - DNA, 2022 bp, Artificial Sequence
  Synthetic Polynucloetide
atggccttaccagtgaccgccttgctcctgccgctggccttgctgctccacgccgccaggccgcagctccagctgcaagagtctggacctggcctggtcaagcctagcgagacactgagcctgacctgtaccgtgtccggcgatagcatcagcagcggcgattactactggggctggatcagacagcctcctggcaaaggactggaatggatcggccacatctactacagcggcgtgacctactacaaccccagcctgaagtccagagtgaccatcagcgtggacaccagccggaaccagttctccctgaagctgtctagcgtgacagccgccgataccgccgtgtactactgcaccagagaggacagcagcaactggcggagtagaggccagggaacactggtcacagttagctctctcgagagcggcggaggcggatctttcgaagttcagttggtagagtctggaggcggagtggtacaaccggggcggtctcttagacttagttgcgcagcaagcggtttctctttctctggctatgggatgcactgggtgagacaggcccctgggaaaggactggagtgggtggcctacatttcatacgacgggagtaataaatactatgcagactccgttaagggcaggttcacgatctctcgggacaattccaagaatacattgtatcttcagatgaatagtctccgagctgaagacacggcggtttactactgcgctaaagacccggcctggggacttcgacttggagagagttctagctacgattttgacatttggggacaagggacaatggtcactgtctcaagtacgcgtgggtctggaggcggaggcagcggcggaggcgggagcggcttcaagatccccatcgaggaactggaagatcgggtgttcgtgaactgcaacacctctatcacctgggtggaaggcaccgtgggaacactgctgagcgacatcaccagactggacctcggcaagcggattctggaccctcggggcatctacagatgcaacggcaccgacatctacaaggacaaagaaagcaccgtgcaggtccactacagaatgtgccagtcctgcgtggaactggaccctgctacagtggccggcatcatcgtgaccgatgtgatcgctactctgctgctggctctgggagtgttctgcttcgccggacacgaaacaggcagactgtctggcgctgccgatacacaggccctgctgagaaacgaccaagtgtatcagcccctgcgcgacagagatgatgcccagtattctcacctcggcggcaactgggctagaaacaagcgcgccaagagaagcggatctggcgtgaagcagaccctgaatttcgacctgctgaagctggctggcgacgtggaatccaacccaggcccttctagaggccatatgaccgagtacaagcccacggtgcgcctcgccacccgcgacgacgtccccagggccgtacgcaccctcgccgccgcgttcgccgactaccccgccacgcgccacaccgtcgatccggaccgccacatcgagcgggtcaccgagctgcaagaactcttcctcacgcgcgtcgggctcgacatcggcaaggtgtgggtcgcggacgacggcgccgcggtggcggtctggaccacgccggagagcgtcgaagcgggggcggtgttcgccgagatcggcccgcgcatggccgagttgagcggttcccggctggccgcgcagcaacagatggaaggcctcctggcgccgcaccggcccaaggagcccgcgtggttcctggccaccgtcggcgtctcgcccgaccaccagggcaagggtctgggcagcgccgtcgtgctccccggagtggaggcggccgagcgcgccggggtgcccgccttcctggagacctccgcgccccgcaacctccccttctacgagcggctcggcttcaccgtcaccgccgacgtcgaggtgcccgaaggaccgcgcacctggtgcatgacccgcaagcccggtgcctga

SEQ ID NO: 6518 - DNA, 2052 bp, Artificial Sequence
  Synthetic Polynucloetide
atggccttaccagtgaccgccttgctcctgccgctggccttgctgctccacgccgccaggccgcagctccagctgcaagagtctggacctggcctggtcaagcctagcgagacactgagcctgacctgtaccgtgtccggcgatagcatcagcagcggcgattactactggggctggatcagacagcctcctggcaaaggactggaatggatcggccacatctactacagcggcgtgacctactacaaccccagcctgaagtccagagtgaccatcagcgtggacaccagccggaaccagttctccctgaagctgtctagcgtgacagccgccgataccgccgtgtactactgcaccagagaggacagcagcaactggcggagtagaggccagggaacactggtcacagttagctctctcgagagcggcggaggcggatctttcgaagttcagttggtagagtctggaggcggagtggtacaaccggggcggtctcttagacttagttgcgcagcaagcggtttctctttctctggctatgggatgcactgggtgagacaggcccctgggaaaggactggagtgggtggcctacatttcatacgacgggagtaataaatactatgcagactccgttaagggcaggttcacgatctctcgggacaattccaagaatacattgtatcttcagatgaatagtctccgagctgaagacacggcggtttactactgcgctaaagacccggcctggggacttcgacttggagagagttctagctacgattttgacatttggggacaagggacaatggtcactgtctcaagtacgcgtgggtctggaggcggaggcagcggcggaggcgggagcggccagagcatcaagggcaaccacctggtcaaggtgtacgactaccaagaggacggcagcgtgctgctgacatgtgatgccgaggccaagaacatcacctggtttaaggacggcaagatgatcggcttcctgaccgaggacaagaagaagtggaacctgggcagcaacgctaaggaccccagaggcatgtatcagtgcaagggcagccagaacaagagcaagcccctccaggtgtactaccggatgtgccagaactgcatcgagctgaacgccgctaccatcagcggctttctgttcgccgagatcgtgtccatcttcgtgctggccgtgggcgtgtactttatcgctggacaggatggcgtgcggcagagcagagcttccgataagcaaaccctgctgcctaacgaccagctgtaccagcctctgaaggacagagaggacgaccagtacagccacctccagggcaatcagctgagaagaaaccgcgccaagagaagcggatctggcgtgaagcagaccctgaatttcgacctgctgaagctggctggcgacgtggaatccaacccaggcccttctagaggccatatgaccgagtacaagcccacggtgcgcctcgccacccgcgacgacgtccccagggccgtacgcaccctcgccgccgcgttcgccgactaccccgccacgcgccacaccgtcgatccggaccgccacatcgagcgggtcaccgagctgcaagaactcttcctcacgcgcgtcgggctcgacatcggcaaggtgtgggtcgcggacgacggcgccgcggtggcggtctggaccacgccggagagcgtcgaagcgggggcggtgttcgccgagatcggcccgcgcatggccgagttgagcggttcccggctggccgcgcagcaacagatggaaggcctcctggcgccgcaccggcccaaggagcccgcgtggttcctggccaccgtcggcgtctcgcccgaccaccagggcaagggtctgggcagcgccgtcgtgctccccggagtggaggcggccgagcgcgccggggtgcccgccttcctggagacctccgcgccccgcaacctccccttctacgagcggctcggcttcaccgtcaccgccgacgtcgaggtgcccgaaggaccgcgcacctggtgcatgacccgcaagcccggtgcctga

SEQ ID NO: 6519 - DNA, 2001 bp, Artificial Sequence
  Synthetic Polynucloetide
atggccttaccagtgaccgccttgctcctgccgctggccttgctgctccacgccgccaggccgcagctccagctgcaagagtctggacctggcctggtcaagcctagcgagacactgagcctgacctgtaccgtgtccggcgatagcatcagcagcggcgattactactggggctggatcagacagcctcctggcaaaggactggaatggatcggccacatctactacagcggcgtgacctactacaaccccagcctgaagtccagagtgaccatcagcgtggacaccagccggaaccagttctccctgaagctgtctagcgtgacagccgccgataccgccgtgtactactgcaccagagaggacagcagcaactggcggagtagaggccagggaacactggtcacagttagctctctcgagagcggcggaggcggatctttcgaagttcagttggtagagtctggaggcggagtggtacaaccggggcggtctcttagacttagttgcgcagcaagcggtttctctttctctggctatgggatgcactgggtgagacaggcccctgggaaaggactggagtgggtggcctacatttcatacgacgggagtaataaatactatgcagactccgttaagggcaggttcacgatctctcgggacaattccaagaatacattgtatcttcagatgaatagtctccgagctgaagacacggcggtttactactgcgctaaagacccggcctggggacttcgacttggagagagttctagctacgattttgacatttggggacaagggacaatggtcactgtctcaagtacgcgtgggtctggaggcggaggcagcggcggaggcgggagcggccagagttttgggttgttggaccctaaattgtgctatctgttggacggaatcctgttcatttacggagtgatcctgaccgcattgttcctgcgggttaagttttccagatccgcagacgcacccgcttaccaacaagggcagaaccaactctacaatgaacttaatttggggcggagggaagagtacgacgttctggacaaaaggaggggacgagatcccgagatgggcggaaagcctcagcgaaggaagaatccgcaagaggggctttataacgaactccagaaagataaaatggcagaagcctatagtgagattgggatgaagggagaaaggaggaggggtaaaggtcacgatgggttgtaccaaggattgagcacagccactaaagatacctatgatgcgctccacatgcaggccctgccgccaagacgcgccaagagaagcggatctggcgtgaagcagaccctgaatttcgacctgctgaagctggctggcgacgtggaatccaacccaggcccttctagaggccatatgaccgagtacaagcccacggtgcgcctcgccacccgcgacgacgtccccagggccgtacgcaccctcgccgccgcgttcgccgactaccccgccacgcgccacaccgtcgatccggaccgccacatcgagcgggtcaccgagctgcaagaactcttcctcacgcgcgtcgggctcgacatcggcaaggtgtgggtcgcggacgacggcgccgcggtggcggtctggaccacgccggagagcgtcgaagcgggggcggtgttcgccgagatcggcccgcgcatggccgagttgagcggttcccggctggccgcgcagcaacagatggaaggcctcctggcgccgcaccggcccaaggagcccgcgtggttcctggccaccgtcggcgtctcgcccgaccaccagggcaagggtctgggcagcgccgtcgtgctccccggagtggaggcggccgagcgcgccggggtgcccgccttcctggagacctccgcgccccgcaacctccccttctacgagcggctcggcttcaccgtcaccgccgacgtcgaggtgcccgaaggaccgcgcacctggtgcatgacccgcaagcccggtgcctga

SEQ ID NO: 6520 - DNA, 2625 bp, Artificial Sequence
  Synthetic Polynucloetide
atggccttaccagtgaccgccttgctcctgccgctggccttgctgctccacgccgccaggccgcagctccagctgcaagagtctggacctggcctggtcaagcctagcgagacactgagcctgacctgtaccgtgtccggcgatagcatcagcagcggcgattactactggggctggatcagacagcctcctggcaaaggactggaatggatcggccacatctactacagcggcgtgacctactacaaccccagcctgaagtccagagtgaccatcagcgtggacaccagccggaaccagttctccctgaagctgtctagcgtgacagccgccgataccgccgtgtactactgcaccagagaggacagcagcaactggcggagtagaggccagggaacactggtcacagttagctctctcgagggacagcctaaggccaatcctaccgtgacactgttccctccaagcagcgaagaactccaggccaacaaggccacacttgtgtgcctgatctccgacttctaccctggggctgtgacagtggcttggaaggccgatggatctcctgtgaaagccggcgtggaaaccaccaagccatccaagcagagcaacaacaaatacgccgccagctcctacctgagcctgacacctgagcagtggaagtcccacagatcctacagctgccaagtgacccacgaaggcagcaccgtggaaaagacagtggcccctacagagtgcagcggcagagccgattgcggctttaccagcgagagctaccagcagggcgtgctgagcgccaccatcctgtacgagatcctgctgggcaaggccaccctgtacgccgtgctggtgtctgccctggtgctgatggctatggtcaagcggaaggacagccggggaagggccaagcgatctggatctggagcaacaaacttctcactactcaaacaagcaggtgacgtggaggagaatcccgggcctactagtatggactggatttggcgcatccttttccttgtcggcgctgctaccggcgcgcattccttcgaagttcagttggtagagtctggaggcggagtggtacaaccggggcggtctcttagacttagttgcgcagcaagcggtttctctttctctggctatgggatgcactgggtgagacaggcccctgggaaaggactggagtgggtggcctacatttcatacgacgggagtaataaatactatgcagactccgttaagggcaggttcacgatctctcgggacaattccaagaatacattgtatcttcagatgaatagtctccgagctgaagacacggcggtttactactgcgctaaagacccggcctggggacttcgacttggagagagttctagctacgattttgacatttggggacaagggacaatggtcactgtctcaagtacgcgtgcctctacaaagggaccctccgtgtttcctctggctcccagcagcaagtctacaagcggaggaacagccgctctgggctgcctggtcaaggattactttcccgagcctgtgaccgtgtcctggaatagcggagcactgacaagcggcgtgcacacctttccagccgtgctgcaaagcagcggcctgtactctctgagcagcgtggtcacagtgcctagctctagcctgggcacccagacctacatctgcaatgtgaaccacaagcctagcaacaccaaggtggacaagagagtggaacccaagagctgtatccccgaggacacattcttcccaagccccgagagcagctgcgacgtgaagctggtggaaaagagcttcgagacagacaccaacctgaacttccagaacctgagcgtgatcggcttcagaatcctgctgctgaaagtggccggctttaacctgctgatgaccctgcggctgtggtccagccgcgccaagagaagcggatctggcgtgaagcagaccctgaatttcgacctgctgaagctggctggcgacgtggaatccaacccaggcccttctagaggccatatgaccgagtacaagcccacggtgcgcctcgccacccgcgacgacgtccccagggccgtacgcaccctcgccgccgcgttcgccgactaccccgccacgcgccacaccgtcgatccggaccgccacatcgagcgggtcaccgagctgcaagaactcttcctcacgcgcgtcgggctcgacatcggcaaggtgtgggtcgcggacgacggcgccgcggtggcggtctggaccacgccggagagcgtcgaagcgggggcggtgttcgccgagatcggcccgcgcatggccgagttgagcggttcccggctggccgcgcagcaacagatggaaggcctcctggcgccgcaccggcccaaggagcccgcgtggttcctggccaccgtcggcgtctcgcccgaccaccagggcaagggtctgggcagcgccgtcgtgctccccggagtggaggcggccgagcgcgccggggtgcccgccttcctggagacctccgcgccccgcaacctccccttctacgagcggctcggcttcaccgtcaccgccgacgtcgaggtgcccgaaggaccgcgcacctggtgcatgacccgcaagcccggtgcctga

SEQ ID NO: 6521 - DNA, 1923 bp, Artificial Sequence; identical to SEQ ID NO: 6494
  Synthetic Polynucloetide

SEQ ID NO: 6522 - DNA, 2010 bp, Artificial Sequence
  Synthetic Polynucloetide
atggccttaccagtgaccgccttgctcctgccgctggccttgctgctccacgccgccaggccgcagctccagctgcaagagtctggacctggcctggtcaagcctagcgagacactgagcctgacctgtaccgtgtccggcgatagcatcagcagcggcgattactactggggctggatcagacagcctcctggcaaaggactggaatggatcggccacatctactacagcggcgtgacctactacaaccccagcctgaagtccagagtgaccatcagcgtggacaccagccggaaccagttctccctgaagctgtctagcgtgacagccgccgataccgccgtgtactactgcaccagagaggacagcagcaactggcggagtagaggccagggaacactggtcacagttagctctctcgagggatctggcagagccgattgcggctttaccagcgagagctaccagcagggcgtgctgagcgccaccatcctgtacgagatcctgctgggcaaggccaccctgtacgccgtgctggtgtctgccctggtgctgatggctatggtcaagcggaaggacagccggggaagggccaagcgatctggatctggagcaacaaacttctcactactcaaacaagcaggtgacgtggaggagaatcccgggcctactagtatggactggatttggcgcatccttttccttgtcggcgctgctaccggcgcgcattccttcgaagttcagttggtagagtctggaggcggagtggtacaaccggggcggtctcttagacttagttgcgcagcaagcggtttctctttctctggctatgggatgcactgggtgagacaggcccctgggaaaggactggagtgggtggcctacatttcatacgacgggagtaataaatactatgcagactccgttaagggcaggttcacgatctctcgggacaattccaagaatacattgtatcttcagatgaatagtctccgagctgaagacacggcggtttactactgcgctaaagacccggcctggggacttcgacttggagagagttctagctacgattttgacatttggggacaagggacaatggtcactgtctcaagtacgcgtggcagcatccccgaggacacattcttcccaagccccgagagcagctgcgacgtgaagctggtggaaaagagcttcgagacagacaccaacctgaacttccagaacctgagcgtgatcggcttcagaatcctgctgctgaaagtggccggctttaacctgctgatgaccctgcggctgtggtccagccgcgccaagagaagcggatctggcgtgaagcagaccctgaatttcgacctgctgaagctggctggcgacgtggaatccaacccaggcccttctagaggccatatgaccgagtacaagcccacggtgcgcctcgccacccgcgacgacgtccccagggccgtacgcaccctcgccgccgcgttcgccgactaccccgccacgcgccacaccgtcgatccggaccgccacatcgagcgggtcaccgagctgcaagaactcttcctcacgcgcgtcgggctcgacatcggcaaggtgtgggtcgcggacgacggcgccgcggtggcggtctggaccacgccggagagcgtcgaagcgggggcggtgttcgccgagatcggcccgcgcatggccgagttgagcggttcccggctggccgcgcagcaacagatggaaggcctcctggcgccgcaccggcccaaggagcccgcgtggttcctggccaccgtcggcgtctcgcccgaccaccagggcaagggtctgggcagcgccgtcgtgctccccggagtggaggcggccgagcgcgccggggtgcccgccttcctggagacctccgcgccccgcaacctccccttctacgagcggctcggcttcaccgtcaccgccgacgtcgaggtgcccgaaggaccgcgcacctggtgcatgacccgcaagcccggtgcctga

SEQ ID NO: 6523 - DNA, 1308 bp, Artificial Sequence
  Synthetic Polynucloetide
atggccttaccagtgaccgccttgctcctgccgctggccttgctgctccacgccgccaggccgcagctccagctgcaagagtctggacctggcctggtcaagcctagcgagacactgagcctgacctgtaccgtgtccggcgatagcatcagcagcggcgattactactggggctggatcagacagcctcctggcaaaggactggaatggatcggccacatctactacagcggcgtgacctactacaaccccagcctgaagtccagagtgaccatcagcgtggacaccagccggaaccagttctccctgaagctgtctagcgtgacagccgccgataccgccgtgtactactgcaccagagaggacagcagcaactggcggagtagaggccagggaacactggtcacagttagctctctcgagggatctggcagagccgattgcggctttaccagcgagagctaccagcagggcgtgctgagcgccaccatcctgtacgagatcctgctgggcaaggccaccctgtacgccgtgctggtgtctgccctggtgctgatggctatggtcaagcggaaggacagccggggaagggccaagcgatctggatctggagcaacaaacttctcactactcaaacaagcaggtgacgtggaggagaatcccgggcctactagtatggactggatttggcgcatccttttccttgtcggcgctgctaccggcgcgcattccttcgaagttcagttggtagagtctggaggcggagtggtacaaccggggcggtctcttagacttagttgcgcagcaagcggtttctctttctctggctatgggatgcactgggtgagacaggcccctgggaaaggactggagtgggtggcctacatttcatacgacgggagtaataaatactatgcagactccgttaagggcaggttcacgatctctcgggacaattccaagaatacattgtatcttcagatgaatagtctccgagctgaagacacggcggtttactactgcgctaaagacccggcctggggacttcgacttggagagagttctagctacgattttgacatttggggacaagggacaatggtcactgtctcaagtacgcgtggcagcatccccgaggacacattcttcccaagccccgagagcagctgcgacgtgaagctggtggaaaagagcttcgagacagacaccaacctgaacttccagaacctgagcgtgatcggcttcagaatcctgctgctgaaagtggccggctttaacctgctgatgaccctgcggctgtggtccagc

SEQ ID NO: 6524 - DNA, 2037 bp, Artificial Sequence
  Synthetic Polynucloetide
atggccttaccagtgaccgccttgctcctgccgctggccttgctgctccacgccgccaggccgcagctccagctgcaagagtctggacctggcctggtcaagcctagcgagacactgagcctgacctgtaccgtgtccggcgatagcatcagcagcggcgattactactggggctggatcagacagcctcctggcaaaggactggaatggatcggccacatctactacagcggcgtgacctactacaaccccagcctgaagtccagagtgaccatcagcgtggacaccagccggaaccagttctccctgaagctgtctagcgtgacagccgccgataccgccgtgtactactgcaccagagaggacagcagcaactggcggagtagaggccagggaacactggtcacagttagctctctcgaggacaaaactcacacatgcccaccgtgcccagcaggcagagccgattgcggctttaccagcgagagctaccagcagggcgtgctgagcgccaccatcctgtacgagatcctgctgggcaaggccaccctgtacgccgtgctggtgtctgccctggtgctgatggctatggtcaagcggaaggacagccggggaagggccaagcgatctggatctggagcaacaaacttctcactactcaaacaagcaggtgacgtggaggagaatcccgggcctactagtatggactggatttggcgcatccttttccttgtcggcgctgctaccggcgcgcattccttcgaagttcagttggtagagtctggaggcggagtggtacaaccggggcggtctcttagacttagttgcgcagcaagcggtttctctttctctggctatgggatgcactgggtgagacaggcccctgggaaaggactggagtgggtggcctacatttcatacgacgggagtaataaatactatgcagactccgttaagggcaggttcacgatctctcgggacaattccaagaatacattgtatcttcagatgaatagtctccgagctgaagacacggcggtttactactgcgctaaagacccggcctggggacttcgacttggagagagttctagctacgattttgacatttggggacaagggacaatggtcactgtctcaagtacgcgtggcagcatccccgaggacacattcttcccaagccccgagagcagctgcgacgtgaagctggtggaaaagagcttcgagacagacaccaacctgaacttccagaacctgagcgtgatcggcttcagaatcctgctgctgaaagtggccggctttaacctgctgatgaccctgcggctgtggtccagccgcgccaagagaagcggatctggcgtgaagcagaccctgaatttcgacctgctgaagctggctggcgacgtggaatccaacccaggcccttctagaggccatatgaccgagtacaagcccacggtgcgcctcgccacccgcgacgacgtccccagggccgtacgcaccctcgccgccgcgttcgccgactaccccgccacgcgccacaccgtcgatccggaccgccacatcgagcgggtcaccgagctgcaagaactcttcctcacgcgcgtcgggctcgacatcggcaaggtgtgggtcgcggacgacggcgccgcggtggcggtctggaccacgccggagagcgtcgaagcgggggcggtgttcgccgagatcggcccgcgcatggccgagttgagcggttcccggctggccgcgcagcaacagatggaaggcctcctggcgccgcaccggcccaaggagcccgcgtggttcctggccaccgtcggcgtctcgcccgaccaccagggcaagggtctgggcagcgccgtcgtgctccccggagtggaggcggccgagcgcgccggggtgcccgccttcctggagacctccgcgccccgcaacctccccttctacgagcggctcggcttcaccgtcaccgccgacgtcgaggtgcccgaaggaccgcgcacctggtgcatgacccgcaagcccggtgcctga

SEQ ID NO: 6525 - DNA, 2037 bp, Artificial Sequence
  Synthetic Polynucloetide
atggccttaccagtgaccgccttgctcctgccgctggccttgctgctccacgccgccaggccgcagctccagctgcaagagtctggacctggcctggtcaagcctagcgagacactgagcctgacctgtaccgtgtccggcgatagcatcagcagcggcgattactactggggctggatcagacagcctcctggcaaaggactggaatggatcggccacatctactacagcggcgtgacctactacaaccccagcctgaagtccagagtgaccatcagcgtggacaccagccggaaccagttctccctgaagctgtctagcgtgacagccgccgataccgccgtgtactactgcaccagagaggacagcagcaactggcggagtagaggccagggaacactggtcacagttagctctctcgagggatctggcagagccgattgcggctttaccagcgagagctaccagcagggcgtgctgagcgccaccatcctgtacgagatcctgctgggcaaggccaccctgtacgccgtgctggtgtctgccctggtgctgatggctatggtcaagcggaaggacagccggggaagggccaagcgatctggatctggagcaacaaacttctcactactcaaacaagcaggtgacgtggaggagaatcccgggcctactagtatggactggatttggcgcatccttttccttgtcggcgctgctaccggcgcgcattccttcgaagttcagttggtagagtctggaggcggagtggtacaaccggggcggtctcttagacttagttgcgcagcaagcggtttctctttctctggctatgggatgcactgggtgagacaggcccctgggaaaggactggagtgggtggcctacatttcatacgacgggagtaataaatactatgcagactccgttaagggcaggttcacgatctctcgggacaattccaagaatacattgtatcttcagatgaatagtctccgagctgaagacacggcggtttactactgcgctaaagacccggcctggggacttcgacttggagagagttctagctacgattttgacatttggggacaagggacaatggtcactgtctcaagtacgcgtgataaaactcatacctgtccgccatgcccggcaatccccgaggacacattcttcccaagccccgagagcagctgcgacgtgaagctggtggaaaagagcttcgagacagacaccaacctgaacttccagaacctgagcgtgatcggcttcagaatcctgctgctgaaagtggccggctttaacctgctgatgaccctgcggctgtggtccagccgcgccaagagaagcggatctggcgtgaagcagaccctgaatttcgacctgctgaagctggctggcgacgtggaatccaacccaggcccttctagaggccatatgaccgagtacaagcccacggtgcgcctcgccacccgcgacgacgtccccagggccgtacgcaccctcgccgccgcgttcgccgactaccccgccacgcgccacaccgtcgatccggaccgccacatcgagcgggtcaccgagctgcaagaactcttcctcacgcgcgtcgggctcgacatcggcaaggtgtgggtcgcggacgacggcgccgcggtggcggtctggaccacgccggagagcgtcgaagcgggggcggtgttcgccgagatcggcccgcgcatggccgagttgagcggttcccggctggccgcgcagcaacagatggaaggcctcctggcgccgcaccggcccaaggagcccgcgtggttcctggccaccgtcggcgtctcgcccgaccaccagggcaagggtctgggcagcgccgtcgtgctccccggagtggaggcggccgagcgcgccggggtgcccgccttcctggagacctccgcgccccgcaacctccccttctacgagcggctcggcttcaccgtcaccgccgacgtcgaggtgcccgaaggaccgcgcacctggtgcatgacccgcaagcccggtgcctga

SEQ ID NO: 6526 - DNA, 2064 bp, Artificial Sequence
  Synthetic Polynucloetide
atggccttaccagtgaccgccttgctcctgccgctggccttgctgctccacgccgccaggccgcagctccagctgcaagagtctggacctggcctggtcaagcctagcgagacactgagcctgacctgtaccgtgtccggcgatagcatcagcagcggcgattactactggggctggatcagacagcctcctggcaaaggactggaatggatcggccacatctactacagcggcgtgacctactacaaccccagcctgaagtccagagtgaccatcagcgtggacaccagccggaaccagttctccctgaagctgtctagcgtgacagccgccgataccgccgtgtactactgcaccagagaggacagcagcaactggcggagtagaggccagggaacactggtcacagttagctctctcgaggacaaaactcacacatgcccaccgtgcccagcaggcagagccgattgcggctttaccagcgagagctaccagcagggcgtgctgagcgccaccatcctgtacgagatcctgctgggcaaggccaccctgtacgccgtgctggtgtctgccctggtgctgatggctatggtcaagcggaaggacagccggggaagggccaagcgatctggatctggagcaacaaacttctcactactcaaacaagcaggtgacgtggaggagaatcccgggcctactagtatggactggatttggcgcatccttttccttgtcggcgctgctaccggcgcgcattccttcgaagttcagttggtagagtctggaggcggagtggtacaaccggggcggtctcttagacttagttgcgcagcaagcggtttctctttctctggctatgggatgcactgggtgagacaggcccctgggaaaggactggagtgggtggcctacatttcatacgacgggagtaataaatactatgcagactccgttaagggcaggttcacgatctctcgggacaattccaagaatacattgtatcttcagatgaatagtctccgagctgaagacacggcggtttactactgcgctaaagacccggcctggggacttcgacttggagagagttctagctacgattttgacatttggggacaagggacaatggtcactgtctcaagtacgcgtgataaaactcatacctgtccgccatgcccggcaatccccgaggacacattcttcccaagccccgagagcagctgcgacgtgaagctggtggaaaagagcttcgagacagacaccaacctgaacttccagaacctgagcgtgatcggcttcagaatcctgctgctgaaagtggccggctttaacctgctgatgaccctgcggctgtggtccagccgcgccaagagaagcggatctggcgtgaagcagaccctgaatttcgacctgctgaagctggctggcgacgtggaatccaacccaggcccttctagaggccatatgaccgagtacaagcccacggtgcgcctcgccacccgcgacgacgtccccagggccgtacgcaccctcgccgccgcgttcgccgactaccccgccacgcgccacaccgtcgatccggaccgccacatcgagcgggtcaccgagctgcaagaactcttcctcacgcgcgtcgggctcgacatcggcaaggtgtgggtcgcggacgacggcgccgcggtggcggtctggaccacgccggagagcgtcgaagcgggggcggtgttcgccgagatcggcccgcgcatggccgagttgagcggttcccggctggccgcgcagcaacagatggaaggcctcctggcgccgcaccggcccaaggagcccgcgtggttcctggccaccgtcggcgtctcgcccgaccaccagggcaagggtctgggcagcgccgtcgtgctccccggagtggaggcggccgagcgcgccggggtgcccgccttcctggagacctccgcgccccgcaacctccccttctacgagcggctcggcttcaccgtcaccgccgacgtcgaggtgcccgaaggaccgcgcacctggtgcatgacccgcaagcccggtgcctga

SEQ ID NO: 6527 - DNA, 1362 bp, Artificial Sequence
  Synthetic Polynucloetide
atggccttaccagtgaccgccttgctcctgccgctggccttgctgctccacgccgccaggccgcagctccagctgcaagagtctggacctggcctggtcaagcctagcgagacactgagcctgacctgtaccgtgtccggcgatagcatcagcagcggcgattactactggggctggatcagacagcctcctggcaaaggactggaatggatcggccacatctactacagcggcgtgacctactacaaccccagcctgaagtccagagtgaccatcagcgtggacaccagccggaaccagttctccctgaagctgtctagcgtgacagccgccgataccgccgtgtactactgcaccagagaggacagcagcaactggcggagtagaggccagggaacactggtcacagttagctctctcgaggacaaaactcacacatgcccaccgtgcccagcaggcagagccgattgcggctttaccagcgagagctaccagcagggcgtgctgagcgccaccatcctgtacgagatcctgctgggcaaggccaccctgtacgccgtgctggtgtctgccctggtgctgatggctatggtcaagcggaaggacagccggggaagggccaagcgatctggatctggagcaacaaacttctcactactcaaacaagcaggtgacgtggaggagaatcccgggcctactagtatggactggatttggcgcatccttttccttgtcggcgctgctaccggcgcgcattccttcgaagttcagttggtagagtctggaggcggagtggtacaaccggggcggtctcttagacttagttgcgcagcaagcggtttctctttctctggctatgggatgcactgggtgagacaggcccctgggaaaggactggagtgggtggcctacatttcatacgacgggagtaataaatactatgcagactccgttaagggcaggttcacgatctctcgggacaattccaagaatacattgtatcttcagatgaatagtctccgagctgaagacacggcggtttactactgcgctaaagacccggcctggggacttcgacttggagagagttctagctacgattttgacatttggggacaagggacaatggtcactgtctcaagtacgcgtgataaaactcatacctgtccgccatgcccggcaatccccgaggacacattcttcccaagccccgagagcagctgcgacgtgaagctggtggaaaagagcttcgagacagacaccaacctgaacttccagaacctgagcgtgatcggcttcagaatcctgctgctgaaagtggccggctttaacctgctgatgaccctgcggctgtggtccagc

SEQ ID NO: 6528 - DNA, 1335 bp, Artificial Sequence
  Synthetic Polynucloetide
atggccttaccagtgaccgccttgctcctgccgctggccttgctgctccacgccgccaggccgcagctccagctgcaagagtctggacctggcctggtcaagcctagcgagacactgagcctgacctgtaccgtgtccggcgatagcatcagcagcggcgattactactggggctggatcagacagcctcctggcaaaggactggaatggatcggccacatctactacagcggcgtgacctactacaaccccagcctgaagtccagagtgaccatcagcgtggacaccagccggaaccagttctccctgaagctgtctagcgtgacagccgccgataccgccgtgtactactgcaccagagaggacagcagcaactggcggagtagaggccagggaacactggtcacagttagctctctcgagggatctggcagagccgattgcggctttaccagcgagagctaccagcagggcgtgctgagcgccaccatcctgtacgagatcctgctgggcaaggccaccctgtacgccgtgctggtgtctgccctggtgctgatggctatggtcaagcggaaggacagccggggaagggccaagcgatctggatctggagcaacaaacttctcactactcaaacaagcaggtgacgtggaggagaatcccgggcctactagtatggactggatttggcgcatccttttccttgtcggcgctgctaccggcgcgcattccttcgaagttcagttggtagagtctggaggcggagtggtacaaccggggcggtctcttagacttagttgcgcagcaagcggtttctctttctctggctatgggatgcactgggtgagacaggcccctgggaaaggactggagtgggtggcctacatttcatacgacgggagtaataaatactatgcagactccgttaagggcaggttcacgatctctcgggacaattccaagaatacattgtatcttcagatgaatagtctccgagctgaagacacggcggtttactactgcgctaaagacccggcctggggacttcgacttggagagagttctagctacgattttgacatttggggacaagggacaatggtcactgtctcaagtacgcgtgataaaactcatacctgtccgccatgcccggcaatccccgaggacacattcttcccaagccccgagagcagctgcgacgtgaagctggtggaaaagagcttcgagacagacaccaacctgaacttccagaacctgagcgtgatcggcttcagaatcctgctgctgaaagtggccggctttaacctgctgatgaccctgcggctgtggtccagc

SEQ ID NO: 6529 - DNA, 2691 bp, Artificial Sequence
  Synthetic Polynucloetide
atggccttaccagtgaccgccttgctcctgccgctggccttgctgctccacgccgccaggccgcagctccagctgcaagagtctggacctggcctggtcaagcctagcgagacactgagcctgacctgtaccgtgtccggcgatagcatcagcagcggcgattactactggggctggatcagacagcctcctggcaaaggactggaatggatcggccacatctactacagcggcgtgacctactacaaccccagcctgaagtccagagtgaccatcagcgtggacaccagccggaaccagttctccctgaagctgtctagcgtgacagccgccgataccgccgtgtactactgcaccagagaggacagcagcaactggcggagtagaggccagggaacactggtcacagttagctctctcgagggacagcctaaggccaatcctaccgtgacactgttccctccaagcagcgaagaactccaggccaacaaggccacacttgtgtgcctgatctccgacttctaccctggggctgtgacagtggcttggaaggccgatggatctcctgtgaaagccggcgtggaaaccaccaagccatccaagcagagcaacaacaaatacgccgccagctcctacctgagcctgacacctgagcagtggaagtcccacagatcctacagctgccaagtgacccacgaaggcagcaccgtggaaaagacagtggcccctacagagtgcagccccatcaagaccgatgtgattacaatggaccccaaggacaactgctccaaggacgccaacgataccctgctgctccagctgaccaacaccagcgcctactacatgtacttgttgctgctgctgaagtccgtggtgtacttcgccatcatcacatgctgcctgctgcggagaaccgccttctgctgcaacggcgagaagtctagggccaagcgatctggatctggagcaacaaacttctcactactcaaacaagcaggtgacgtggaggagaatcccgggcctactagtatggactggatttggcgcatccttttccttgtcggcgctgctaccggcgcgcattccttcgaagttcagttggtagagtctggaggcggagtggtacaaccggggcggtctcttagacttagttgcgcagcaagcggtttctctttctctggctatgggatgcactgggtgagacaggcccctgggaaaggactggagtgggtggcctacatttcatacgacgggagtaataaatactatgcagactccgttaagggcaggttcacgatctctcgggacaattccaagaatacattgtatcttcagatgaatagtctccgagctgaagacacggcggtttactactgcgctaaagacccggcctggggacttcgacttggagagagttctagctacgattttgacatttggggacaagggacaatggtcactgtctcaagtacgcgtgcctctacaaagggaccctccgtgtttcctctggctcccagcagcaagtctacaagcggaggaacagccgctctgggctgcctggtcaaggattactttcccgagcctgtgaccgtgtcctggaatagcggagcactgacaagcggcgtgcacacctttccagccgtgctgcaaagcagcggcctgtactctctgagcagcgtggtcacagtgcctagctctagcctgggcacccagacctacatctgcaatgtgaaccacaagcctagcaacaccaaggtggacaagagagtggaacccaagagctgtgaagtgaaaaccgactccaccgaccacgtgaagcccaaagagacagagaacaccaagcagcccagcaagagctgccacaagcccaaggccatcgtgcacaccgagaaagtgaacatgatgagcctgaccgtgctgggcctgcggatgctgttcgccaaaaccgtggccgtgaacttcctgctgaccgccaagctgttcttcctccgcgccaagagaagcggatctggcgtgaagcagaccctgaatttcgacctgctgaagctggctggcgacgtggaatccaacccaggcccttctagaggccatatgaccgagtacaagcccacggtgcgcctcgccacccgcgacgacgtccccagggccgtacgcaccctcgccgccgcgttcgccgactaccccgccacgcgccacaccgtcgatccggaccgccacatcgagcgggtcaccgagctgcaagaactcttcctcacgcgcgtcgggctcgacatcggcaaggtgtgggtcgcggacgacggcgccgcggtggcggtctggaccacgccggagagcgtcgaagcgggggcggtgttcgccgagatcggcccgcgcatggccgagttgagcggttcccggctggccgcgcagcaacagatggaaggcctcctggcgccgcaccggcccaaggagcccgcgtggttcctggccaccgtcggcgtctcgcccgaccaccagggcaagggtctgggcagcgccgtcgtgctccccggagtggaggcggccgagcgcgccggggtgcccgccttcctggagacctccgcgccccgcaacctccccttctacgagcggctcggcttcaccgtcaccgccgacgtcgaggtgcccgaaggaccgcgcacctggtgcatgacccgcaagcccggtgcctga

SEQ ID NO: 6530 - DNA, 1989 bp, Artificial Sequence; identical to SEQ ID NO: 6492
  Synthetic Polynucloetide

SEQ ID NO: 6531 - DNA, 2076 bp, Artificial Sequence
  Synthetic Polynucloetide
atggccttaccagtgaccgccttgctcctgccgctggccttgctgctccacgccgccaggccgcagctccagctgcaagagtctggacctggcctggtcaagcctagcgagacactgagcctgacctgtaccgtgtccggcgatagcatcagcagcggcgattactactggggctggatcagacagcctcctggcaaaggactggaatggatcggccacatctactacagcggcgtgacctactacaaccccagcctgaagtccagagtgaccatcagcgtggacaccagccggaaccagttctccctgaagctgtctagcgtgacagccgccgataccgccgtgtactactgcaccagagaggacagcagcaactggcggagtagaggccagggaacactggtcacagttagctctctcgagggatctcccatcaagaccgatgtgattacaatggaccccaaggacaactgctccaaggacgccaacgataccctgctgctccagctgaccaacaccagcgcctactacatgtacttgttgctgctgctgaagtccgtggtgtacttcgccatcatcacatgctgcctgctgcggagaaccgccttctgctgcaacggcgagaagtctagggccaagcgatctggatctggagcaacaaacttctcactactcaaacaagcaggtgacgtggaggagaatcccgggcctactagtatggactggatttggcgcatccttttccttgtcggcgctgctaccggcgcgcattccttcgaagttcagttggtagagtctggaggcggagtggtacaaccggggcggtctcttagacttagttgcgcagcaagcggtttctctttctctggctatgggatgcactgggtgagacaggcccctgggaaaggactggagtgggtggcctacatttcatacgacgggagtaataaatactatgcagactccgttaagggcaggttcacgatctctcgggacaattccaagaatacattgtatcttcagatgaatagtctccgagctgaagacacggcggtttactactgcgctaaagacccggcctggggacttcgacttggagagagttctagctacgattttgacatttggggacaagggacaatggtcactgtctcaagtacgcgtggcagcgaagtgaaaaccgactccaccgaccacgtgaagcccaaagagacagagaacaccaagcagcccagcaagagctgccacaagcccaaggccatcgtgcacaccgagaaagtgaacatgatgagcctgaccgtgctgggcctgcggatgctgttcgccaaaaccgtggccgtgaacttcctgctgaccgccaagctgttcttcctccgcgccaagagaagcggatctggcgtgaagcagaccctgaatttcgacctgctgaagctggctggcgacgtggaatccaacccaggcccttctagaggccatatgaccgagtacaagcccacggtgcgcctcgccacccgcgacgacgtccccagggccgtacgcaccctcgccgccgcgttcgccgactaccccgccacgcgccacaccgtcgatccggaccgccacatcgagcgggtcaccgagctgcaagaactcttcctcacgcgcgtcgggctcgacatcggcaaggtgtgggtcgcggacgacggcgccgcggtggcggtctggaccacgccggagagcgtcgaagcgggggcggtgttcgccgagatcggcccgcgcatggccgagttgagcggttcccggctggccgcgcagcaacagatggaaggcctcctggcgccgcaccggcccaaggagcccgcgtggttcctggccaccgtcggcgtctcgcccgaccaccagggcaagggtctgggcagcgccgtcgtgctccccggagtggaggcggccgagcgcgccggggtgcccgccttcctggagacctccgcgccccgcaacctccccttctacgagcggctcggcttcaccgtcaccgccgacgtcgaggtgcccgaaggaccgcgcacctggtgcatgacccgcaagcccggtgcctga

SEQ ID NO: 6532 - DNA, 1374 bp, Artificial Sequence
  Synthetic Polynucloetide
atggccttaccagtgaccgccttgctcctgccgctggccttgctgctccacgccgccaggccgcagctccagctgcaagagtctggacctggcctggtcaagcctagcgagacactgagcctgacctgtaccgtgtccggcgatagcatcagcagcggcgattactactggggctggatcagacagcctcctggcaaaggactggaatggatcggccacatctactacagcggcgtgacctactacaaccccagcctgaagtccagagtgaccatcagcgtggacaccagccggaaccagttctccctgaagctgtctagcgtgacagccgccgataccgccgtgtactactgcaccagagaggacagcagcaactggcggagtagaggccagggaacactggtcacagttagctctctcgagggatctcccatcaagaccgatgtgattacaatggaccccaaggacaactgctccaaggacgccaacgataccctgctgctccagctgaccaacaccagcgcctactacatgtacttgttgctgctgctgaagtccgtggtgtacttcgccatcatcacatgctgcctgctgcggagaaccgccttctgctgcaacggcgagaagtctagggccaagcgatctggatctggagcaacaaacttctcactactcaaacaagcaggtgacgtggaggagaatcccgggcctactagtatggactggatttggcgcatccttttccttgtcggcgctgctaccggcgcgcattccttcgaagttcagttggtagagtctggaggcggagtggtacaaccggggcggtctcttagacttagttgcgcagcaagcggtttctctttctctggctatgggatgcactgggtgagacaggcccctgggaaaggactggagtgggtggcctacatttcatacgacgggagtaataaatactatgcagactccgttaagggcaggttcacgatctctcgggacaattccaagaatacattgtatcttcagatgaatagtctccgagctgaagacacggcggtttactactgcgctaaagacccggcctggggacttcgacttggagagagttctagctacgattttgacatttggggacaagggacaatggtcactgtctcaagtacgcgtggcagcgaagtgaaaaccgactccaccgaccacgtgaagcccaaagagacagagaacaccaagcagcccagcaagagctgccacaagcccaaggccatcgtgcacaccgagaaagtgaacatgatgagcctgaccgtgctgggcctgcggatgctgttcgccaaaaccgtggccgtgaacttcctgctgaccgccaagctgttcttcctc

SEQ ID NO: 6533 - DNA, 2103 bp, Artificial Sequence
  Synthetic Polynucloetide
atggccttaccagtgaccgccttgctcctgccgctggccttgctgctccacgccgccaggccgcagctccagctgcaagagtctggacctggcctggtcaagcctagcgagacactgagcctgacctgtaccgtgtccggcgatagcatcagcagcggcgattactactggggctggatcagacagcctcctggcaaaggactggaatggatcggccacatctactacagcggcgtgacctactacaaccccagcctgaagtccagagtgaccatcagcgtggacaccagccggaaccagttctccctgaagctgtctagcgtgacagccgccgataccgccgtgtactactgcaccagagaggacagcagcaactggcggagtagaggccagggaacactggtcacagttagctctctcgaggacaaaactcacacatgcccaccgtgcccagcacccatcaagaccgatgtgattacaatggaccccaaggacaactgctccaaggacgccaacgataccctgctgctccagctgaccaacaccagcgcctactacatgtacttgttgctgctgctgaagtccgtggtgtacttcgccatcatcacatgctgcctgctgcggagaaccgccttctgctgcaacggcgagaagtctagggccaagcgatctggatctggagcaacaaacttctcactactcaaacaagcaggtgacgtggaggagaatcccgggcctactagtatggactggatttggcgcatccttttccttgtcggcgctgctaccggcgcgcattccttcgaagttcagttggtagagtctggaggcggagtggtacaaccggggcggtctcttagacttagttgcgcagcaagcggtttctctttctctggctatgggatgcactgggtgagacaggcccctgggaaaggactggagtgggtggcctacatttcatacgacgggagtaataaatactatgcagactccgttaagggcaggttcacgatctctcgggacaattccaagaatacattgtatcttcagatgaatagtctccgagctgaagacacggcggtttactactgcgctaaagacccggcctggggacttcgacttggagagagttctagctacgattttgacatttggggacaagggacaatggtcactgtctcaagtacgcgtggcagcgaagtgaaaaccgactccaccgaccacgtgaagcccaaagagacagagaacaccaagcagcccagcaagagctgccacaagcccaaggccatcgtgcacaccgagaaagtgaacatgatgagcctgaccgtgctgggcctgcggatgctgttcgccaaaaccgtggccgtgaacttcctgctgaccgccaagctgttcttcctccgcgccaagagaagcggatctggcgtgaagcagaccctgaatttcgacctgctgaagctggctggcgacgtggaatccaacccaggcccttctagaggccatatgaccgagtacaagcccacggtgcgcctcgccacccgcgacgacgtccccagggccgtacgcaccctcgccgccgcgttcgccgactaccccgccacgcgccacaccgtcgatccggaccgccacatcgagcgggtcaccgagctgcaagaactcttcctcacgcgcgtcgggctcgacatcggcaaggtgtgggtcgcggacgacggcgccgcggtggcggtctggaccacgccggagagcgtcgaagcgggggcggtgttcgccgagatcggcccgcgcatggccgagttgagcggttcccggctggccgcgcagcaacagatggaaggcctcctggcgccgcaccggcccaaggagcccgcgtggttcctggccaccgtcggcgtctcgcccgaccaccagggcaagggtctgggcagcgccgtcgtgctccccggagtggaggcggccgagcgcgccggggtgcccgccttcctggagacctccgcgccccgcaacctccccttctacgagcggctcggcttcaccgtcaccgccgacgtcgaggtgcccgaaggaccgcgcacctggtgcatgacccgcaagcccggtgcctga

SEQ ID NO: 6534 - DNA, 2103 bp, Artificial Sequence
  Synthetic Polynucloetide
atggccttaccagtgaccgccttgctcctgccgctggccttgctgctccacgccgccaggccgcagctccagctgcaagagtctggacctggcctggtcaagcctagcgagacactgagcctgacctgtaccgtgtccggcgatagcatcagcagcggcgattactactggggctggatcagacagcctcctggcaaaggactggaatggatcggccacatctactacagcggcgtgacctactacaaccccagcctgaagtccagagtgaccatcagcgtggacaccagccggaaccagttctccctgaagctgtctagcgtgacagccgccgataccgccgtgtactactgcaccagagaggacagcagcaactggcggagtagaggccagggaacactggtcacagttagctctctcgagggatctcccatcaagaccgatgtgattacaatggaccccaaggacaactgctccaaggacgccaacgataccctgctgctccagctgaccaacaccagcgcctactacatgtacttgttgctgctgctgaagtccgtggtgtacttcgccatcatcacatgctgcctgctgcggagaaccgccttctgctgcaacggcgagaagtctagggccaagcgatctggatctggagcaacaaacttctcactactcaaacaagcaggtgacgtggaggagaatcccgggcctactagtatggactggatttggcgcatccttttccttgtcggcgctgctaccggcgcgcattccttcgaagttcagttggtagagtctggaggcggagtggtacaaccggggcggtctcttagacttagttgcgcagcaagcggtttctctttctctggctatgggatgcactgggtgagacaggcccctgggaaaggactggagtgggtggcctacatttcatacgacgggagtaataaatactatgcagactccgttaagggcaggttcacgatctctcgggacaattccaagaatacattgtatcttcagatgaatagtctccgagctgaagacacggcggtttactactgcgctaaagacccggcctggggacttcgacttggagagagttctagctacgattttgacatttggggacaagggacaatggtcactgtctcaagtacgcgtgataaaactcatacctgtccgccatgcccggcagaagtgaaaaccgactccaccgaccacgtgaagcccaaagagacagagaacaccaagcagcccagcaagagctgccacaagcccaaggccatcgtgcacaccgagaaagtgaacatgatgagcctgaccgtgctgggcctgcggatgctgttcgccaaaaccgtggccgtgaacttcctgctgaccgccaagctgttcttcctccgcgccaagagaagcggatctggcgtgaagcagaccctgaatttcgacctgctgaagctggctggcgacgtggaatccaacccaggcccttctagaggccatatgaccgagtacaagcccacggtgcgcctcgccacccgcgacgacgtccccagggccgtacgcaccctcgccgccgcgttcgccgactaccccgccacgcgccacaccgtcgatccggaccgccacatcgagcgggtcaccgagctgcaagaactcttcctcacgcgcgtcgggctcgacatcggcaaggtgtgggtcgcggacgacggcgccgcggtggcggtctggaccacgccggagagcgtcgaagcgggggcggtgttcgccgagatcggcccgcgcatggccgagttgagcggttcccggctggccgcgcagcaacagatggaaggcctcctggcgccgcaccggcccaaggagcccgcgtggttcctggccaccgtcggcgtctcgcccgaccaccagggcaagggtctgggcagcgccgtcgtgctccccggagtggaggcggccgagcgcgccggggtgcccgccttcctggagacctccgcgccccgcaacctccccttctacgagcggctcggcttcaccgtcaccgccgacgtcgaggtgcccgaaggaccgcgcacctggtgcatgacccgcaagcccggtgcctga

SEQ ID NO: 6535 - DNA, 2130 bp, Artificial Sequence
  Synthetic Polynucloetide
atggccttaccagtgaccgccttgctcctgccgctggccttgctgctccacgccgccaggccgcagctccagctgcaagagtctggacctggcctggtcaagcctagcgagacactgagcctgacctgtaccgtgtccggcgatagcatcagcagcggcgattactactggggctggatcagacagcctcctggcaaaggactggaatggatcggccacatctactacagcggcgtgacctactacaaccccagcctgaagtccagagtgaccatcagcgtggacaccagccggaaccagttctccctgaagctgtctagcgtgacagccgccgataccgccgtgtactactgcaccagagaggacagcagcaactggcggagtagaggccagggaacactggtcacagttagctctctcgaggacaaaactcacacatgcccaccgtgcccagcacccatcaagaccgatgtgattacaatggaccccaaggacaactgctccaaggacgccaacgataccctgctgctccagctgaccaacaccagcgcctactacatgtacttgttgctgctgctgaagtccgtggtgtacttcgccatcatcacatgctgcctgctgcggagaaccgccttctgctgcaacggcgagaagtctagggccaagcgatctggatctggagcaacaaacttctcactactcaaacaagcaggtgacgtggaggagaatcccgggcctactagtatggactggatttggcgcatccttttccttgtcggcgctgctaccggcgcgcattccttcgaagttcagttggtagagtctggaggcggagtggtacaaccggggcggtctcttagacttagttgcgcagcaagcggtttctctttctctggctatgggatgcactgggtgagacaggcccctgggaaaggactggagtgggtggcctacatttcatacgacgggagtaataaatactatgcagactccgttaagggcaggttcacgatctctcgggacaattccaagaatacattgtatcttcagatgaatagtctccgagctgaagacacggcggtttactactgcgctaaagacccggcctggggacttcgacttggagagagttctagctacgattttgacatttggggacaagggacaatggtcactgtctcaagtacgcgtgataaaactcatacctgtccgccatgcccggcagaagtgaaaaccgactccaccgaccacgtgaagcccaaagagacagagaacaccaagcagcccagcaagagctgccacaagcccaaggccatcgtgcacaccgagaaagtgaacatgatgagcctgaccgtgctgggcctgcggatgctgttcgccaaaaccgtggccgtgaacttcctgctgaccgccaagctgttcttcctccgcgccaagagaagcggatctggcgtgaagcagaccctgaatttcgacctgctgaagctggctggcgacgtggaatccaacccaggcccttctagaggccatatgaccgagtacaagcccacggtgcgcctcgccacccgcgacgacgtccccagggccgtacgcaccctcgccgccgcgttcgccgactaccccgccacgcgccacaccgtcgatccggaccgccacatcgagcgggtcaccgagctgcaagaactcttcctcacgcgcgtcgggctcgacatcggcaaggtgtgggtcgcggacgacggcgccgcggtggcggtctggaccacgccggagagcgtcgaagcgggggcggtgttcgccgagatcggcccgcgcatggccgagttgagcggttcccggctggccgcgcagcaacagatggaaggcctcctggcgccgcaccggcccaaggagcccgcgtggttcctggccaccgtcggcgtctcgcccgaccaccagggcaagggtctgggcagcgccgtcgtgctccccggagtggaggcggccgagcgcgccggggtgcccgccttcctggagacctccgcgccccgcaacctccccttctacgagcggctcggcttcaccgtcaccgccgacgtcgaggtgcccgaaggaccgcgcacctggtgcatgacccgcaagcccggtgcctga

SEQ ID NO: 6536 - DNA, 1428 bp, Artificial Sequence
  Synthetic Polynucloetide
atggccttaccagtgaccgccttgctcctgccgctggccttgctgctccacgccgccaggccgcagctccagctgcaagagtctggacctggcctggtcaagcctagcgagacactgagcctgacctgtaccgtgtccggcgatagcatcagcagcggcgattactactggggctggatcagacagcctcctggcaaaggactggaatggatcggccacatctactacagcggcgtgacctactacaaccccagcctgaagtccagagtgaccatcagcgtggacaccagccggaaccagttctccctgaagctgtctagcgtgacagccgccgataccgccgtgtactactgcaccagagaggacagcagcaactggcggagtagaggccagggaacactggtcacagttagctctctcgaggacaaaactcacacatgcccaccgtgcccagcacccatcaagaccgatgtgattacaatggaccccaaggacaactgctccaaggacgccaacgataccctgctgctccagctgaccaacaccagcgcctactacatgtacttgttgctgctgctgaagtccgtggtgtacttcgccatcatcacatgctgcctgctgcggagaaccgccttctgctgcaacggcgagaagtctagggccaagcgatctggatctggagcaacaaacttctcactactcaaacaagcaggtgacgtggaggagaatcccgggcctactagtatggactggatttggcgcatccttttccttgtcggcgctgctaccggcgcgcattccttcgaagttcagttggtagagtctggaggcggagtggtacaaccggggcggtctcttagacttagttgcgcagcaagcggtttctctttctctggctatgggatgcactgggtgagacaggcccctgggaaaggactggagtgggtggcctacatttcatacgacgggagtaataaatactatgcagactccgttaagggcaggttcacgatctctcgggacaattccaagaatacattgtatcttcagatgaatagtctccgagctgaagacacggcggtttactactgcgctaaagacccggcctggggacttcgacttggagagagttctagctacgattttgacatttggggacaagggacaatggtcactgtctcaagtacgcgtgataaaactcatacctgtccgccatgcccggcagaagtgaaaaccgactccaccgaccacgtgaagcccaaagagacagagaacaccaagcagcccagcaagagctgccacaagcccaaggccatcgtgcacaccgagaaagtgaacatgatgagcctgaccgtgctgggcctgcggatgctgttcgccaaaaccgtggccgtgaacttcctgctgaccgccaagctgttcttcctc

SEQ ID NO: 6537 - DNA, 2169 bp, Artificial Sequence
  Synthetic Polynucloetide
atggccttaccagtgaccgccttgctcctgccgctggccttgctgctccacgccgccaggccgcagctccagctgcaagagtctggacctggcctggtcaagcctagcgagacactgagcctgacctgtaccgtgtccggcgatagcatcagcagcggcgattactactggggctggatcagacagcctcctggcaaaggactggaatggatcggccacatctactacagcggcgtgacctactacaaccccagcctgaagtccagagtgaccatcagcgtggacaccagccggaaccagttctccctgaagctgtctagcgtgacagccgccgataccgccgtgtactactgcaccagagaggacagcagcaactggcggagtagaggccagggaacactggtcacagttagctctctcgagagcggcggaggcggatctttcgaagttcagctgctggaatctggcggaggactcgttcaacctggcggctctctgagactgagctgtgccgcttctggcttcagcttctctagctacgccctgagctgggttcgacaagctcccggaaagggccttgaatgggtgtccagcatcggcgagaatgacggcaccacagactatgccgatgccgtgaaaggccggtttaccatcagcagagacaattccaagaacacgctctatctgcaaatgaactccctgcgcgtggaagatacagccgtgtattattgcgtgaaggacggcgtgcactggggacagggaaccctggttacagtgtctagcacgcgtgagcagaaactgatctcggaagaggatctggcgaagcccaccacgacgccagcgccgcgaccaccaacaccggcgcccaccatcgcgtcgcagcccctgtccctgcgcccagaggcgtgccggccagcggcggggggcgcagtgcacacgagggggctggacttcgcctgtgacatctacatctgggcgcccttggccgggacttgtggggtccttctcctgtcactggttatcaccctttactgcaaacggggcagaaagaaactcctgtatatattcaaacaaccatttatgagaccagtacaaactactcaagaggaagatggctgtagctgccgatttccagaagaagaagaaggaggatgtgaactgagagtgaagttcagcaggagcgcagacgcccccgcgtaccagcagggccagaaccagctctataacgagctgaatctaggacgaagagaggagtacgatgttttggacaagagacgtggccgggaccctgagatggggggaaagccgagaaggaagaaccctcaggaaggcctgtacaatgaactgcagaaagataagatggcggaggcctacagtgagattgggatgaaaggcgagcgccggaggggcaaggggcacgatggcctttaccagggtctcagtacagccaccaaggacacctacgacgcccttcacatgcaggccctgccccctcgctctagtggctccggcgagggcagaggaagtctactaacctgcggagatgtggaagaaaatcctggcccacatatgaccgagtacaagcccacggtgcgcctcgccacccgcgacgacgtccccagggccgtacgcaccctcgccgccgcgttcgccgactaccccgccacgcgccacaccgtcgatccggaccgccacatcgagcgggtcaccgagctgcaagaactcttcctcacgcgcgtcgggctcgacatcggcaaggtgtgggtcgcggacgacggcgccgcggtggcggtctggaccacgccggagagcgtcgaagcgggggcggtgttcgccgagatcggcccgcgcatggccgagttgagcggttcccggctggccgcgcagcaacagatggaaggcctcctggcgccgcaccggcccaaggagcccgcgtggttcctggccaccgtcggcgtctcgcccgaccaccagggcaagggtctgggcagcgccgtcgtgctccccggagtggaggcggccgagcgcgccggggtgcccgccttcctggagacctccgcgccccgcaacctccccttctacgagcggctcggcttcaccgtcaccgccgacgtcgaggtgcccgaaggaccgcgcacctggtgcatgacccgcaagcccggtgcctga

SEQ ID NO: 6538 - DNA, 2151 bp, Artificial Sequence
  Synthetic Polynucloetide
atggccttaccagtgaccgccttgctcctgccgctggccttgctgctccacgccgccaggccgcagctccagctgcaagagtctggacctggcctggtcaagcctagcgagacactgagcctgacctgtaccgtgtccggcgatagcatcagcagcggcgattactactggggctggatcagacagcctcctggcaaaggactggaatggatcggccacatctactacagcggcgtgacctactacaaccccagcctgaagtccagagtgaccatcagcgtggacaccagccggaaccagttctccctgaagctgtctagcgtgacagccgccgataccgccgtgtactactgcaccagagaggacagcagcaactggcggagtagaggccagggaacactggtcacagttagctctctcgagagcggcggaggcggatctttcgaagttcagctgctggaatctggcggaggactcgttcaacctggcggctctctgagactgagctgtgccgcttctggcttcagcttctctagctacgccctgagctgggttcgacaagctcccggaaagggccttgaatgggtgtccagcatcggcgagaatgacggcaccacagactatgccgatgccgtgaaaggccggtttaccatcagcagagacaattccaagaacacgctctatctgcaaatgaactccctgcgcgtggaagatacagccgtgtattattgcgtgaaggacggcgtgcactggggacagggaaccctggttacagtgtctagcacgcgtgagcagaaactgatctcggaagaggatctgaaaattgaagttatgtatcctcctccttacctagacaatgagaagagcaatggaaccattatccatgtgaaagggaaacacctttgtccaagtcccctatttcccggaccttctaagcccttttgggtgctggtggtggttgggggagtcctggcttgctatagcttgctagtaacagtggcctttattattttctgggtgaggagtaagaggagcaggctcctgcacagtgactacatgaacatgactccacgccgccccggacccacccgcaagcattaccagccctatgccccaccacgcgacttcgcagcctatcgctccagagtgaagttcagcaggagcgcagacgcccccgcgtaccagcagggccagaaccagctctataacgagctcaatctaggacgaagagaggagtacgatgttttggacaagagacgtggccgggaccctgagatggggggaaagccgagaaggaagaaccctcaggaaggcctgtacaatgaactgcagaaagataagatggcggaggcctacagtgagattgggatgaaaggcgagcgccggaggggcaaggggcacgatggcctttaccagggtctcagtacagccaccaaggacacctacgacgcccttcacatgcaggccctgccccctcgctctagtggctccggcgagggcagaggaagtctactaacctgcggagatgtggaagaaaatcctggcccacatatgaccgagtacaagcccacggtgcgcctcgccacccgcgacgacgtccccagggccgtacgcaccctcgccgccgcgttcgccgactaccccgccacgcgccacaccgtcgatccggaccgccacatcgagcgggtcaccgagctgcaagaactcttcctcacgcgcgtcgggctcgacatcggcaaggtgtgggtcgcggacgacggcgccgcggtggcggtctggaccacgccggagagcgtcgaagcgggggcggtgttcgccgagatcggcccgcgcatggccgagttgagcggttcccggctggccgcgcagcaacagatggaaggcctcctggcgccgcaccggcccaaggagcccgcgtggttcctggccaccgtcggcgtctcgcccgaccaccagggcaagggtctgggcagcgccgtcgtgctccccggagtggaggcggccgagcgcgccggggtgcccgccttcctggagacctccgcgccccgcaacctccccttctacgagcggctcggcttcaccgtcaccgccgacgtcgaggtgcccgaaggaccgcgcacctggtgcatgacccgcaagcccggtgcctga

SEQ ID NO: 6539 - DNA, 1479 bp, Artificial Sequence
  Synthetic Polynucloetide
atggccttaccagtgaccgccttgctcctgccgctggccttgctgctccacgccgccaggccgcagctccagctgcaagagtctggacctggcctggtcaagcctagcgagacactgagcctgacctgtaccgtgtccggcgatagcatcagcagcggcgattactactggggctggatcagacagcctcctggcaaaggactggaatggatcggccacatctactacagcggcgtgacctactacaaccccagcctgaagtccagagtgaccatcagcgtggacaccagccggaaccagttctccctgaagctgtctagcgtgacagccgccgataccgccgtgtactactgcaccagagaggacagcagcaactggcggagtagaggccagggaacactggtcacagttagctctctcgagagcggcggaggcggatctttcgaagttcagctgctggaatctggcggaggactcgttcaacctggcggctctctgagactgagctgtgccgcttctggcttcagcttctctagctacgccctgagctgggttcgacaagctcccggaaagggccttgaatgggtgtccagcatcggcgagaatgacggcaccacagactatgccgatgccgtgaaaggccggtttaccatcagcagagacaattccaagaacacgctctatctgcaaatgaactccctgcgcgtggaagatacagccgtgtattattgcgtgaaggacggcgtgcactggggacagggaaccctggttacagtgtctagcacgcgtgagcagaaactgatctcggaagaggatctgaaaattgaagttatgtatcctcctccttacctagacaatgagaagagcaatggaaccattatccatgtgaaagggaaacacctttgtccaagtcccctatttcccggaccttctaagcccttttgggtgctggtggtggttgggggagtcctggcttgctatagcttgctagtaacagtggcctttattattttctgggtgaggagtaagaggagcaggctcctgcacagtgactacatgaacatgactccacgccgccccggacccacccgcaagcattaccagccctatgccccaccacgcgacttcgcagcctatcgctccagagtgaagttcagcaggagcgcagacgcccccgcgtaccagcagggccagaaccagctctataacgagctcaatctaggacgaagagaggagtacgatgttttggacaagagacgtggccgggaccctgagatggggggaaagccgagaaggaagaaccctcaggaaggcctgtacaatgaactgcagaaagataagatggcggaggcctacagtgagattgggatgaaaggcgagcgccggaggggcaaggggcacgatggcctttaccagggtctcagtacagccaccaaggacacctacgacgcccttcacatgcaggccctgccccctcgc

SEQ ID NO: 6540 - DNA, 1500 bp, Artificial Sequence
  Synthetic Polynucloetide
atggccttaccagtgaccgccttgctcctgccgctggccttgctgctccacgccgccaggccgcagctccagctgcaagagtctggacctggcctggtcaagcctagcgagacactgagcctgacctgtaccgtgtccggcgatagcatcagcagcggcgattactactggggctggatcagacagcctcctggcaaaggactggaatggatcggccacatctactacagcggcgtgacctactacaaccccagcctgaagtccagagtgaccatcagcgtggacaccagccggaaccagttctccctgaagctgtctagcgtgacagccgccgataccgccgtgtactactgcaccagagaggacagcagcaactggcggagtagaggccagggaacactggtcacagttagctctctcgagagcggcggaggcggatctttcgaagttcagctgctggaatctggcggaggactcgttcaacctggcggctctctgagactgagctgtgccgcttctggcttcagcttctctagctacgccctgagctgggttcgacaagctcccggaaagggccttgaatgggtgtccagcatcggcgagaatgacggcaccacagactatgccgatgccgtgaaaggccggtttaccatcagcagagacaattccaagaacacgctctatctgcaaatgaactccctgcgcgtggaagatacagccgtgtattattgcgtgaaggacggcgtgcactggggacagggaaccctggttacagtgtctagcacgcgtgagcagaaactgatctcggaagaggatctggcgaagcccaccacgacgccagcgccgcgaccaccaacaccggcgcccaccatcgcgtcgcagcccctgtccctgcgcccagaggcgtgccggccagcggcggggggcgcagtgcacacgagggggctggacttcgcctgtgacatctacatctgggcgcccttggccgggacttgtggggtccttctcctgtcactggttatcaccctttactgcaaacggggcagaaagaaactcctgtatatattcaaacaaccatttatgagaccagtacaaactactcaagaggaagatggctgtagctgccgatttccagaagaagaagaaggaggatgtgaactgagagtgaagttcagcaggagcgcagacgcccccgcgtaccagcagggccagaaccagctctataacgagctgaatctaggacgaagagaggagtacgatgttttggacaagagacgtggccgggaccctgagatggggggaaagccgagaaggaagaaccctcaggaaggcctgtacaatgaactgcagaaagataagatggcggaggcctacagtgagattgggatgaaaggcgagcgccggaggggcaaggggcacgatggcctttaccagggtctcagtacagccaccaaggacacctacgacgcccttcacatgcaggccctgccccctcgctga

SEQ ID NO: 6541 - DNA, 1503 bp, Artificial Sequence
  Synthetic Polynucloetide
atggccttaccagtgaccgccttgctcctgccgctggccttgctgctccacgccgccaggccggaagttcagctgctggaatctggcggaggactcgttcaacctggcggctctctgagactgagctgtgccgcttctggcttcagcttctctagctacgccctgagctgggttcgacaagctcccggaaagggccttgaatgggtgtccagcatcggcgagaatgacggcaccacagactatgccgatgccgtgaaaggccggtttaccatcagcagagacaattccaagaacacgctctatctgcaaatgaactccctgcgcgtggaagatacagccgtgtattattgcgtgaaggacggcgtgcactggggacagggaaccctggttacagtgtctagcctcgagagcggcggaggcggatctttcgaacagctccagctgcaagagtctggacctggcctggtcaagcctagcgagacactgagcctgacctgtaccgtgtccggcgatagcatcagcagcggcgattactactggggctggatcagacagcctcctggcaaaggactggaatggatcggccacatctactacagcggcgtgacctactacaaccccagcctgaagtccagagtgaccatcagcgtggacaccagccggaaccagttctccctgaagctgtctagcgtgacagccgccgataccgccgtgtactactgcaccagagaggacagcagcaactggcggagtagaggccagggaacactggtcacagttagctctacgcgtgagcagaaactgatctcggaagaggatctggcgaagcccaccacgacgccagcgccgcgaccaccaacaccggcgcccaccatcgcgtcgcagcccctgtccctgcgcccagaggcgtgccggccagcggcggggggcgcagtgcacacgagggggctggacttcgcctgtgacatctacatctgggcgcccttggccgggacttgtggggtccttctcctgtcactggttatcaccctttactgcaaacggggcagaaagaaactcctgtatatattcaaacaaccatttatgagaccagtacaaactactcaagaggaagatggctgtagctgccgatttccagaagaagaagaaggaggatgtgaactgagagtgaagttcagcaggagcgcagacgcccccgcgtaccagcagggccagaaccagctctataacgagctgaatctaggacgaagagaggagtacgatgttttggacaagagacgtggccgggaccctgagatggggggaaagccgagaaggaagaaccctcaggaaggcctgtacaatgaactgcagaaagataagatggcggaggcctacagtgagattgggatgaaaggcgagcgccggaggggcaaggggcacgatggcctttaccagggtctcagtacagccaccaaggacacctacgacgcccttcacatgcaggccctgccccctcgctga

SEQ ID NO: 6542 - DNA, 2739 bp, Artificial Sequence
  Synthetic Polynucloetide
atggccttaccagtgaccgccttgctcctgccgctggccttgctgctccacgccgccaggccgcagctccagctgcaagagtctggacctggcctggtcaagcctagcgagacactgagcctgacctgtaccgtgtccggcgatagcatcagcagcggcgattactactggggctggatcagacagcctcctggcaaaggactggaatggatcggccacatctactacagcggcgtgacctactacaaccccagcctgaagtccagagtgaccatcagcgtggacaccagccggaaccagttctccctgaagctgtctagcgtgacagccgccgataccgccgtgtactactgcaccagagaggacagcagcaactggcggagtagaggccagggaacactggtcacagttagctctctcgagagcggcggaggcggatctttcgaagttcagctgctggaatctggcggaggactcgttcaacctggcggctctctgagactgagctgtgccgcttctggcttcagcttctctagctacgccctgagctgggttcgacaagctcccggaaagggccttgaatgggtgtccagcatcggcgagaatgacggcaccacagactatgccgatgccgtgaaaggccggtttaccatcagcagagacaattccaagaacacgctctatctgcaaatgaactccctgcgcgtggaagatacagccgtgtattattgcgtgaaggacggcgtgcactggggacagggaaccctggttacagtgtctagcacgcgtgagcagaaactgatctcggaagaggatctggcgaagcccaccacgacgccagcgccgcgaccaccaacaccggcgcccaccatcgcgtcgcagcccctgtccctgcgcccagaggcgtgccggccagcggcggggggcgcagtgcacacgagggggctggacttcgcctgtgacatctacatctgggcgcccttggccgggacttgtggggtccttctcctgtcactggttatcaccctttactgcgggcgcgccagagtgaagttcagcaggagcgcagacgcccccgcgtaccagcagggccagaaccagctctataacgagctgaatctaggacgaagagaggagtacgatgttttggacaagagacgtggccgggaccctgagatggggggaaagccgagaaggaagaaccctcaggaaggcctgtacaatgaactgcagaaagataagatggcggaggcctacagtgagattgggatgaaaggcgagcgccggaggggcaaggggcacgatggcctttaccagggtctcagtacagccaccaaggacacctacgacgcccttcacatgcaggccctgccccctcgctctagaggatctggagcaacaaacttctcactactcaaacaagcaggtgacgtggaggagaatcccgggcctgggatccacatggccacttacgaggttctctgtgaggtggcgcggaaactgggcacggatgacagggaagtggtattgttcctcctaaacgtgttcatacctcaacccacactggcccaattaattggagctcttagagctttaaaggaggagggcaggttaacgtttcccctgttagcggaatgtctgtttcgtgcaggtcgcagagacctcttgcgcgacctgcttcacttagacccgcgttttttagagcgccacctagcgggcacaatgagttatttcagcccttatcagctcactgttctccacgtagacggggagctgtgtgcgagggatattaggtctttgatatttttaagcaaggacactatagggtctcgcagcacaccacagacattcttacactgggtgtactgtatggaaaacttagacctactgggtcccactgacgtggatgccctaatgtcaatgcttagatctttgtcaagagtagacctacagcgccaagtgcaaaccctaatgggccttcacctttccggcccatcacactcccaacactatcgccatacaccactcgagaccgatttctacgactacaaggacgacgatgacaagactagtggctccggcgagggcagaggaagtctactaacctgcggagatgtggaagaaaatcctggcccacatatgaccgagtacaagcccacggtgcgcctcgccacccgcgacgacgtccccagggccgtacgcaccctcgccgccgcgttcgccgactaccccgccacgcgccacaccgtcgatccggaccgccacatcgagcgggtcaccgagctgcaagaactcttcctcacgcgcgtcgggctcgacatcggcaaggtgtgggtcgcggacgacggcgccgcggtggcggtctggaccacgccggagagcgtcgaagcgggggcggtgttcgccgagatcggcccgcgcatggccgagttgagcggttcccggctggccgcgcagcaacagatggaaggcctcctggcgccgcaccggcccaaggagcccgcgtggttcctggccaccgtcggcgtctcgcccgaccaccagggcaagggtctgggcagcgccgtcgtgctccccggagtggaggcggccgagcgcgccggggtgcccgccttcctggagacctccgcgccccgcaacctccccttctacgagcggctcggcttcaccgtcaccgccgacgtcgaggtgcccgaaggaccgcgcacctggtgcatgacccgcaagcccggtgcctga

SEQ ID NO: 6543 - DNA, 2574 bp, Artificial Sequence
  Synthetic Polynucloetide
atggccttaccagtgaccgccttgctcctgccgctggccttgctgctccacgccgccaggccgcagctccagctgcaagagtctggacctggcctggtcaagcctagcgagacactgagcctgacctgtaccgtgtccggcgatagcatcagcagcggcgattactactggggctggatcagacagcctcctggcaaaggactggaatggatcggccacatctactacagcggcgtgacctactacaaccccagcctgaagtccagagtgaccatcagcgtggacaccagccggaaccagttctccctgaagctgtctagcgtgacagccgccgataccgccgtgtactactgcaccagagaggacagcagcaactggcggagtagaggccagggaacactggtcacagttagctctctcgagatccagaaccctgatcctgccgtgtaccagctgcgggatagcaagagcagcgacaagagcgtgtgtctgttcaccgacttcgacagccagaccaacgtgtcccagagcaaggactccgacgtgtacatcaccgataagtgcgtgctggacatgcggagcatggacttcaagagcaactccgccgtggcctggtccaacaagtccgatttcgcctgcgccaacgccttcaacaacagcattatccccgaggacacattcttcccaagcagcgacgtgccctgcgacgtgaagctggtggaaaagagcttcgagacagacaccaacctgaacttccagaacctgagcgtgatcggcttcagaatcctgctgctgaaagtggccggctttaacctgctgatgaccctgcggctgtggtccagccgcgccaagagaagcggatctggcgtgaagcagaccctgaatttcgacctgctgaagctggctggcgacgtggaatccaacccaggccctactagtatggactggatttggcgcatccttttccttgtcggcgctgctaccggcgcgcattccttcgaagttcagctgctggaatctggcggaggactcgttcaacctggcggctctctgagactgagctgtgccgcttctggcttcagcttctctagctacgccctgagctgggttcgacaagctcccggaaagggccttgaatgggtgtccagcatcggcgagaatgacggcaccacagactatgccgatgccgtgaaaggccggtttaccatcagcagagacaattccaagaacacgctctatctgcaaatgaactccctgcgcgtggaagatacagccgtgtattattgcgtgaaggacggcgtgcactggggacagggaaccctggttacagtgtctagcacgcgtgaggacctgaagaacgtgttcccacctgaggtggccgtgttcgagcctagcaaggccgagatcgcccacacccagaaagccaccctcgtgtgcctggctaccggcttctaccccgaccatgtggaactgtcttggtgggtcaacggcaaagaggtgcacagcggcgtgtgtaccgacccccagccactgaaagaacagcccgccctgaacgacagccggtactgcctgagcagcagactgagagtgtccgccaccttctggcagaacccccggaaccacttcagatgccaggtgcagttctacggcctgagcgagaacgacgagtggacccaggacagagccaagcccgtgacccagatcgtgtctgccgaagcctggggcagagccgattgcggcatcaccagcgccagctaccaccagggcgtgctgagcgccaccatcctgtacgagatcctgctgggcaaggccaccctgtacgccgtgctggtgtctgccctggtgctgatggctatggtcaagcggaaggacagccggggaagggccaagcgatctggatctggagcaacaaacttctcactactcaaacaagcaggtgacgtggaggagaatcccgggccttctagaggccatatgaccgagtacaagcccacggtgcgcctcgccacccgcgacgacgtccccagggccgtacgcaccctcgccgccgcgttcgccgactaccccgccacgcgccacaccgtcgatccggaccgccacatcgagcgggtcaccgagctgcaagaactcttcctcacgcgcgtcgggctcgacatcggcaaggtgtgggtcgcggacgacggcgccgcggtggcggtctggaccacgccggagagcgtcgaagcgggggcggtgttcgccgagatcggcccgcgcatggccgagttgagcggttcccggctggccgcgcagcaacagatggaaggcctcctggcgccgcaccggcccaaggagcccgcgtggttcctggccaccgtcggcgtctcgcccgaccaccagggcaagggtctgggcagcgccgtcgtgctccccggagtggaggcggccgagcgcgccggggtgcccgccttcctggagacctccgcgccccgcaacctccccttctacgagcggctcggcttcaccgtcaccgccgacgtcgaggtgcccgaaggaccgcgcacctggtgcatgacccgcaagcccggtgcctga

SEQ ID NO: 6544 - DNA, 2571 bp, Artificial Sequence
  Synthetic Polynucloetide
atggccttaccagtgaccgccttgctcctgccgctggccttgctgctccacgccgccaggccgcagctccagctgcaagagtctggacctggcctggtcaagcctagcgagacactgagcctgacctgtaccgtgtccggcgatagcatcagcagcggcgattactactggggctggatcagacagcctcctggcaaaggactggaatggatcggccacatctactacagcggcgtgacctactacaaccccagcctgaagtccagagtgaccatcagcgtggacaccagccggaaccagttctccctgaagctgtctagcgtgacagccgccgataccgccgtgtactactgcaccagagaggacagcagcaactggcggagtagaggccagggaacactggtcacagttagctctctcgaggacctgaagaacgtgttcccacctgaggtggccgtgttcgagcctagcaaggccgagatcgcccacacccagaaagccaccctcgtgtgcctggctaccggcttctaccccgaccatgtggaactgtcttggtgggtcaacggcaaagaggtgcacagcggcgtgtgtaccgacccccagccactgaaagaacagcccgccctgaacgacagccggtactgcctgagcagcagactgagagtgtccgccaccttctggcagaacccccggaaccacttcagatgccaggtgcagttctacggcctgagcgagaacgacgagtggacccaggacagagccaagcccgtgacccagatcgtgtctgccgaagcctggggcagagccgattgcggcatcaccagcgccagctaccaccagggcgtgctgagcgccaccatcctgtacgagatcctgctgggcaaggccaccctgtacgccgtgctggtgtctgccctggtgctgatggctatggtcaagcggaaggacagccggggaagggccaagcgatctggatctggagcaacaaacttctcactactcaaacaagcaggtgacgtggaggagaatcccgggcctactagtatggactggatttggcgcatccttttccttgtcggcgctgctaccggcgcgcattccttcgaagttcagctgctggaatctggcggaggactcgttcaacctggcggctctctgagactgagctgtgccgcttctggcttcagcttctctagctacgccctgagctgggttcgacaagctcccggaaagggccttgaatgggtgtccagcatcggcgagaatgacggcaccacagactatgccgatgccgtgaaaggccggtttaccatcagcagagacaattccaagaacacgctctatctgcaaatgaactccctgcgcgtggaagatacagccgtgtattattgcgtgaaggacggcgtgcactggggacagggaaccctggttacagtgtctagcacgcgtatccagaaccctgatcctgccgtgtaccagctgcgggatagcaagagcagcgacaagagcgtgtgtctgttcaccgacttcgacagccagaccaacgtgtcccagagcaaggactccgacgtgtacatcaccgataagtgcgtgctggacatgcggagcatggacttcaagagcaactccgccgtggcctggtccaacaagtccgatttcgcctgcgccaacgccttcaacaacagcattatccccgaggacacattcttcccaagcagcgacgtgccctgcgacgtgaagctggtggaaaagagcttcgagacagacaccaacctgaacttccagaacctgagcgtgatcggcttcagaatcctgctgctgaaagtggccggctttaacctgctgatgaccctgcggctgtggtccagccgcgccaagagaagcggatctggcgtgaagcagaccctgaatttcgacctgctgaagctggctggcgacgtggaatccaacccaggcccttctagaggccatatgaccgagtacaagcccacggtgcgcctcgccacccgcgacgacgtccccagggccgtacgcaccctcgccgccgcgttcgccgactaccccgccacgcgccacaccgtcgatccggaccgccacatcgagcgggtcaccgagctgcaagaactcttcctcacgcgcgtcgggctcgacatcggcaaggtgtgggtcgcggacgacggcgccgcggtggcggtctggaccacgccggagagcgtcgaagcgggggcggtgttcgccgagatcggcccgcgcatggccgagttgagcggttcccggctggccgcgcagcaacagatggaaggcctcctggcgccgcaccggcccaaggagcccgcgtggttcctggccaccgtcggcgtctcgcccgaccaccagggcaagggtctgggcagcgccgtcgtgctccccggagtggaggcggccgagcgcgccggggtgcccgccttcctggagacctccgcgccccgcaacctccccttctacgagcggctcggcttcaccgtcaccgccgacgtcgaggtgcccgaaggaccgcgcacctggtgcatgacccgcaagcccggtgcctga

SEQ ID NO: 6545 - DNA, 1869 bp, Artificial Sequence
  Synthetic Polynucloetide
atggccttaccagtgaccgccttgctcctgccgctggccttgctgctccacgccgccaggccgcagctccagctgcaagagtctggacctggcctggtcaagcctagcgagacactgagcctgacctgtaccgtgtccggcgatagcatcagcagcggcgattactactggggctggatcagacagcctcctggcaaaggactggaatggatcggccacatctactacagcggcgtgacctactacaaccccagcctgaagtccagagtgaccatcagcgtggacaccagccggaaccagttctccctgaagctgtctagcgtgacagccgccgataccgccgtgtactactgcaccagagaggacagcagcaactggcggagtagaggccagggaacactggtcacagttagctctctcgaggacctgaagaacgtgttcccacctgaggtggccgtgttcgagcctagcgaggccgagatcagccacacccagaaagccaccctcgtgtgcctggctaccggcttctaccccgaccatgtggaactgtcttggtgggtcaacggcaaagaggtgcacagcggcgtgtgtaccgacccccagccactgaaagaacagcccgccctgaacgacagccggtactgcctgagcagcagactgagagtgtccgccaccttctggcagaacccccggaaccacttcagatgccaggtgcagttctacggcctgagcgagaacgacgagtggacccaggacagagccaagcccgtgacccagatcgtgtctgccgaagcctggggcagagccgattgcggctttaccagcgagagctaccagcagggcgtgctgagcgccaccatcctgtacgagatcctgctgggcaaggccaccctgtacgccgtgctggtgtctgccctggtgctgatggctatggtcaagcggaaggacagccggggaagggccaagcgatctggatctggagcaacaaacttctcactactcaaacaagcaggtgacgtggaggagaatcccgggcctactagtatggactggatttggcgcatccttttccttgtcggcgctgctaccggcgcgcattccttcgaagttcagctgctggaatctggcggaggactcgttcaacctggcggctctctgagactgagctgtgccgcttctggcttcagcttctctagctacgccctgagctgggttcgacaagctcccggaaagggccttgaatgggtgtccagcatcggcgagaatgacggcaccacagactatgccgatgccgtgaaaggccggtttaccatcagcagagacaattccaagaacacgctctatctgcaaatgaactccctgcgcgtggaagatacagccgtgtattattgcgtgaaggacggcgtgcactggggacagggaaccctggttacagtgtctagcacgcgtatccagaaccctgatcctgccgtgtaccagctgcgggatagcaagagcagcgacaagagcgtgtgtctgttcaccgacttcgacagccagaccaacgtgtcccagagcaaggactccgacgtgtacatcaccgataagtgcgtgctggacatgcggagcatggacttcaagagcaactccgccgtggcctggtccaacaagtccgatttcgcctgcgccaacgccttcaacaacagcattatccccgaggacacattcttcccaagccccgagagcagctgcgacgtgaagctggtggaaaagagcttcgagacagacaccaacctgaacttccagaacctgagcgtgatcggcttcagaatcctgctgctgaaagtggccggctttaacctgctgatgaccctgcggctgtggtccagc

SEQ ID NO: 6546 - DNA, 2544 bp, Artificial Sequence
  Synthetic Polynucloetide
atggccttaccagtgaccgccttgctcctgccgctggccttgctgctccacgccgccaggccgcagctccagctgcaagagtctggacctggcctggtcaagcctagcgagacactgagcctgacctgtaccgtgtccggcgatagcatcagcagcggcgattactactggggctggatcagacagcctcctggcaaaggactggaatggatcggccacatctactacagcggcgtgacctactacaaccccagcctgaagtccagagtgaccatcagcgtggacaccagccggaaccagttctccctgaagctgtctagcgtgacagccgccgataccgccgtgtactactgcaccagagaggacagcagcaactggcggagtagaggccagggaacactggtcacagttagctctctcgaggacctgaagaacgtgttcccacctgaggtggccgtgttcgagcctagcgaggccgagatcagccacacccagaaagccaccctcgtgtgcctggctaccggcttctaccccgaccatgtggaactgtcttggtgggtcaacggcaaagaggtgcacagcggcgtgtgtaccgacccccagccactgaaagaacagcccgccctgaacgacagccggtactgcctgagcagcagactgagagtgtccgccaccttctggcagaacccccggaaccacttcagatgccaggtgcagttctacggcctgagcgagaacgacgagtggacccaggacagagccaagcccgtgacccagatcgtgtctgccgaagcctggggcagagccgattgcggctttaccagcgagagctaccagcagggcgtgctgagcgccaccatcctgtacgagatcctgctgggcaaggccaccctgtacgccgtgctggtgtctgccctggtgctgatggctatggtcaagcggaaggacagccggggaagggccaagcgatctggatctggagcaacaaacttctcactactcaaacaagcaggtgacgtggaggagaatcccgggcctactagtatggactggatttggcgcatccttttccttgtcggcgctgctaccggcgcgcattccttcgaagttcagctgctggaatctggcggaggactcgttcaacctggcggctctctgagactgagctgtgccgcttctggcttcagcttctctagctacgccctgagctgggttcgacaagctcccggaaagggccttgaatgggtgtccagcatcggcgagaatgacggcaccacagactatgccgatgccgtgaaaggccggtttaccatcagcagagacaattccaagaacacgctctatctgcaaatgaactccctgcgcgtggaagatacagccgtgtattattgcgtgaaggacggcgtgcactggggacagggaaccctggttacagtgtctagcacgcgtatccagaaccctgatcctgccgtgtaccagctgcgggatagcaagagcagcgacaagagcgtgtgtctgttcaccgacttcgacagccagaccaacgtgtcccagagcaaggactccgacgtgtacatcaccgataagtgcgtgctggacatgcggagcatggacttcaagagcaactccgccgtggcctggtccaacaagtccgatttcgcctgcgccaacgccttcaacaacagcattatccccgaggacacattcttcccaagccccgagagcagctgcgacgtgaagctggtggaaaagagcttcgagacagacaccaacctgaacttccagaacctgagcgtgatcggcttcagaatcctgctgctgaaagtggccggctttaacctgctgatgaccctgcggctgtggtccagccgcgccaagagaagcggatctggcgtgaagcagaccctgaatttcgacctgctgaagctggctggcgacgtggaatccaacccaggcccttctagaggcgggatccacaccatggctacctacgaggtgctgtgcgaggtggcaagaaagctgggcaccgacgacagagaagtggtgctgttcctgctgaacgtgttcatccctcagcctacactggcccagctgatcggtgcactgagagccctgaaagaggaaggccggctgacctttcctctgctggccgaatgcctgttcagagccggaagaagggatctgctgcgggacctgctgcatctggaccccagatttctggaaagacacctggccggcaccatgagctacttcagcccttaccagctgaccgtgctgcacgttgacggcgaactgtgcgccagagatattcggagcctgatcttcctgagcaaggacaccatcggcagccggtctacccctcagacatttctgcactgggtgtactgcatggaaaacctggacctgctcggccccacagatgtggatgccctgatgtccatgctgagaagcctgagcagagtggacctccagagacaggtgcagacactgatgggactgcacctgagcggacctagccacagccagcactacagacacacccct

SEQ ID NO: 6547 - DNA, 1881 bp, Artificial Sequence
  Synthetic Polynucloetide
atggccttaccagtgaccgccttgctcctgccgctggccttgctgctccacgccgccaggccgcagctccagctgcaagagtctggacctggcctggtcaagcctagcgagacactgagcctgacctgtaccgtgtccggcgatagcatcagcagcggcgattactactggggctggatcagacagcctcctggcaaaggactggaatggatcggccacatctactacagcggcgtgacctactacaaccccagcctgaagtccagagtgaccatcagcgtggacaccagccggaaccagttctccctgaagctgtctagcgtgacagccgccgataccgccgtgtactactgcaccagagaggacagcagcaactggcggagtagaggccagggaacactggtcacagttagctctctcgagatccagaaccctgatcctgccgtgtaccagctgcgggatagcaagagcagcgacaagagcgtgtgtctgttcaccgacttcgacagccagaccaacgtgtcccagagcaaggactccgacgtgtacatcaccgataagtgcgtgctggacatgcggagcatggacttcaagagcaactccgccgtggcctggtccaacaagtccgatttcgcctgcgccaacgccttcaacaacagcattatccccgaggacacattcttcccaagccccgagagcagctgcgacgtgaagctggtggaaaagagcttcgagacagacaccaacctgaacttccagaacctgagcgtgatcggcttcagaatcctgctgctgaaagtggccggctttaacctgctgatgaccctgcggctgtggtccagccgcgccaagagaagcggatctggcgtgaagcagaccctgaatttcgacctgctgaagctggctggcgacgtggaatccaacccaggccctactagtatggactggatttggcgcatccttttccttgtcggcgctgctaccggcgcgcattccttcgaagttcagctgctggaatctggcggaggactcgttcaacctggcggctctctgagactgagctgtgccgcttctggcttcagcttctctagctacgccctgagctgggttcgacaagctcccggaaagggccttgaatgggtgtccagcatcggcgagaatgacggcaccacagactatgccgatgccgtgaaaggccggtttaccatcagcagagacaattccaagaacacgctctatctgcaaatgaactccctgcgcgtggaagatacagccgtgtattattgcgtgaaggacggcgtgcactggggacagggaaccctggttacagtgtctagcacgcgtgaggacctgaagaacgtgttcccacctgaggtggccgtgttcgagcctagcgaggccgagatcagccacacccagaaagccaccctcgtgtgcctggctaccggcttctaccccgaccatgtggaactgtcttggtgggtcaacggcaaagaggtgcacagcggcgtgtgtaccgacccccagccactgaaagaacagcccgccctgaacgacagccggtactgcctgagcagcagactgagagtgtccgccaccttctggcagaacccccggaaccacttcagatgccaggtgcagttctacggcctgagcgagaacgacgagtggacccaggacagagccaagcccgtgacccagatcgtgtctgccgaagcctggggcagagccgattgcggctttaccagcgagagctaccagcagggcgtgctgagcgccaccatcctgtacgagatcctgctgggcaaggccaccctgtacgccgtgctggtgtctgccctggtgctgatggctatggtcaagcggaaggacagccgggga

SEQ ID NO: 6548 - DNA, 2547 bp, Artificial Sequence
  Synthetic Polynucloetide
atggccttaccagtgaccgccttgctcctgccgctggccttgctgctccacgccgccaggccgcagctccagctgcaagagtctggacctggcctggtcaagcctagcgagacactgagcctgacctgtaccgtgtccggcgatagcatcagcagcggcgattactactggggctggatcagacagcctcctggcaaaggactggaatggatcggccacatctactacagcggcgtgacctactacaaccccagcctgaagtccagagtgaccatcagcgtggacaccagccggaaccagttctccctgaagctgtctagcgtgacagccgccgataccgccgtgtactactgcaccagagaggacagcagcaactggcggagtagaggccagggaacactggtcacagttagctctctcgagatccagaaccctgatcctgccgtgtaccagctgcgggatagcaagagcagcgacaagagcgtgtgtctgttcaccgacttcgacagccagaccaacgtgtcccagagcaaggactccgacgtgtacatcaccgataagtgcgtgctggacatgcggagcatggacttcaagagcaactccgccgtggcctggtccaacaagtccgatttcgcctgcgccaacgccttcaacaacagcattatccccgaggacacattcttcccaagccccgagagcagctgcgacgtgaagctggtggaaaagagcttcgagacagacaccaacctgaacttccagaacctgagcgtgatcggcttcagaatcctgctgctgaaagtggccggctttaacctgctgatgaccctgcggctgtggtccagccgcgccaagagaagcggatctggcgtgaagcagaccctgaatttcgacctgctgaagctggctggcgacgtggaatccaacccaggccctactagtatggactggatttggcgcatccttttccttgtcggcgctgctaccggcgcgcattccttcgaagttcagctgctggaatctggcggaggactcgttcaacctggcggctctctgagactgagctgtgccgcttctggcttcagcttctctagctacgccctgagctgggttcgacaagctcccggaaagggccttgaatgggtgtccagcatcggcgagaatgacggcaccacagactatgccgatgccgtgaaaggccggtttaccatcagcagagacaattccaagaacacgctctatctgcaaatgaactccctgcgcgtggaagatacagccgtgtattattgcgtgaaggacggcgtgcactggggacagggaaccctggttacagtgtctagcacgcgtgaggacctgaagaacgtgttcccacctgaggtggccgtgttcgagcctagcgaggccgagatcagccacacccagaaagccaccctcgtgtgcctggctaccggcttctaccccgaccatgtggaactgtcttggtgggtcaacggcaaagaggtgcacagcggcgtgtgtaccgacccccagccactgaaagaacagcccgccctgaacgacagccggtactgcctgagcagcagactgagagtgtccgccaccttctggcagaacccccggaaccacttcagatgccaggtgcagttctacggcctgagcgagaacgacgagtggacccaggacagagccaagcccgtgacccagatcgtgtctgccgaagcctggggcagagccgattgcggctttaccagcgagagctaccagcagggcgtgctgagcgccaccatcctgtacgagatcctgctgggcaaggccaccctgtacgccgtgctggtgtctgccctggtgctgatggctatggtcaagcggaaggacagccggggaagggccaagcgatctggatctggagcaacaaacttctcactactcaaacaagcaggtgacgtggaggagaatcccgggccttctagaggcgggatccacaccatggctacctacgaggtgctgtgcgaggtggcaagaaagctgggcaccgacgacagagaagtggtgctgttcctgctgaacgtgttcatccctcagcctacactggcccagctgatcggtgcactgagagccctgaaagaggaaggccggctgacctttcctctgctggccgaatgcctgttcagagccggaagaagggatctgctgcgggacctgctgcatctggaccccagatttctggaaagacacctggccggcaccatgagctacttcagcccttaccagctgaccgtgctgcacgttgacggcgaactgtgcgccagagatattcggagcctgatcttcctgagcaaggacaccatcggcagccggtctacccctcagacatttctgcactgggtgtactgcatggaaaacctggacctgctcggccccacagatgtggatgccctgatgtccatgctgagaagcctgagcagagtggacctccagagacaggtgcagacactgatgggactgcacctgagcggacctagccacagccagcactacagacacacccct

SEQ ID NO: 6549 - DNA, 2691 bp, Artificial Sequence
  Synthetic Polynucloetide
atggccttaccagtgaccgccttgctcctgccgctggccttgctgctccacgccgccaggccgctcgaggggaaaccaattcccaaccctcttctgggactggattcaaccggcagcggcgaggacctgaagaacgtgttcccacctgaggtggccgtgttcgagcctagcaaggccgagatcgcccacacccagaaagccaccctcgtgtgcctggctaccggcttctaccccgaccatgtggaactgtcttggtgggtcaacggcaaagaggtgcacagcggcgtgtgtaccgacccccagccactgaaagaacagcccgccctgaacgacagccggtactgcctgagcagcagactgagagtgtccgccaccttctggcagaacccccggaaccacttcagatgccaggtgcagttctacggcctgagcgagaacgacgagtggacccaggacagagccaagcccgtgacccagatcgtgtctgccgaagcctggggcagagccgattgcggcatcaccagcgccagctaccaccagggcgtgctgagcgccaccatcctgtacgagatcctgctgggcaaggccaccctgtacgccgtgctggtgtctgccctggtgctgatggctatggtcaagcggaaggacagccggggaagggccaagcgatctggatctggagcaacaaacttctcactactcaaacaagcaggtgacgtggaggagaatcccgggcctactagcatggccttaccagtgaccgccttgctcctgccgctggccttgctgctccacgccgccaggccgcagctccagctgcaagagtctggacctggcctggtcaagcctagcgagacactgagcctgacctgtaccgtgtccggcgatagcatcagcagcggcgattactactggggctggatcagacagcctcctggcaaaggactggaatggatcggccacatctactacagcggcgtgacctactacaaccccagcctgaagtccagagtgaccatcagcgtggacaccagccggaaccagttctccctgaagctgtctagcgtgacagccgccgataccgccgtgtactactgcaccagagaggacagcagcaactggcggagtagaggccagggaacactggtcacagttagctctctcgagagcggcggaggcggatctttcgaagttcagctgctggaatctggcggaggactcgttcaacctggcggctctctgagactgagctgtgccgcttctggcttcagcttctctagctacgccctgagctgggttcgacaagctcccggaaagggccttgaatgggtgtccagcatcggcgagaatgacggcaccacagactatgccgatgccgtgaaaggccggtttaccatcagcagagacaattccaagaacacgctctatctgcaaatgaactccctgcgcgtggaagatacagccgtgtattattgcgtgaaggacggcgtgcactggggacagggaaccctggttacagtgtctagcacgcgtgagcagaaactgatctcggaagaggatgggagcggcatccagaaccctgatcctgccgtgtaccagctgcgggatagcaagagcagcgacaagagcgtgtgtctgttcaccgacttcgacagccagaccaacgtgtcccagagcaaggactccgacgtgtacatcaccgataagtgcgtgctggacatgcggagcatggacttcaagagcaactccgccgtggcctggtccaacaagtccgatttcgcctgcgccaacgccttcaacaacagcattatccccgaggacacattcttcccaagcagcgacgtgccctgcgacgtgaagctggtggaaaagagcttcgagacagacaccaacctgaacttccagaacctgagcgtgatcggcttcagaatcctgctgctgaaagtggccggctttaacctgctgatgaccctgcggctgtggtccagccgcgccaagagaagcggatctggcgtgaagcagaccctgaatttcgacctgctgaagctggctggcgacgtggaatccaacccaggcccttctagaggccatatgaccgagtacaagcccacggtgcgcctcgccacccgcgacgacgtccccagggccgtacgcaccctcgccgccgcgttcgccgactaccccgccacgcgccacaccgtcgatccggaccgccacatcgagcgggtcaccgagctgcaagaactcttcctcacgcgcgtcgggctcgacatcggcaaggtgtgggtcgcggacgacggcgccgcggtggcggtctggaccacgccggagagcgtcgaagcgggggcggtgttcgccgagatcggcccgcgcatggccgagttgagcggttcccggctggccgcgcagcaacagatggaaggcctcctggcgccgcaccggcccaaggagcccgcgtggttcctggccaccgtcggcgtctcgcccgaccaccagggcaagggtctgggcagcgccgtcgtgctccccggagtggaggcggccgagcgcgccggggtgcccgccttcctggagacctccgcgccccgcaacctccccttctacgagcggctcggcttcaccgtcaccgccgacgtcgaggtgcccgaaggaccgcgcacctggtgcatgacccgcaagcccggtgcctga

SEQ ID NO: 6550 - DNA, 2694 bp, Artificial Sequence
  Synthetic Polynucloetide
atggccttaccagtgaccgccttgctcctgccgctggccttgctgctccacgccgccaggccgctcgagcagaaactgatctcggaagaggatctgggctccggcgatcgccctgatcctgccgtgtaccagctgcgggatagcaagagcagcgacaagagcgtgtgtctgttcaccgacttcgacagccagaccaacgtgtcccagagcaaggactccgacgtgtacatcaccgataagtgcgtgctggacatgcggagcatggacttcaagagcaactccgccgtggcctggtccaacaagtccgatttcgcctgcgccaacgccttcaacaacagcattatccccgaggacacattcttcccaagccccgagagcagctgcgacgtgaagctggtggaaaagagcttcgagacagacaccaacctgaacttccagaacctgagcgtgatcggcttcagaatcctgctgctgaaagtggccggctttaacctgctgatgaccctgcggctgtggtccagctctagtcgcgccaagagaagcggatctggcgtgaagcagaccctgaatttcgacctgctgaagctggctggcgacgtggaatccaacccaggccccactagcatggccttaccagtgaccgccttgctcctgccgctggccttgctgctccacgccgccaggccgcagctccagctgcaagagtctggacctggcctggtcaagcctagcgagacactgagcctgacctgtaccgtgtccggcgatagcatcagcagcggcgattactactggggctggatcagacagcctcctggcaaaggactggaatggatcggccacatctactacagcggcgtgacctactacaaccccagcctgaagtccagagtgaccatcagcgtggacaccagccggaaccagttctccctgaagctgtctagcgtgacagccgccgataccgccgtgtactactgcaccagagaggacagcagcaactggcggagtagaggccagggaacactggtcacagttagctctctcgagagcggcggaggcggatctttcgaagttcagctgctggaatctggcggaggactcgttcaacctggcggctctctgagactgagctgtgccgcttctggcttcagcttctctagctacgccctgagctgggttcgacaagctcccggaaagggccttgaatgggtgtccagcatcggcgagaatgacggcaccacagactatgccgatgccgtgaaaggccggtttaccatcagcagagacaattccaagaacacgctctatctgcaaatgaactccctgcgcgtggaagatacagccgtgtattattgcgtgaaggacggcgtgcactggggacagggaaccctggttacagtgtctagcacgcgtgggaaaccaattcccaaccctcttctgggactggattcaaccggcagcggcgaggacctgaagaacgtgttcccacctgaggtggccgtgttcgagcctagcgaggccgagatcagccacacccagaaagccaccctcgtgtgcctggctaccggcttctaccccgaccatgtggaactgtcttggtgggtcaacggcaaagaggtgcacagcggcgtgtgtaccgacccccagccactgaaagaacagcccgccctgaacgacagccggtactgcctgagcagcagactgagagtgtccgccaccttctggcagaacccccggaaccacttcagatgccaggtgcagttctacggcctgagcgagaacgacgagtggacccaggacagagccaagcccgtgacccagatcgtgtctgccgaagcctggggcagagccgattgcggctttaccagcgagagctaccagcagggcgtgctgagcgccaccatcctgtacgagatcctgctgggcaaggccaccctgtacgccgtgctggtgtctgccctggtgctgatggctatggtcaagcggaaggacagccggggaagggccaagcgatctggatctggagcaacaaacttctcactactcaaacaagcaggtgacgtggaggagaatcccgggccttctagaggccatatgaccgagtacaagcccacggtgcgcctcgccacccgcgacgacgtccccagggccgtacgcaccctcgccgccgcgttcgccgactaccccgccacgcgccacaccgtcgatccggaccgccacatcgagcgggtcaccgagctgcaagaactcttcctcacgcgcgtcgggctcgacatcggcaaggtgtgggtcgcggacgacggcgccgcggtggcggtctggaccacgccggagagcgtcgaagcgggggcggtgttcgccgagatcggcccgcgcatggccgagttgagcggttcccggctggccgcgcagcaacagatggaaggcctcctggcgccgcaccggcccaaggagcccgcgtggttcctggccaccgtcggcgtctcgcccgaccaccagggcaagggtctgggcagcgccgtcgtgctccccggagtggaggcggccgagcgcgccggggtgcccgccttcctggagacctccgcgccccgcaacctccccttctacgagcggctcggcttcaccgtcaccgccgacgtcgaggtgcccgaaggaccgcgcacctggtgcatgacccgcaagcccggtgcctga

SEQ ID NO: 6551 - DNA, 2571 bp, Artificial Sequence
  Synthetic Polynucloetide
atggccttaccagtgaccgccttgctcctgccgctggccttgctgctccacgccgccaggccgcagctccagctgcaagagtctggacctggcctggtcaagcctagcgagacactgagcctgacctgtaccgtgtccggcgatagcatcagcagcggcgattactactggggctggatcagacagcctcctggcaaaggactggaatggatcggccacatctactacagcggcgtgacctactacaaccccagcctgaagtccagagtgaccatcagcgtggacaccagccggaaccagttctccctgaagctgtctagcgtgacagccgccgataccgccgtgtactactgcaccagagaggacagcagcaactggcggagtagaggccagggaacactggtcacagttagctctctcgaggacctgaagaacgtgttcccacctgaggtggccgtgttcgagcctagcgaggccgagatcagccacacccagaaagccaccctcgtgtgcctggctaccggcttctaccccgaccatgtggaactgtcttggtgggtcaacggcaaagaggtgcacagcggcgtgtctaccgacccccagccactgaaagaacagcccgccctgaacgacagccggtactgcctgagcagcagactgagagtgtccgccaccttctggcagaacccccggaaccacttcagatgccaggtgcagttctacggcctgagcgagaacgacgagtggacccaggacagagccaagcccgtgacccagatcgtgtctgccgaagcctggggcagagccgattgcggctttaccagcgagagctaccagcagggcgtgctgagcgccaccatcctgtacgagatcctgctgggcaaggccaccctgtacgccgtgctggtgtctgccctggtgctgatggctatggtcaagcggaaggacagccggggaagggccaagcgatctggatctggagcaacaaacttctcactactcaaacaagcaggtgacgtggaggagaatcccgggcctactagtatggactggatttggcgcatccttttccttgtcggcgctgctaccggcgcgcattccttcgaagttcagctgctggaatctggcggaggactcgttcaacctggcggctctctgagactgagctgtgccgcttctggcttcagcttctctagctacgccctgagctgggttcgacaagctcccggaaagggccttgaatgggtgtccagcatcggcgagaatgacggcaccacagactatgccgatgccgtgaaaggccggtttaccatcagcagagacaattccaagaacacgctctatctgcaaatgaactccctgcgcgtggaagatacagccgtgtattattgcgtgaaggacggcgtgcactggggacagggaaccctggttacagtgtctagcacgcgtatccagaaccctgatcctgccgtgtaccagctgcgggatagcaagagcagcgacaagagcgtgtgtctgttcaccgacttcgacagccagaccaacgtgtcccagagcaaggactccgacgtgtacatcaccgataagaccgtgctggacatgcggagcatggacttcaagagcaactccgccgtggcctggtccaacaagtccgatttcgcctgcgccaacgccttcaacaacagcattatccccgaggacacattcttcccaagccccgagagcagctgcgacgtgaagctggtggaaaagagcttcgagacagacaccaacctgaacttccagaacctgagcgtgatcggcttcagaatcctgctgctgaaagtggccggctttaacctgctgatgaccctgcggctgtggtccagccgcgccaagagaagcggatctggcgtgaagcagaccctgaatttcgacctgctgaagctggctggcgacgtggaatccaacccaggcccttctagaggccatatgaccgagtacaagcccacggtgcgcctcgccacccgcgacgacgtccccagggccgtacgcaccctcgccgccgcgttcgccgactaccccgccacgcgccacaccgtcgatccggaccgccacatcgagcgggtcaccgagctgcaagaactcttcctcacgcgcgtcgggctcgacatcggcaaggtgtgggtcgcggacgacggcgccgcggtggcggtctggaccacgccggagagcgtcgaagcgggggcggtgttcgccgagatcggcccgcgcatggccgagttgagcggttcccggctggccgcgcagcaacagatggaaggcctcctggcgccgcaccggcccaaggagcccgcgtggttcctggccaccgtcggcgtctcgcccgaccaccagggcaagggtctgggcagcgccgtcgtgctccccggagtggaggcggccgagcgcgccggggtgcccgccttcctggagacctccgcgccccgcaacctccccttctacgagcggctcggcttcaccgtcaccgccgacgtcgaggtgcccgaaggaccgcgcacctggtgcatgacccgcaagcccggtgcctga

SEQ ID NO: 6552 - DNA, 2817 bp, Artificial Sequence
  Synthetic Polynucloetide
atggccttaccagtgaccgccttgctcctgccgctggccttgctgctccacgccgccaggccgcagctccagctgcaagagtctggacctggcctggtcaagcctagcgagacactgagcctgacctgtaccgtgtccggcgatagcatcagcagcggcgattactactggggctggatcagacagcctcctggcaaaggactggaatggatcggccacatctactacagcggcgtgacctactacaaccccagcctgaagtccagagtgaccatcagcgtggacaccagccggaaccagttctccctgaagctgtctagcgtgacagccgccgataccgccgtgtactactgcaccagagaggacagcagcaactggcggagtagaggccagggaacactggtcacagttagctctctcgaggacctgaagaacgtgttcccacctgaggtggccgtgttcgagcctagcgaggccgagatcagccacacccagaaagccaccctcgtgtgcctggctaccggcttctaccccgaccatgtggaactgtcttggtgggtcaacggcaaagaggtgcacagcggcgtgtctaccgacccccagccactgaaagaacagcccgccctgaacgacagccggtactgcctgagcagcagactgagagtgtccgccaccttctggcagaacccccggaaccacttcagatgccaggtgcagttctacggcctgagcgagaacgacgagtggacccaggacagagccaagcccgtgacccagatcgtgtctgccgaagcctggggcagagccgattgcggctttaccagcgagagctaccagcagggcgtgctgagcgccaccatcctgtacgagatcctgctgggcaaggccaccctgtacgccgtgctggtgtctgccctggtgctgatggctatggtcaagcggaaggacagccggggaagggccaagcgatctggatctggagcaacaaacttctcactactcaaacaagcaggtgacgtggaggagaatcccgggcctactagtatggactggatttggcgcatccttttccttgtcggcgctgctaccggcgcgcattccttcgaagttcagctgctggaatctggcggaggactcgttcaacctggcggctctctgagactgagctgtgccgcttctggcttcagcttctctagctacgccctgagctgggttcgacaagctcccggaaagggccttgaatgggtgtccagcatcggcgagaatgacggcaccacagactatgccgatgccgtgaaaggccggtttaccatcagcagagacaattccaagaacacgctctatctgcaaatgaactccctgcgcgtggaagatacagccgtgtattattgcgtgaaggacggcgtgcactggggacagggaaccctggttacagtgtctagcacgcgtgagcagaaactgatctcggaagaggatgggagcggcaccccattcccttctctggcccctcccatcatgctgctggtggacggcaagcagcagatggtggtcgtgtgcctggtgctggatgtggccccacctggactggacagccccatctggtttagcgccggcaatggctctgccctggacgcctttacctacggcccaagccctgccaccgatggcacctggacaaatctggcccacctgagcctgcccagcgaggaactggcttcttgggagcctctcgtgtgccacacaggacctggcgctgagggacacagcagatccacccagcctatgcacctgtctggcgaggccagcaccgccagaacctgtcctcaggaacctctgagaggcacccctggcggagcactgtggctgggagtgctgagactgctgctgttcaagctgctgctgtttgacctgctgctgacctgctcctgtctgtgcgatcctgccggccctctgccttctcctgccaccaccacaagactgagagccctgggcagccacagactgcaccctgccacagagacaggcggcagagaggccacaagcagccctagaccccagcccagagacagaagatggggcgataccccccctggcagaaagcctggatctccagtccgcgccaagagaagcggatctggcgtgaagcagaccctgaatttcgacctgctgaagctggctggcgacgtggaatccaacccaggcccttctagaggccatatgaccgagtacaagcccacggtgcgcctcgccacccgcgacgacgtccccagggccgtacgcaccctcgccgccgcgttcgccgactaccccgccacgcgccacaccgtcgatccggaccgccacatcgagcgggtcaccgagctgcaagaactcttcctcacgcgcgtcgggctcgacatcggcaaggtgtgggtcgcggacgacggcgccgcggtggcggtctggaccacgccggagagcgtcgaagcgggggcggtgttcgccgagatcggcccgcgcatggccgagttgagcggttcccggctggccgcgcagcaacagatggaaggcctcctggcgccgcaccggcccaaggagcccgcgtggttcctggccaccgtcggcgtctcgcccgaccaccagggcaagggtctgggcagcgccgtcgtgctccccggagtggaggcggccgagcgcgccggggtgcccgccttcctggagacctccgcgccccgcaacctccccttctacgagcggctcggcttcaccgtcaccgccgacgtcgaggtgcccgaaggaccgcgcacctggtgcatgacccgcaagcccggtgcctga

SEQ ID NO: 6553 - DNA, 2856 bp, Artificial Sequence
  Synthetic Polynucloetide
atggccttaccagtgaccgccttgctcctgccgctggccttgctgctccacgccgccaggccgctcgaggacctgaagaacgtgttcccacctgaggtggccgtgttcgagcctagcgaggccgagatcagccacacccagaaagccaccctcgtgtgcctggctaccggcttctaccccgaccatgtggaactgtcttggtgggtcaacggcaaagaggtgcacagcggcgtgtctaccgacccccagccactgaaagaacagcccgccctgaacgacagccggtactgcctgagcagcagactgagagtgtccgccaccttctggcagaacccccggaaccacttcagatgccaggtgcagttctacggcctgagcgagaacgacgagtggacccaggacagagccaagcccgtgacccagatcgtgtctgccgaagcctggggcagagccgattgcggctttaccagcgagagctaccagcagggcgtgctgagcgccaccatcctgtacgagatcctgctgggcaaggccaccctgtacgccgtgctggtgtctgccctggtgctgatggctatggtcaagcggaaggacagccggggaagggccaagcgatctggatctggagcaacaaacttctcactactcaaacaagcaggtgacgtggaggagaatcccgggcctactagcatggccttaccagtgaccgccttgctcctgccgctggccttgctgctccacgccgccaggccgcagctccagctgcaagagtctggacctggcctggtcaagcctagcgagacactgagcctgacctgtaccgtgtccggcgatagcatcagcagcggcgattactactggggctggatcagacagcctcctggcaaaggactggaatggatcggccacatctactacagcggcgtgacctactacaaccccagcctgaagtccagagtgaccatcagcgtggacaccagccggaaccagttctccctgaagctgtctagcgtgacagccgccgataccgccgtgtactactgcaccagagaggacagcagcaactggcggagtagaggccagggaacactggtcacagttagctctctcgagagcggcggaggcggatctttcgaagttcagctgctggaatctggcggaggactcgttcaacctggcggctctctgagactgagctgtgccgcttctggcttcagcttctctagctacgccctgagctgggttcgacaagctcccggaaagggccttgaatgggtgtccagcatcggcgagaatgacggcaccacagactatgccgatgccgtgaaaggccggtttaccatcagcagagacaattccaagaacacgctctatctgcaaatgaactccctgcgcgtggaagatacagccgtgtattattgcgtgaaggacggcgtgcactggggacagggaaccctggttacagtgtctagcacgcgtgagcagaaactgatctcggaagaggatctggggagcggcaccccattcccttctctggcccctcccatcatgctgctggtggacggcaagcagcagatggtggtcgtgtgcctggtgctggatgtggccccacctggactggacagccccatctggtttagcgccggcaatggctctgccctggacgcctttacctacggcccaagccctgccaccgatggcacctggacaaatctggcccacctgagcctgcccagcgaggaactggcttcttgggagcctctcgtgtgccacacaggacctggcgctgagggacacagcagatccacccagcctatgcacctgtctggcgaggccagcaccgccagaacctgtcctcaggaacctctgagaggcacccctggcggagcactgtggctgggagtgctgagactgctgctgttcaagctgctgctgtttgacctgctgctgacctgctcctgtctgtgcgatcctgccggccctctgccttctcctgccaccaccacaagactgagagccctgggcagccacagactgcaccctgccacagagacaggcggcagagaggccacaagcagccctagaccccagcccagagacagaagatggggcgataccccccctggcagaaagcctggatctccagtccgcgccaagagaagcggatctggcgtgaagcagaccctgaatttcgacctgctgaagctggctggcgacgtggaatccaacccaggcccttctagatctagaggccatatgaccgagtacaagcccacggtgcgcctcgccacccgcgacgacgtccccagggccgtacgcaccctcgccgccgcgttcgccgactaccccgccacgcgccacaccgtcgatccggaccgccacatcgagcgggtcaccgagctgcaagaactcttcctcacgcgcgtcgggctcgacatcggcaaggtgtgggtcgcggacgacggcgccgcggtggcggtctggaccacgccggagagcgtcgaagcgggggcggtgttcgccgagatcggcccgcgcatggccgagttgagcggttcccggctggccgcgcagcaacagatggaaggcctcctggcgccgcaccggcccaaggagcccgcgtggttcctggccaccgtcggcgtctcgcccgaccaccagggcaagggtctgggcagcgccgtcgtgctccccggagtggaggcggccgagcgcgccggggtgcccgccttcctggagacctccgcgccccgcaacctccccttctacgagcggctcggcttcaccgtcaccgccgacgtcgaggtgcccgaaggaccgcgcacctggtgcatgacccgcaagcccggtgcctga

SEQ ID NO: 6554 - DNA, 2682 bp, Artificial Sequence
  Synthetic Polynucloetide
atggccttaccagtgaccgccttgctcctgccgctggccttgctgctccacgccgccaggccgcagctccagctgcaagagtctggacctggcctggtcaagcctagcgagacactgagcctgacctgtaccgtgtccggcgatagcatcagcagcggcgattactactggggctggatcagacagcctcctggcaaaggactggaatggatcggccacatctactacagcggcgtgacctactacaaccccagcctgaagtccagagtgaccatcagcgtggacaccagccggaaccagttctccctgaagctgtctagcgtgacagccgccgataccgccgtgtactactgcaccagagaggacagcagcaactggcggagtagaggccagggaacactggtcacagttagctctctcgaggggaaaccaattcccaaccctcttctgggactggattcaaccggcagcggcgacaagcagctggacgccgacgtgtcccccaagcctaccatcttcctgccctctatcgccgagacaaagctccagaaggccggcacctacctgtgcctgctggaaaagttcttcccagatgtgattaagatccactggcaggaaaagaagtccaacaccatcctgggcagccaggaaggcaacaccatgaagaccaacgacacctacatgaagttcagctggctgaccgtgcccgagaagtccctggacaaagaacacagatgcatcgtgcggcacgaaaacaacaagaacggcgtggaccaggaaatcatcttcccacccatcaagaccgatgtgattacaatggaccccaaggacaactgctccaaggacgccaacgataccctgctgctccagctgaccaacaccagcgcctactacatgtacttgttgctgctgctgaagtccgtggtgtacttcgccatcatcacatgctgcctgctgcggagaaccgccttctgctgcaacggcgagaagtctagggccaagcgatctggatctggagcaacaaacttctcactactcaaacaagcaggtgacgtggaggagaatcccgggcctactagtatggactggatttggcgcatccttttccttgtcggcgctgctaccggcgcgcattccttcgaagttcagctgctggaatctggcggaggactcgttcaacctggcggctctctgagactgagctgtgccgcttctggcttcagcttctctagctacgccctgagctgggttcgacaagctcccggaaagggccttgaatgggtgtccagcatcggcgagaatgacggcaccacagactatgccgatgccgtgaaaggccggtttaccatcagcagagacaattccaagaacacgctctatctgcaaatgaactccctgcgcgtggaagatacagccgtgtattattgcgtgaaggacggcgtgcactggggacagggaaccctggttacagtgtctagcacgcgtgagcagaaactgatctcggaagaggatgggagcggcagccagcctcacaccaagcccagcgtgttcgtgatgaagaacggcaccaacgtggcctgcctcgtgaaagagttctaccccaaggacatcaggatcaacctggtgtccagcaagaagatcaccgagttcgaccccgccatcgtgatctcccccagcggcaagtacaacgccgtgaagctggggaagtacgaggacagcaacagcgtgacctgctccgtgcagcacgacaacaagaccgtgcacagcaccgactttgaagtgaaaaccgactccaccgaccacgtgaagcccaaagagacagagaacaccaagcagcccagcaagagctgccacaagcccaaggccatcgtgcacaccgagaaagtgaacatgatgagcctgaccgtgctgggcctgcggatgctgttcgccaaaaccgtggccgtgaacttcctgctgaccgccaagctgttcttcctccgcgccaagagaagcggatctggcgtgaagcagaccctgaatttcgacctgctgaagctggctggcgacgtggaatccaacccaggcccttctagaggccatatgaccgagtacaagcccacggtgcgcctcgccacccgcgacgacgtccccagggccgtacgcaccctcgccgccgcgttcgccgactaccccgccacgcgccacaccgtcgatccggaccgccacatcgagcgggtcaccgagctgcaagaactcttcctcacgcgcgtcgggctcgacatcggcaaggtgtgggtcgcggacgacggcgccgcggtggcggtctggaccacgccggagagcgtcgaagcgggggcggtgttcgccgagatcggcccgcgcatggccgagttgagcggttcccggctggccgcgcagcaacagatggaaggcctcctggcgccgcaccggcccaaggagcccgcgtggttcctggccaccgtcggcgtctcgcccgaccaccagggcaagggtctgggcagcgccgtcgtgctccccggagtggaggcggccgagcgcgccggggtgcccgccttcctggagacctccgcgccccgcaacctccccttctacgagcggctcggcttcaccgtcaccgccgacgtcgaggtgcccgaaggaccgcgcacctggtgcatgacccgcaagcccggtgcctga

SEQ ID NO: 6555 - DNA, 1893 bp, Artificial Sequence
  Synthetic Polynucloetide
atggccttaccagtgaccgccttgctcctgccgctggccttgctgctccacgccgccaggccgcagctccagctgcaagagtctggacctggcctggtcaagcctagcgagacactgagcctgacctgtaccgtgtccggcgatagcatcagcagcggcgattactactggggctggatcagacagcctcctggcaaaggactggaatggatcggccacatctactacagcggcgtgacctactacaaccccagcctgaagtccagagtgaccatcagcgtggacaccagccggaaccagttctccctgaagctgtctagcgtgacagccgccgataccgccgtgtactactgcaccagagaggacagcagcaactggcggagtagaggccagggaacactggtcacagttagctctctcgagagccagcctcacaccaagcccagcgtgttcgtgatgaagaacggcaccaacgtggcctgcctcgtgaaagagttctaccccaaggacatcaggatcaacctggtgtccagcaagaagatcaccgagttcgaccccgccatcgtgatctcccccagcggcaagtacaacgccgtgaagctggggaagtacgaggacagcaacagcgtgacctgctccgtgcagcacgacaacaagaccgtgcacagcaccgactttgaagtgaaaaccgactccaccgaccacgtgaagcccaaagagacagagaacaccaagcagcccagcaagagctgccacaagcccaaggccatcgtgcacaccgagaaagtgaacatgatgagcctgaccgtgctgggcctgcggatgctgttcgccaaaaccgtggccgtgaacttcctgctgaccgccaagctgttcttcctcagggccaagcgatctggatctggagcaacaaacttctcactactcaaacaagcaggtgacgtggaggagaatcccgggcctactagtatggactggatttggcgcatccttttccttgtcggcgctgctaccggcgcgcattccttcgaagttcagctgctggaatctggcggaggactcgttcaacctggcggctctctgagactgagctgtgccgcttctggcttcagcttctctagctacgccctgagctgggttcgacaagctcccggaaagggccttgaatgggtgtccagcatcggcgagaatgacggcaccacagactatgccgatgccgtgaaaggccggtttaccatcagcagagacaattccaagaacacgctctatctgcaaatgaactccctgcgcgtggaagatacagccgtgtattattgcgtgaaggacggcgtgcactggggacagggaaccctggttacagtgtctagcacgcgtgacaagcagctggacgccgacgtgtcccccaagcctaccatcttcctgccctctatcgccgagacaaagctccagaaggccggcacctacctgtgcctgctggaaaagttcttcccagatgtgattaagatccactggcaggaaaagaagtccaacaccatcctgggcagccaggaaggcaacaccatgaagaccaacgacacctacatgaagttcagctggctgaccgtgcccgagaagtccctggacaaagaacacagatgcatcgtgcggcacgaaaacaacaagaacggcgtggaccaggaaatcatcttcccacccatcaagaccgatgtgattacaatggaccccaaggacaactgctccaaggacgccaacgataccctgctgctccagctgaccaacaccagcgcctactacatgtacttgttgctgctgctgaagtccgtggtgtacttcgccatcatcacatgctgcctgctgcggagaaccgccttctgctgcaacggcgagaagtct

SEQ ID NO: 6556 - DNA, 2712 bp, Artificial Sequence
  Synthetic Polynucloetide
atggccttaccagtgaccgccttgctcctgccgctggccttgctgctccacgccgccaggccgctcgaggggaaaccaattcccaaccctcttctgggactggattcaaccggcagcggcgacaagcagctggacgccgacgtgtcccccaagcctaccatcttcctgccctctatcgccgagacaaagctccagaaggccggcacctacctgtgcctgctggaaaagttcttcccagatgtgattaagatccactggcaggaaaagaagtccaacaccatcctgggcagccaggaaggcaacaccatgaagaccaacgacacctacatgaagttcagctggctgaccgtgcccgagaagtccctggacaaagaacacagatgcatcgtgcggcacgaaaacaacaagaacggcgtggaccaggaaatcatcttcccacccatcaagaccgatgtgattacaatggaccccaaggacaactgctccaaggacgccaacgataccctgctgctccagctgaccaacaccagcgcctactacatgtacttgttgctgctgctgaagtccgtggtgtacttcgccatcatcacatgctgcctgctgcggagaaccgccttctgctgcaacggcgagaagtctagggccaagcgatctggatctggagcaacaaacttctcactactcaaacaagcaggtgacgtggaggagaatcccgggcctactagcatggccttaccagtgaccgccttgctcctgccgctggccttgctgctccacgccgccaggccgcagctccagctgcaagagtctggacctggcctggtcaagcctagcgagacactgagcctgacctgtaccgtgtccggcgatagcatcagcagcggcgattactactggggctggatcagacagcctcctggcaaaggactggaatggatcggccacatctactacagcggcgtgacctactacaaccccagcctgaagtccagagtgaccatcagcgtggacaccagccggaaccagttctccctgaagctgtctagcgtgacagccgccgataccgccgtgtactactgcaccagagaggacagcagcaactggcggagtagaggccagggaacactggtcacagttagctctctcgagagcggcggaggcggatctttcgaagttcagctgctggaatctggcggaggactcgttcaacctggcggctctctgagactgagctgtgccgcttctggcttcagcttctctagctacgccctgagctgggttcgacaagctcccggaaagggccttgaatgggtgtccagcatcggcgagaatgacggcaccacagactatgccgatgccgtgaaaggccggtttaccatcagcagagacaattccaagaacacgctctatctgcaaatgaactccctgcgcgtggaagatacagccgtgtattattgcgtgaaggacggcgtgcactggggacagggaaccctggttacagtgtctagcacgcgtgagcagaaactgatctcggaagaggatgggagcggcagccagcctcacaccaagcccagcgtgttcgtgatgaagaacggcaccaacgtggcctgcctcgtgaaagagttctaccccaaggacatcaggatcaacctggtgtccagcaagaagatcaccgagttcgaccccgccatcgtgatctcccccagcggcaagtacaacgccgtgaagctggggaagtacgaggacagcaacagcgtgacctgctccgtgcagcacgacaacaagaccgtgcacagcaccgactttgaagtgaaaaccgactccaccgaccacgtgaagcccaaagagacagagaacaccaagcagcccagcaagagctgccacaagcccaaggccatcgtgcacaccgagaaagtgaacatgatgagcctgaccgtgctgggcctgcggatgctgttcgccaaaaccgtggccgtgaacttcctgctgaccgccaagctgttcttcctccgcgccaagagaagcggatctggcgtgaagcagaccctgaatttcgacctgctgaagctggctggcgacgtggaatccaacccaggcccttctagaggccatatgaccgagtacaagcccacggtgcgcctcgccacccgcgacgacgtccccagggccgtacgcaccctcgccgccgcgttcgccgactaccccgccacgcgccacaccgtcgatccggaccgccacatcgagcgggtcaccgagctgcaagaactcttcctcacgcgcgtcgggctcgacatcggcaaggtgtgggtcgcggacgacggcgccgcggtggcggtctggaccacgccggagagcgtcgaagcgggggcggtgttcgccgagatcggcccgcgcatggccgagttgagcggttcccggctggccgcgcagcaacagatggaaggcctcctggcgccgcaccggcccaaggagcccgcgtggttcctggccaccgtcggcgtctcgcccgaccaccagggcaagggtctgggcagcgccgtcgtgctccccggagtggaggcggccgagcgcgccggggtgcccgccttcctggagacctccgcgccccgcaacctccccttctacgagcggctcggcttcaccgtcaccgccgacgtcgaggtgcccgaaggaccgcgcacctggtgcatgacccgcaagcccggtgcctga

SEQ ID NO: 6557 - DNA, 3102 bp, Artificial Sequence
  Synthetic Polynucloetide
atggccttaccagtgaccgccttgctcctgccgctggccttgctgctccacgccgccaggccgcagctccagctgcaagagtctggacctggcctggtcaagcctagcgagacactgagcctgacctgtaccgtgtccggcgatagcatcagcagcggcgattactactggggctggatcagacagcctcctggcaaaggactggaatggatcggccacatctactacagcggcgtgacctactacaaccccagcctgaagtccagagtgaccatcagcgtggacaccagccggaaccagttctccctgaagctgtctagcgtgacagccgccgataccgccgtgtactactgcaccagagaggacagcagcaactggcggagtagaggccagggaacactggtcacagttagctctggacagcctaaggccaatcctaccgtgacactgttccctccaagcagcgaagaactccaggccaacaaggccacacttgtgtgcctgatctccgacttctaccctggggctgtgacagtggcttggaaggccgatggatctcctgtgaaagccggcgtggaaaccaccaagccatccaagcagagcaacaacaaatacgccgccagctcctacctgagcctgacacctgagcagtggaagtcccacagatcctacagctgccaagtgacccacgaaggcagcaccgtggaaaagacagtggcccctacagagtgcagcggatcccagagcttcggcctgctggaccccaagctgtgctacctgctggatggcatcctgttcatctacggcgtgatcctgaccgccctgttcctgagagtgaagttcagcagaagcgccgacgcccctgcctaccagcagggacagaaccaactgtacaacgagctgaacctgggcagacgggaagagtacgacgtgctggacaagcggagaggcagggaccctgagatgggcggaaagccccagcggagaaagaacccccaggaaggactgtataacgaactccagaaagacaagatggccgaagcctacagcgagatcggcatgaagggcgagcggagaagaggcaagggccacgatggcctgtaccagggcctgagcaccgccaccaaggacacctatgacgccctgcacatgcaggccctgcctccaagaagggccaagcgatctggatctggagcaacaaacttctcactactcaaacaagcaggtgacgtggaggagaatcccgggcctactagtatggactggatttggcgcatccttttccttgtcggcgctgctaccggcgcgcattccttcgaagttcagctgctggaatctggcggaggactcgttcaacctggcggctctctgagactgagctgtgccgcttctggcttcagcttctctagctacgccctgagctgggttcgacaagctcccggaaagggccttgaatgggtgtccagcatcggcgagaatgacggcaccacagactatgccgatgccgtgaaaggccggtttaccatcagcagagacaattccaagaacacgctctatctgcaaatgaactccctgcgcgtggaagatacagccgtgtattattgcgtgaaggacggcgtgcactggggacagggaaccctggttacagtgtctagcgcctctacaaagggaccctccgtgtttcctctggctcccagcagcaagtctacaagcggaggaacagccgctctgggctgcctggtcaaggattactttcccgagcctgtgaccgtgtcctggaatagcggagcactgacaagcggcgtgcacacctttccagccgtgctgcaaagcagcggcctgtactctctgagcagcgtggtcacagtgcctagctctagcctgggcacccagacctacatctgcaatgtgaaccacaagcctagcaacaccaaggtggacaagagagtggaacccaagagctgtggtacccagagttttgggttgttggaccctaaattgtgctatctgttggacggaatcctgttcatttacggagtgatcctgaccgcattgttcctgcgggttaagttttccagatccgcagacgcacccgcttaccaacaagggcagaaccaactctacaatgaacttaatttggggcggagggaagagtacgacgttctggacaaaaggaggggacgagatcccgagatgggcggaaagcctcagcgaaggaagaatccgcaagaggggctttataacgaactccagaaagataaaatggcagaagcctatagtgagattgggatgaagggagaaaggaggaggggtaaaggtcacgatgggttgtaccaaggattgagcacagccactaaagatacctatgatgcgctccacatgcaggccctgccgccaagacgcgccaagagaagcggatctggcgtgaagcagaccctgaatttcgacctgctgaagctggctggcgacgtggaatccaacccaggcccttctagaggccatatgaccgagtacaagcccacggtgcgcctcgccacccgcgacgacgtccccagggccgtacgcaccctcgccgccgcgttcgccgactaccccgccacgcgccacaccgtcgatccggaccgccacatcgagcgggtcaccgagctgcaagaactcttcctcacgcgcgtcgggctcgacatcggcaaggtgtgggtcgcggacgacggcgccgcggtggcggtctggaccacgccggagagcgtcgaagcgggggcggtgttcgccgagatcggcccgcgcatggccgagttgagcggttcccggctggccgcgcagcaacagatggaaggcctcctggcgccgcaccggcccaaggagcccgcgtggttcctggccaccgtcggcgtctcgcccgaccaccagggcaagggtctgggcagcgccgtcgtgctccccggagtggaggcggccgagcgcgccggggtgcccgccttcctggagacctccgcgccccgcaacctccccttctacgagcggctcggcttcaccgtcaccgccgacgtcgaggtgcccgaaggaccgcgcacctggtgcatgacccgcaagcccggtgcctga

SEQ ID NO: 6558 - DNA, 2457 bp, Artificial Sequence
  Synthetic Polynucloetide
atggccttaccagtgaccgccttgctcctgccgctggccttgctgctccacgccgccaggccgcagctccagctgcaagagtctggacctggcctggtcaagcctagcgagacactgagcctgacctgtaccgtgtccggcgatagcatcagcagcggcgattactactggggctggatcagacagcctcctggcaaaggactggaatggatcggccacatctactacagcggcgtgacctactacaaccccagcctgaagtccagagtgaccatcagcgtggacaccagccggaaccagttctccctgaagctgtctagcgtgacagccgccgataccgccgtgtactactgcaccagagaggacagcagcaactggcggagtagaggccagggaacactggtcacagttagctctctcgaggacctgaagaacgtgttcccacctgaggtggccgtgttcgagcctagcgaggccgagatcagccacacccagaaagccaccctcgtgtgcctggctaccggcttctaccccgaccatgtggaactgtcttggtgggtcaacggcaaagaggtgcacagcggcgtgtctaccgacccccagccactgaaagaacagcccgccctgaacgacagccggtactgcctgagcagcagactgagagtgtccgccaccttctggcagaacccccggaaccacttcagatgccaggtgcagttctacggcctgagcgagaacgacgagtggacccaggacagagccaagcccgtgacccagatcgtgtctgccgaagcctggggcagagccgattgcggatcccagagcttcggcctgctggaccccaagctgtgctacctgctggatggcatcctgttcatctacggcgtgatcctgaccgccctgttcctgagagtgaagttcagcagaagcgccgacgcccctgcctaccagcagggacagaaccaactgtacaacgagctgaacctgggcagacgggaagagtacgacgtgctggacaagcggagaggcagggaccctgagatgggcggaaagccccagcggagaaagaacccccaggaaggactgtataacgaactccagaaagacaagatggccgaagcctacagcgagatcggcatgaagggcgagcggagaagaggcaagggccacgatggcctgtaccagggcctgagcaccgccaccaaggacacctatgacgccctgcacatgcaggccctgcctccaagaagggccaagcgatctggatctggagcaacaaacttctcactactcaaacaagcaggtgacgtggaggagaatcccgggcctactagtatggactggatttggcgcatccttttccttgtcggcgctgctaccggcgcgcattccttcgaagttcagctgctggaatctggcggaggactcgttcaacctggcggctctctgagactgagctgtgccgcttctggcttcagcttctctagctacgccctgagctgggttcgacaagctcccggaaagggccttgaatgggtgtccagcatcggcgagaatgacggcaccacagactatgccgatgccgtgaaaggccggtttaccatcagcagagacaattccaagaacacgctctatctgcaaatgaactccctgcgcgtggaagatacagccgtgtattattgcgtgaaggacggcgtgcactggggacagggaaccctggttacagtgtctagcacgcgtatccagaaccctgatcctgccgtgtaccagctgcgggatagcaagagcagcgacaagagcgtgtgtctgttcaccgacttcgacagccagaccaacgtgtcccagagcaaggactccgacgtgtacatcaccgataagaccgtgctggacatgcggagcatggacttcaagagcaactccgccgtggcctggtccaacaagtccgatttcgcctgcgccaacgccttcaacaacagcattatccccgaggacacattcttcccaagccccgagagcagctgcggtacccagagttttgggttgttggaccctaaattgtgctatctgttggacggaatcctgttcatttacggagtgatcctgaccgcattgttcctgcgggttaagttttccagatccgcagacgcacccgcttaccaacaagggcagaaccaactctacaatgaacttaatttggggcggagggaagagtacgacgttctggacaaaaggaggggacgagatcccgagatgggcggaaagcctcagcgaaggaagaatccgcaagaggggctttataacgaactccagaaagataaaatggcagaagcctatagtgagattgggatgaagggagaaaggaggaggggtaaaggtcacgatgggttgtaccaaggattgagcacagccactaaagatacctatgatgcgctccacatgcaggccctgccgccaaga

SEQ ID NO: 6559 - DNA, 2457 bp, Artificial Sequence
  Synthetic Polynucloetide
atggccttaccagtgaccgccttgctcctgccgctggccttgctgctccacgccgccaggccgcagctccagctgcaagagtctggacctggcctggtcaagcctagcgagacactgagcctgacctgtaccgtgtccggcgatagcatcagcagcggcgattactactggggctggatcagacagcctcctggcaaaggactggaatggatcggccacatctactacagcggcgtgacctactacaaccccagcctgaagtccagagtgaccatcagcgtggacaccagccggaaccagttctccctgaagctgtctagcgtgacagccgccgataccgccgtgtactactgcaccagagaggacagcagcaactggcggagtagaggccagggaacactggtcacagttagctctctcgaggacctgaagaacgtgttcccacctgaggtggccgtgttcgagcctagcaaggccgagatcgcccacacccagaaagccaccctcgtgtgcctggctaccggcttctaccccgaccatgtggaactgtcttggtgggtcaacggcaaagaggtgcacagcggcgtgtgtaccgacccccagccactgaaagaacagcccgccctgaacgacagccggtactgcctgagcagcagactgagagtgtccgccaccttctggcagaacccccggaaccacttcagatgccaggtgcagttctacggcctgagcgagaacgacgagtggacccaggacagagccaagcccgtgacccagatcgtgtctgccgaagcctggggcagagccgattgcggatcccagagcttcggcctgctggaccccaagctgtgctacctgctggatggcatcctgttcatctacggcgtgatcctgaccgccctgttcctgagagtgaagttcagcagaagcgccgacgcccctgcctaccagcagggacagaaccaactgtacaacgagctgaacctgggcagacgggaagagtacgacgtgctggacaagcggagaggcagggaccctgagatgggcggaaagccccagcggagaaagaacccccaggaaggactgtataacgaactccagaaagacaagatggccgaagcctacagcgagatcggcatgaagggcgagcggagaagaggcaagggccacgatggcctgtaccagggcctgagcaccgccaccaaggacacctatgacgccctgcacatgcaggccctgcctccaagaagggccaagcgatctggatctggagcaacaaacttctcactactcaaacaagcaggtgacgtggaggagaatcccgggcctactagtatggactggatttggcgcatccttttccttgtcggcgctgctaccggcgcgcattccttcgaagttcagctgctggaatctggcggaggactcgttcaacctggcggctctctgagactgagctgtgccgcttctggcttcagcttctctagctacgccctgagctgggttcgacaagctcccggaaagggccttgaatgggtgtccagcatcggcgagaatgacggcaccacagactatgccgatgccgtgaaaggccggtttaccatcagcagagacaattccaagaacacgctctatctgcaaatgaactccctgcgcgtggaagatacagccgtgtattattgcgtgaaggacggcgtgcactggggacagggaaccctggttacagtgtctagcacgcgtatccagaaccctgatcctgccgtgtaccagctgcgggatagcaagagcagcgacaagagcgtgtgtctgttcaccgacttcgacagccagaccaacgtgtcccagagcaaggactccgacgtgtacatcaccgataagtgcgtgctggacatgcggagcatggacttcaagagcaactccgccgtggcctggtccaacaagtccgatttcgcctgcgccaacgccttcaacaacagcattatccccgaggacacattcttcccaagcagcgacgtgccctgcggtacccagagttttgggttgttggaccctaaattgtgctatctgttggacggaatcctgttcatttacggagtgatcctgaccgcattgttcctgcgggttaagttttccagatccgcagacgcacccgcttaccaacaagggcagaaccaactctacaatgaacttaatttggggcggagggaagagtacgacgttctggacaaaaggaggggacgagatcccgagatgggcggaaagcctcagcgaaggaagaatccgcaagaggggctttataacgaactccagaaagataaaatggcagaagcctatagtgagattgggatgaagggagaaaggaggaggggtaaaggtcacgatgggttgtaccaaggattgagcacagccactaaagatacctatgatgcgctccacatgcaggccctgccgccaaga

SEQ ID NO: 6560 - DNA, 2670 bp, Artificial Sequence
  Synthetic Polynucloetide
atggccttaccagtgaccgccttgctcctgccgctggccttgctgctccacgccgccaggccgcagctccagctgcaagagtctggacctggcctggtcaagcctagcgagacactgagcctgacctgtaccgtgtccggcgatagcatcagcagcggcgattactactggggctggatcagacagcctcctggcaaaggactggaatggatcggccacatctactacagcggcgtgacctactacaaccccagcctgaagtccagagtgaccatcagcgtggacaccagccggaaccagttctccctgaagctgtctagcgtgacagccgccgataccgccgtgtactactgcaccagagaggacagcagcaactggcggagtagaggccagggaacactggtcacagttagctctctcgaggggaaaccaattcccaaccctcttctgggactggattcaaccggcagcggcgaggacctgaagaacgtgttcccacctgaggtggccgtgttcgagcctagcgaggccgagatcagccacacccagaaagccaccctcgtgtgcctggctaccggcttctaccccgaccatgtggaactgtcttggtgggtcaacggcaaagaggtgcacagcggcgtgtctaccgacccccagccactgaaagaacagcccgccctgaacgacagccggtactgcctgagcagcagactgagagtgtccgccaccttctggcagaacccccggaaccacttcagatgccaggtgcagttctacggcctgagcgagaacgacgagtggacccaggacagagccaagcccgtgacccagatcgtgtctgccgaagcctggggcagagccgattgcggatcccagagcttcggcctgctggaccccaagctgtgctacctgctggatggcatcctgttcatctacggcgtgatcctgaccgccctgttcctgagagtgaagttcagcagaagcgccgacgcccctgcctaccagcagggacagaaccaactgtacaacgagctgaacctgggcagacgggaagagtacgacgtgctggacaagcggagaggcagggaccctgagatgggcggaaagccccagcggagaaagaacccccaggaaggactgtataacgaactccagaaagacaagatggccgaagcctacagcgagatcggcatgaagggcgagcggagaagaggcaagggccacgatggcctgtaccagggcctgagcaccgccaccaaggacacctatgacgccctgcacatgcaggccctgcctccaagaagggccaagcgatctggatctggagcaacaaacttctcactactcaaacaagcaggtgacgtggaggagaatcccgggcctactagtatggactggatttggcgcatccttttccttgtcggcgctgctaccggcgcgcattccttcgaagttcagctgctggaatctggcggaggactcgttcaacctggcggctctctgagactgagctgtgccgcttctggcttcagcttctctagctacgccctgagctgggttcgacaagctcccggaaagggccttgaatgggtgtccagcatcggcgagaatgacggcaccacagactatgccgatgccgtgaaaggccggtttaccatcagcagagacaattccaagaacacgctctatctgcaaatgaactccctgcgcgtggaagatacagccgtgtattattgcgtgaaggacggcgtgcactggggacagggaaccctggttacagtgtctagcacgcgtgagcagaaactgatctcggaagaggatgggagcggcatccagaaccctgatcctgccgtgtaccagctgcgggatagcaagagcagcgacaagagcgtgtgtctgttcaccgacttcgacagccagaccaacgtgtcccagagcaaggactccgacgtgtacatcaccgataagaccgtgctggacatgcggagcatggacttcaagagcaactccgccgtggcctggtccaacaagtccgatttcgcctgcgccaacgccttcaacaacagcattatccccgaggacacattcttcccaagccccgagagcagctgcggtacccagagttttgggttgttggaccctaaattgtgctatctgttggacggaatcctgttcatttacggagtgatcctgaccgcattgttcctgaggagcaagcggtcacggctgctccacagcgattacatgaatatgacaccacgaagaccgggtcctactcgcaaacactaccaaccctacgcacctccccgcgactttgcagcgtaccgatctcgggttaagttttccagatccgcagacgcacccgcttaccaacaagggcagaaccaactctacaatgaacttaatttggggcggagggaagagtacgacgttctggacaaaaggaggggacgagatcccgagatgggcggaaagcctcagcgaaggaagaatccgcaagaggggctttataacgaactccagaaagataaaatggcagaagcctatagtgagattgggatgaagggagaaaggaggaggggtaaaggtcacgatgggttgtaccaaggattgagcacagccactaaagatacctatgatgcgctccacatgcaggccctgccgccaaga

SEQ ID NO: 6561 - DNA, 2793 bp, Artificial Sequence
  Synthetic Polynucloetide
atggccttaccagtgaccgccttgctcctgccgctggccttgctgctccacgccgccaggccgcagctccagctgcaagagtctggacctggcctggtcaagcctagcgagacactgagcctgacctgtaccgtgtccggcgatagcatcagcagcggcgattactactggggctggatcagacagcctcctggcaaaggactggaatggatcggccacatctactacagcggcgtgacctactacaaccccagcctgaagtccagagtgaccatcagcgtggacaccagccggaaccagttctccctgaagctgtctagcgtgacagccgccgataccgccgtgtactactgcaccagagaggacagcagcaactggcggagtagaggccagggaacactggtcacagttagctctctcgaggggaaaccaattcccaaccctcttctgggactggattcaaccggcagcggcgaggacctgaagaacgtgttcccacctgaggtggccgtgttcgagcctagcgaggccgagatcagccacacccagaaagccaccctcgtgtgcctggctaccggcttctaccccgaccatgtggaactgtcttggtgggtcaacggcaaagaggtgcacagcggcgtgtctaccgacccccagccactgaaagaacagcccgccctgaacgacagccggtactgcctgagcagcagactgagagtgtccgccaccttctggcagaacccccggaaccacttcagatgccaggtgcagttctacggcctgagcgagaacgacgagtggacccaggacagagccaagcccgtgacccagatcgtgtctgccgaagcctggggcagagccgattgcggatcccagagcttcggcctgctggaccccaagctgtgctacctgctggatggcatcctgttcatctacggcgtgatcctgaccgccctgttcctgaggagtaagaggagcaggctcctgcacagtgactacatgaacatgactccacgccgccccggacccacccgcaagcattaccagccctatgccccaccacgcgacttcgcagcctatcgctccagagtgaagttcagcagaagcgccgacgcccctgcctaccagcagggacagaaccaactgtacaacgagctgaacctgggcagacgggaagagtacgacgtgctggacaagcggagaggcagggaccctgagatgggcggaaagccccagcggagaaagaacccccaggaaggactgtataacgaactccagaaagacaagatggccgaagcctacagcgagatcggcatgaagggcgagcggagaagaggcaagggccacgatggcctgtaccagggcctgagcaccgccaccaaggacacctatgacgccctgcacatgcaggccctgcctccaagaagggccaagcgatctggatctggagcaacaaacttctcactactcaaacaagcaggtgacgtggaggagaatcccgggcctactagtatggactggatttggcgcatccttttccttgtcggcgctgctaccggcgcgcattccttcgaagttcagctgctggaatctggcggaggactcgttcaacctggcggctctctgagactgagctgtgccgcttctggcttcagcttctctagctacgccctgagctgggttcgacaagctcccggaaagggccttgaatgggtgtccagcatcggcgagaatgacggcaccacagactatgccgatgccgtgaaaggccggtttaccatcagcagagacaattccaagaacacgctctatctgcaaatgaactccctgcgcgtggaagatacagccgtgtattattgcgtgaaggacggcgtgcactggggacagggaaccctggttacagtgtctagcacgcgtgagcagaaactgatctcggaagaggatgggagcggcatccagaaccctgatcctgccgtgtaccagctgcgggatagcaagagcagcgacaagagcgtgtgtctgttcaccgacttcgacagccagaccaacgtgtcccagagcaaggactccgacgtgtacatcaccgataagaccgtgctggacatgcggagcatggacttcaagagcaactccgccgtggcctggtccaacaagtccgatttcgcctgcgccaacgccttcaacaacagcattatccccgaggacacattcttcccaagccccgagagcagctgcggtacccagagttttgggttgttggaccctaaattgtgctatctgttggacggaatcctgttcatttacggagtgatcctgaccgcattgttcctgaggagcaagcggtcacggctgctccacagcgattacatgaatatgacaccacgaagaccgggtcctactcgcaaacactaccaaccctacgcacctccccgcgactttgcagcgtaccgatctcgggttaagttttccagatccgcagacgcacccgcttaccaacaagggcagaaccaactctacaatgaacttaatttggggcggagggaagagtacgacgttctggacaaaaggaggggacgagatcccgagatgggcggaaagcctcagcgaaggaagaatccgcaagaggggctttataacgaactccagaaagataaaatggcagaagcctatagtgagattgggatgaagggagaaaggaggaggggtaaaggtcacgatgggttgtaccaaggattgagcacagccactaaagatacctatgatgcgctccacatgcaggccctgccgccaaga

SEQ ID NO: 6562 - DNA, 2676 bp, Artificial Sequence
  Synthetic Polynucloetide
atggccttaccagtgaccgccttgctcctgccgctggccttgctgctccacgccgccaggccgcagctccagctgcaagagtctggacctggcctggtcaagcctagcgagacactgagcctgacctgtaccgtgtccggcgatagcatcagcagcggcgattactactggggctggatcagacagcctcctggcaaaggactggaatggatcggccacatctactacagcggcgtgacctactacaaccccagcctgaagtccagagtgaccatcagcgtggacaccagccggaaccagttctccctgaagctgtctagcgtgacagccgccgataccgccgtgtactactgcaccagagaggacagcagcaactggcggagtagaggccagggaacactggtcacagttagctctctcgaggggaaaccaattcccaaccctcttctgggactggattcaaccggcagcggcgaggacctgaagaacgtgttcccacctgaggtggccgtgttcgagcctagcgaggccgagatcagccacacccagaaagccaccctcgtgtgcctggctaccggcttctaccccgaccatgtggaactgtcttggtgggtcaacggcaaagaggtgcacagcggcgtgtctaccgacccccagccactgaaagaacagcccgccctgaacgacagccggtactgcctgagcagcagactgagagtgtccgccaccttctggcagaacccccggaaccacttcagatgccaggtgcagttctacggcctgagcgagaacgacgagtggacccaggacagagccaagcccgtgacccagatcgtgtctgccgaagcctggggcagagccgattgcggatcccagagcttcggcctgctggaccccaagctgtgctacctgctggatggcatcctgttcatctacggcgtgatcctgaccgccctgttcctgagagtgaagttcagcagaagcgccgacgcccctgcctaccagcagggacagaaccaactgtacaacgagctgaacctgggcagacgggaagagtacgacgtgctggacaagcggagaggcagggaccctgagatgggcggaaagccccagcggagaaagaacccccaggaaggactgtataacgaactccagaaagacaagatggccgaagcctacagcgagatcggcatgaagggcgagcggagaagaggcaagggccacgatggcctgtaccagggcctgagcaccgccaccaaggacacctatgacgccctgcacatgcaggccctgcctccaagaagggccaagcgatctggatctggagcaacaaacttctcactactcaaacaagcaggtgacgtggaggagaatcccgggcctactagtatggactggatttggcgcatccttttccttgtcggcgctgctaccggcgcgcattccttcgaagttcagctgctggaatctggcggaggactcgttcaacctggcggctctctgagactgagctgtgccgcttctggcttcagcttctctagctacgccctgagctgggttcgacaagctcccggaaagggccttgaatgggtgtccagcatcggcgagaatgacggcaccacagactatgccgatgccgtgaaaggccggtttaccatcagcagagacaattccaagaacacgctctatctgcaaatgaactccctgcgcgtggaagatacagccgtgtattattgcgtgaaggacggcgtgcactggggacagggaaccctggttacagtgtctagcacgcgtgagcagaaactgatctcggaagaggatctggggagcggcatccagaaccctgatcctgccgtgtaccagctgcgggatagcaagagcagcgacaagagcgtgtgtctgttcaccgacttcgacagccagaccaacgtgtcccagagcaaggactccgacgtgtacatcaccgataagaccgtgctggacatgcggagcatggacttcaagagcaactccgccgtggcctggtccaacaagtccgatttcgcctgcgccaacgccttcaacaacagcattatccccgaggacacattcttcccaagccccgagagcagctgcggtacccagagttttgggttgttggaccctaaattgtgctatctgttggacggaatcctgttcatttacggagtgatcctgaccgcattgttcctgaagagaggccggaagaagctgctgtacatcttcaagcagcctttcatgcggcccgtgcagaccacccaggaagaggacggctgctcctgccggttccccgaggaagaagaaggcggctgcgagctgcgggttaagttttccagatccgcagacgcacccgcttaccaacaagggcagaaccaactctacaatgaacttaatttggggcggagggaagagtacgacgttctggacaaaaggaggggacgagatcccgagatgggcggaaagcctcagcgaaggaagaatccgcaagaggggctttataacgaactccagaaagataaaatggcagaagcctatagtgagattgggatgaagggagaaaggaggaggggtaaaggtcacgatgggttgtaccaaggattgagcacagccactaaagatacctatgatgcgctccacatgcaggccctgccgccaaga

SEQ ID NO: 6563 - DNA, 2802 bp, Artificial Sequence
  Synthetic Polynucloetide
atggccttaccagtgaccgccttgctcctgccgctggccttgctgctccacgccgccaggccgcagctccagctgcaagagtctggacctggcctggtcaagcctagcgagacactgagcctgacctgtaccgtgtccggcgatagcatcagcagcggcgattactactggggctggatcagacagcctcctggcaaaggactggaatggatcggccacatctactacagcggcgtgacctactacaaccccagcctgaagtccagagtgaccatcagcgtggacaccagccggaaccagttctccctgaagctgtctagcgtgacagccgccgataccgccgtgtactactgcaccagagaggacagcagcaactggcggagtagaggccagggaacactggtcacagttagctctctcgaggggaaaccaattcccaaccctcttctgggactggattcaaccggcagcggcgaggacctgaagaacgtgttcccacctgaggtggccgtgttcgagcctagcgaggccgagatcagccacacccagaaagccaccctcgtgtgcctggctaccggcttctaccccgaccatgtggaactgtcttggtgggtcaacggcaaagaggtgcacagcggcgtgtctaccgacccccagccactgaaagaacagcccgccctgaacgacagccggtactgcctgagcagcagactgagagtgtccgccaccttctggcagaacccccggaaccacttcagatgccaggtgcagttctacggcctgagcgagaacgacgagtggacccaggacagagccaagcccgtgacccagatcgtgtctgccgaagcctggggcagagccgattgcggatcccagagcttcggcctgctggaccccaagctgtgctacctgctggatggcatcctgttcatctacggcgtgatcctgaccgccctgttcctgaaacggggcagaaagaaactcctgtatatattcaaacaaccatttatgagaccagtacaaactactcaagaggaagatggctgtagctgccgatttccagaagaagaagaaggaggatgtgaactgagagtgaagttcagcagaagcgccgacgcccctgcctaccagcagggacagaaccaactgtacaacgagctgaacctgggcagacgggaagagtacgacgtgctggacaagcggagaggcagggaccctgagatgggcggaaagccccagcggagaaagaacccccaggaaggactgtataacgaactccagaaagacaagatggccgaagcctacagcgagatcggcatgaagggcgagcggagaagaggcaagggccacgatggcctgtaccagggcctgagcaccgccaccaaggacacctatgacgccctgcacatgcaggccctgcctccaagaagggccaagcgatctggatctggagcaacaaacttctcactactcaaacaagcaggtgacgtggaggagaatcccgggcctactagtatggactggatttggcgcatccttttccttgtcggcgctgctaccggcgcgcattccttcgaagttcagctgctggaatctggcggaggactcgttcaacctggcggctctctgagactgagctgtgccgcttctggcttcagcttctctagctacgccctgagctgggttcgacaagctcccggaaagggccttgaatgggtgtccagcatcggcgagaatgacggcaccacagactatgccgatgccgtgaaaggccggtttaccatcagcagagacaattccaagaacacgctctatctgcaaatgaactccctgcgcgtggaagatacagccgtgtattattgcgtgaaggacggcgtgcactggggacagggaaccctggttacagtgtctagcacgcgtgagcagaaactgatctcggaagaggatctggggagcggcatccagaaccctgatcctgccgtgtaccagctgcgggatagcaagagcagcgacaagagcgtgtgtctgttcaccgacttcgacagccagaccaacgtgtcccagagcaaggactccgacgtgtacatcaccgataagaccgtgctggacatgcggagcatggacttcaagagcaactccgccgtggcctggtccaacaagtccgatttcgcctgcgccaacgccttcaacaacagcattatccccgaggacacattcttcccaagccccgagagcagctgcggtacccagagttttgggttgttggaccctaaattgtgctatctgttggacggaatcctgttcatttacggagtgatcctgaccgcattgttcctgaagagaggccggaagaagctgctgtacatcttcaagcagcctttcatgcggcccgtgcagaccacccaggaagaggacggctgctcctgccggttccccgaggaagaagaaggcggctgcgagctgcgggttaagttttccagatccgcagacgcacccgcttaccaacaagggcagaaccaactctacaatgaacttaatttggggcggagggaagagtacgacgttctggacaaaaggaggggacgagatcccgagatgggcggaaagcctcagcgaaggaagaatccgcaagaggggctttataacgaactccagaaagataaaatggcagaagcctatagtgagattgggatgaagggagaaaggaggaggggtaaaggtcacgatgggttgtaccaaggattgagcacagccactaaagatacctatgatgcgctccacatgcaggccctgccgccaaga

SEQ ID NO: 6564 - DNA, 2475 bp, Artificial Sequence
  Synthetic Polynucloetide
atggccttaccagtgaccgccttgctcctgccgctggccttgctgctccacgccgccaggccgcagctccagctgcaagagtctggacctggcctggtcaagcctagcgagacactgagcctgacctgtaccgtgtccggcgatagcatcagcagcggcgattactactggggctggatcagacagcctcctggcaaaggactggaatggatcggccacatctactacagcggcgtgacctactacaaccccagcctgaagtccagagtgaccatcagcgtggacaccagccggaaccagttctccctgaagctgtctagcgtgacagccgccgataccgccgtgtactactgcaccagagaggacagcagcaactggcggagtagaggccagggaacactggtcacagttagctctctcgagcagagcttcggcctgctggaccccaagctgtgctacctgctggatggcatcctgttcatctacggcgtgatcctgaccgccctgttcctgagagtgaagttcagcagaagcgccgacgcccctgcctaccagcagggacagaaccaactgtacaacgagctgaacctgggcagacgggaagagtacgacgtgctggacaagcggagaggcagggaccctgagatgggcggaaagccccagcggagaaagaacccccaggaaggactgtataacgaactccagaaagacaagatggccgaagcctacagcgagatcggcatgaagggcgagcggagaagaggcaagggccacgatggcctgtaccagggcctgagcaccgccaccaaggacacctatgacgccctgcacatgcaggccctgcctccaagaagggccaagcgatctggatctggagcaacaaacttctcactactcaaacaagcaggtgacgtggaggagaatcccgggcctactagtatggactggatttggcgcatccttttccttgtcggcgctgctaccggcgcgcattccttcgaagttcagctgctggaatctggcggaggactcgttcaacctggcggctctctgagactgagctgtgccgcttctggcttcagcttctctagctacgccctgagctgggttcgacaagctcccggaaagggccttgaatgggtgtccagcatcggcgagaatgacggcaccacagactatgccgatgccgtgaaaggccggtttaccatcagcagagacaattccaagaacacgctctatctgcaaatgaactccctgcgcgtggaagatacagccgtgtattattgcgtgaaggacggcgtgcactggggacagggaaccctggttacagtgtctagcacgcgtcagagttttgggttgttggaccctaaattgtgctatctgttggacggaatcctgttcatttacggagtgatcctgaccgcattgttcctgcgggttaagttttccagatccgcagacgcacccgcttaccaacaagggcagaaccaactctacaatgaacttaatttggggcggagggaagagtacgacgttctggacaaaaggaggggacgagatcccgagatgggcggaaagcctcagcgaaggaagaatccgcaagaggggctttataacgaactccagaaagataaaatggcagaagcctatagtgagattgggatgaagggagaaaggaggaggggtaaaggtcacgatgggttgtaccaaggattgagcacagccactaaagatacctatgatgcgctccacatgcaggccctgccgccaagacgcgccaagagaagcggatctggcgtgaagcagaccctgaatttcgacctgctgaagctggctggcgacgtggaatccaacccaggcccttctagaggccatatgaccgagtacaagcccacggtgcgcctcgccacccgcgacgacgtccccagggccgtacgcaccctcgccgccgcgttcgccgactaccccgccacgcgccacaccgtcgatccggaccgccacatcgagcgggtcaccgagctgcaagaactcttcctcacgcgcgtcgggctcgacatcggcaaggtgtgggtcgcggacgacggcgccgcggtggcggtctggaccacgccggagagcgtcgaagcgggggcggtgttcgccgagatcggcccgcgcatggccgagttgagcggttcccggctggccgcgcagcaacagatggaaggcctcctggcgccgcaccggcccaaggagcccgcgtggttcctggccaccgtcggcgtctcgcccgaccaccagggcaagggtctgggcagcgccgtcgtgctccccggagtggaggcggccgagcgcgccggggtgcccgccttcctggagacctccgcgccccgcaacctccccttctacgagcggctcggcttcaccgtcaccgccgacgtcgaggtgcccgaaggaccgcgcacctggtgcatgacccgcaagcccggtgcctga

SEQ ID NO: 6565 - DNA, 1947 bp, Artificial Sequence
  Synthetic Polynucloetide
atggccttaccagtgaccgccttgctcctgccgctggccttgctgctccacgccgccaggccgcagctccagctgcaagagtctggacctggcctggtcaagcctagcgagacactgagcctgacctgtaccgtgtccggcgatagcatcagcagcggcgattactactggggctggatcagacagcctcctggcaaaggactggaatggatcggccacatctactacagcggcgtgacctactacaaccccagcctgaagtccagagtgaccatcagcgtggacaccagccggaaccagttctccctgaagctgtctagcgtgacagccgccgataccgccgtgtactactgcaccagagaggacagcagcaactggcggagtagaggccagggaacactggtcacagttagctctctcgagggacagcctaaggccaatcctaccgtgacactgttccctccaagcagcgaagaactccaggccaacaaggccacacttgtgtgcctgatctccgacttctaccctggggctgtgacagtggcttggaaggccgatggatctcctgtgaaagccggcgtggaaaccaccaagccatccaagcagagcaacaacaaatacgccgccagctcctacctgagcctgacacctgagcagtggaagtcccacagatcctacagctgccaagtgacccacgaaggcagcaccgtggaaaagacagtggcccctacagagtgcagccccatcaagaccgatgtgattacaatggaccccaaggacaactgctccaaggacgccaacgataccctgctgctccagctgaccaacaccagcgcctactacatgtacttgttgctgctgctgaagtccgtggtgtacttcgccatcatcacatgctgcctgctgcggagaaccgccttctgctgcaacggcgagaagtctagggccaagcgatctggatctggagcaacaaacttctcactactcaaacaagcaggtgacgtggaggagaatcccgggcctactagtatggactggatttggcgcatccttttccttgtcggcgctgctaccggcgcgcattccttcgaagttcagctgctggaatctggcggaggactcgttcaacctggcggctctctgagactgagctgtgccgcttctggcttcagcttctctagctacgccctgagctgggttcgacaagctcccggaaagggccttgaatgggtgtccagcatcggcgagaatgacggcaccacagactatgccgatgccgtgaaaggccggtttaccatcagcagagacaattccaagaacacgctctatctgcaaatgaactccctgcgcgtggaagatacagccgtgtattattgcgtgaaggacggcgtgcactggggacagggaaccctggttacagtgtctagcacgcgtgcctctacaaagggaccctccgtgtttcctctggctcccagcagcaagtctacaagcggaggaacagccgctctgggctgcctggtcaaggattactttcccgagcctgtgaccgtgtcctggaatagcggagcactgacaagcggcgtgcacacctttccagccgtgctgcaaagcagcggcctgtactctctgagcagcgtggtcacagtgcctagctctagcctgggcacccagacctacatctgcaatgtgaaccacaagcctagcaacaccaaggtggacaagagagtggaacccaagagctgtgaagtgaaaaccgactccaccgaccacgtgaagcccaaagagacagagaacaccaagcagcccagcaagagctgccacaagcccaaggccatcgtgcacaccgagaaagtgaacatgatgagcctgaccgtgctgggcctgcggatgctgttcgccaaaaccgtggccgtgaacttcctgctgaccgccaagctgttcttcctc

SEQ ID NO: 6566 - DNA, 1881 bp, Artificial Sequence
  Synthetic Polynucloetide
atggccttaccagtgaccgccttgctcctgccgctggccttgctgctccacgccgccaggccgcagctccagctgcaagagtctggacctggcctggtcaagcctagcgagacactgagcctgacctgtaccgtgtccggcgatagcatcagcagcggcgattactactggggctggatcagacagcctcctggcaaaggactggaatggatcggccacatctactacagcggcgtgacctactacaaccccagcctgaagtccagagtgaccatcagcgtggacaccagccggaaccagttctccctgaagctgtctagcgtgacagccgccgataccgccgtgtactactgcaccagagaggacagcagcaactggcggagtagaggccagggaacactggtcacagttagctctctcgagggacagcctaaggccaatcctaccgtgacactgttccctccaagcagcgaagaactccaggccaacaaggccacacttgtgtgcctgatctccgacttctaccctggggctgtgacagtggcttggaaggccgatggatctcctgtgaaagccggcgtggaaaccaccaagccatccaagcagagcaacaacaaatacgccgccagctcctacctgagcctgacacctgagcagtggaagtcccacagatcctacagctgccaagtgacccacgaaggcagcaccgtggaaaagacagtggcccctacagagtgcagcggcagagccgattgcggcatcaccagcgccagctaccaccagggcgtgctgagcgccaccatcctgtacgagatcctgctgggcaaggccaccctgtacgccgtgctggtgtctgccctggtgctgatggctatggtcaagcggaaggacagccggggaagggccaagcgatctggatctggagcaacaaacttctcactactcaaacaagcaggtgacgtggaggagaatcccgggcctactagtatggactggatttggcgcatccttttccttgtcggcgctgctaccggcgcgcattccttcgaagttcagctgctggaatctggcggaggactcgttcaacctggcggctctctgagactgagctgtgccgcttctggcttcagcttctctagctacgccctgagctgggttcgacaagctcccggaaagggccttgaatgggtgtccagcatcggcgagaatgacggcaccacagactatgccgatgccgtgaaaggccggtttaccatcagcagagacaattccaagaacacgctctatctgcaaatgaactccctgcgcgtggaagatacagccgtgtattattgcgtgaaggacggcgtgcactggggacagggaaccctggttacagtgtctagcacgcgtgcctctacaaagggaccctccgtgtttcctctggctcccagcagcaagtctacaagcggaggaacagccgctctgggctgcctggtcaaggattactttcccgagcctgtgaccgtgtcctggaatagcggagcactgacaagcggcgtgcacacctttccagccgtgctgcaaagcagcggcctgtactctctgagcagcgtggtcacagtgcctagctctagcctgggcacccagacctacatctgcaatgtgaaccacaagcctagcaacaccaaggtggacaagagagtggaacccaagagctgtatccccgaggacacattcttcccaagcagcgacgtgccctgcgacgtgaagctggtggaaaagagcttcgagacagacaccaacctgaacttccagaacctgagcgtgatcggcttcagaatcctgctgctgaaagtggccggctttaacctgctgatgaccctgcggctgtggtccagc

SEQ ID NO: 6567 - DNA, 1881 bp, Artificial Sequence
  Synthetic Polynucloetide
atggccttaccagtgaccgccttgctcctgccgctggccttgctgctccacgccgccaggccgcagctccagctgcaagagtctggacctggcctggtcaagcctagcgagacactgagcctgacctgtaccgtgtccggcgatagcatcagcagcggcgattactactggggctggatcagacagcctcctggcaaaggactggaatggatcggccacatctactacagcggcgtgacctactacaaccccagcctgaagtccagagtgaccatcagcgtggacaccagccggaaccagttctccctgaagctgtctagcgtgacagccgccgataccgccgtgtactactgcaccagagaggacagcagcaactggcggagtagaggccagggaacactggtcacagttagctctctcgagggacagcctaaggccaatcctaccgtgacactgttccctccaagcagcgaagaactccaggccaacaaggccacacttgtgtgcctgatctccgacttctaccctggggctgtgacagtggcttggaaggccgatggatctcctgtgaaagccggcgtggaaaccaccaagccatccaagcagagcaacaacaaatacgccgccagctcctacctgagcctgacacctgagcagtggaagtcccacagatcctacagctgccaagtgacccacgaaggcagcaccgtggaaaagacagtggcccctacagagtgcagcggcagagccgattgcggctttaccagcgagagctaccagcagggcgtgctgagcgccaccatcctgtacgagatcctgctgggcaaggccaccctgtacgccgtgctggtgtctgccctggtgctgatggctatggtcaagcggaaggacagccggggaagggccaagcgatctggatctggagcaacaaacttctcactactcaaacaagcaggtgacgtggaggagaatcccgggcctactagtatggactggatttggcgcatccttttccttgtcggcgctgctaccggcgcgcattccttcgaagttcagctgctggaatctggcggaggactcgttcaacctggcggctctctgagactgagctgtgccgcttctggcttcagcttctctagctacgccctgagctgggttcgacaagctcccggaaagggccttgaatgggtgtccagcatcggcgagaatgacggcaccacagactatgccgatgccgtgaaaggccggtttaccatcagcagagacaattccaagaacacgctctatctgcaaatgaactccctgcgcgtggaagatacagccgtgtattattgcgtgaaggacggcgtgcactggggacagggaaccctggttacagtgtctagcacgcgtgcctctacaaagggaccctccgtgtttcctctggctcccagcagcaagtctacaagcggaggaacagccgctctgggctgcctggtcaaggattactttcccgagcctgtgaccgtgtcctggaatagcggagcactgacaagcggcgtgcacacctttccagccgtgctgcaaagcagcggcctgtactctctgagcagcgtggtcacagtgcctagctctagcctgggcacccagacctacatctgcaatgtgaaccacaagcctagcaacaccaaggtggacaagagagtggaacccaagagctgtatccccgaggacacattcttcccaagccccgagagcagctgcgacgtgaagctggtggaaaagagcttcgagacagacaccaacctgaacttccagaacctgagcgtgatcggcttcagaatcctgctgctgaaagtggccggctttaacctgctgatgaccctgcggctgtggtccagc

SEQ ID NO: 6568 - DNA, 1344 bp, Artificial Sequence
  Synthetic Polynucloetide
atggccttaccagtgaccgccttgctcctgccgctggccttgctgctccacgccgccaggccgcagctccagctgcaagagtctggacctggcctggtcaagcctagcgagacactgagcctgacctgtaccgtgtccggcgatagcatcagcagcggcgattactactggggctggatcagacagcctcctggcaaaggactggaatggatcggccacatctactacagcggcgtgacctactacaaccccagcctgaagtccagagtgaccatcagcgtggacaccagccggaaccagttctccctgaagctgtctagcgtgacagccgccgataccgccgtgtactactgcaccagagaggacagcagcaactggcggagtagaggccagggaacactggtcacagttagctctctcgagagcggcggaggcggatctttcgaagttcagctgctggaatctggcggaggactcgttcaacctggcggctctctgagactgagctgtgccgcttctggcttcagcttctctagctacgccctgagctgggttcgacaagctcccggaaagggccttgaatgggtgtccagcatcggcgagaatgacggcaccacagactatgccgatgccgtgaaaggccggtttaccatcagcagagacaattccaagaacacgctctatctgcaaatgaactccctgcgcgtggaagatacagccgtgtattattgcgtgaaggacggcgtgcactggggacagggaaccctggttacagtgtctagcacgcgtgacggtaacgaggagatgggaggaatcactcaaaccccttacaaagtctcaatttcaggaacaactgttatccttacatgtccccagtatcctggcagcgagatcctttggcagcataacgacaagaatatagggggagatgaagacgataagaatatcggatctgacgaggatcacttgagcctgaaagagttctccgagcttgaacaaagcggatattatgtgtgctatccgcgcgggtcaaagccggaagacgctaacttttacctttatctccgagccagagtgtgcgaaaattgcatggaaatggacgttatgtccgttgctacaatagttatcgtagatatatgcatcacgggtggactgcttctgctggtttattattggtccaagaatagaaaggccaaagctaaacccgtgaccagaggcgctggcgcaggcggaaggcaaaggggacaaaacaaagaacggccaccaccagtgccaaatccagattatgagcctattcggaaaggacagagggacctgtactctggcctgaatcagagaagaatc

SEQ ID NO: 6569 - DNA, 1239 bp, Artificial Sequence
  Synthetic Polynucloetide
atggccttaccagtgaccgccttgctcctgccgctggccttgctgctccacgccgccaggccgcagctccagctgcaagagtctggacctggcctggtcaagcctagcgagacactgagcctgacctgtaccgtgtccggcgatagcatcagcagcggcgattactactggggctggatcagacagcctcctggcaaaggactggaatggatcggccacatctactacagcggcgtgacctactacaaccccagcctgaagtccagagtgaccatcagcgtggacaccagccggaaccagttctccctgaagctgtctagcgtgacagccgccgataccgccgtgtactactgcaccagagaggacagcagcaactggcggagtagaggccagggaacactggtcacagttagctctctcgagagcggcggaggcggatctttcgaagttcagctgctggaatctggcggaggactcgttcaacctggcggctctctgagactgagctgtgccgcttctggcttcagcttctctagctacgccctgagctgggttcgacaagctcccggaaagggccttgaatgggtgtccagcatcggcgagaatgacggcaccacagactatgccgatgccgtgaaaggccggtttaccatcagcagagacaattccaagaacacgctctatctgcaaatgaactccctgcgcgtggaagatacagccgtgtattattgcgtgaaggacggcgtgcactggggacagggaaccctggttacagtgtctagcacgcgtttcaagatccccatcgaggaactggaagatcgggtgttcgtgaactgcaacacctctatcacctgggtggaaggcaccgtgggaacactgctgagcgacatcaccagactggacctcggcaagcggattctggaccctcggggcatctacagatgcaacggcaccgacatctacaaggacaaagaaagcaccgtgcaggtccactacagaatgtgccagtcctgcgtggaactggaccctgctacagtggccggcatcatcgtgaccgatgtgatcgctactctgctgctggctctgggagtgttctgcttcgccggacacgaaacaggcagactgtctggcgctgccgatacacaggccctgctgagaaacgaccaagtgtatcagcccctgcgcgacagagatgatgcccagtattctcacctcggcggcaactgggctagaaacaag

SEQ ID NO: 6570 - DNA, 1269 bp, Artificial Sequence
  Synthetic Polynucloetide
atggccttaccagtgaccgccttgctcctgccgctggccttgctgctccacgccgccaggccgcagctccagctgcaagagtctggacctggcctggtcaagcctagcgagacactgagcctgacctgtaccgtgtccggcgatagcatcagcagcggcgattactactggggctggatcagacagcctcctggcaaaggactggaatggatcggccacatctactacagcggcgtgacctactacaaccccagcctgaagtccagagtgaccatcagcgtggacaccagccggaaccagttctccctgaagctgtctagcgtgacagccgccgataccgccgtgtactactgcaccagagaggacagcagcaactggcggagtagaggccagggaacactggtcacagttagctctctcgagagcggcggaggcggatctttcgaagttcagctgctggaatctggcggaggactcgttcaacctggcggctctctgagactgagctgtgccgcttctggcttcagcttctctagctacgccctgagctgggttcgacaagctcccggaaagggccttgaatgggtgtccagcatcggcgagaatgacggcaccacagactatgccgatgccgtgaaaggccggtttaccatcagcagagacaattccaagaacacgctctatctgcaaatgaactccctgcgcgtggaagatacagccgtgtattattgcgtgaaggacggcgtgcactggggacagggaaccctggttacagtgtctagcacgcgtcagagcatcaagggcaaccacctggtcaaggtgtacgactaccaagaggacggcagcgtgctgctgacatgtgatgccgaggccaagaacatcacctggtttaaggacggcaagatgatcggcttcctgaccgaggacaagaagaagtggaacctgggcagcaacgctaaggaccccagaggcatgtatcagtgcaagggcagccagaacaagagcaagcccctccaggtgtactaccggatgtgccagaactgcatcgagctgaacgccgctaccatcagcggctttctgttcgccgagatcgtgtccatcttcgtgctggccgtgggcgtgtactttatcgctggacaggatggcgtgcggcagagcagagcttccgataagcaaaccctgctgcctaacgaccagctgtaccagcctctgaaggacagagaggacgaccagtacagccacctccagggcaatcagctgagaagaaac

SEQ ID NO: 6571 - DNA, 1218 bp, Artificial Sequence
  Synthetic Polynucloetide
atggccttaccagtgaccgccttgctcctgccgctggccttgctgctccacgccgccaggccgcagctccagctgcaagagtctggacctggcctggtcaagcctagcgagacactgagcctgacctgtaccgtgtccggcgatagcatcagcagcggcgattactactggggctggatcagacagcctcctggcaaaggactggaatggatcggccacatctactacagcggcgtgacctactacaaccccagcctgaagtccagagtgaccatcagcgtggacaccagccggaaccagttctccctgaagctgtctagcgtgacagccgccgataccgccgtgtactactgcaccagagaggacagcagcaactggcggagtagaggccagggaacactggtcacagttagctctctcgagagcggcggaggcggatctttcgaagttcagctgctggaatctggcggaggactcgttcaacctggcggctctctgagactgagctgtgccgcttctggcttcagcttctctagctacgccctgagctgggttcgacaagctcccggaaagggccttgaatgggtgtccagcatcggcgagaatgacggcaccacagactatgccgatgccgtgaaaggccggtttaccatcagcagagacaattccaagaacacgctctatctgcaaatgaactccctgcgcgtggaagatacagccgtgtattattgcgtgaaggacggcgtgcactggggacagggaaccctggttacagtgtctagcacgcgtcagagttttgggttgttggaccctaaattgtgctatctgttggacggaatcctgttcatttacggagtgatcctgaccgcattgttcctgcgggttaagttttccagatccgcagacgcacccgcttaccaacaagggcagaaccaactctacaatgaacttaatttggggcggagggaagagtacgacgttctggacaaaaggaggggacgagatcccgagatgggcggaaagcctcagcgaaggaagaatccgcaagaggggctttataacgaactccagaaagataaaatggcagaagcctatagtgagattgggatgaagggagaaaggaggaggggtaaaggtcacgatgggttgtaccaaggattgagcacagccactaaagatacctatgatgcgctccacatgcaggccctgccgccaaga

SEQ ID NO: 6572 - DNA, 1347 bp, Artificial Sequence
  Synthetic Polynucloetide
atggccttaccagtgaccgccttgctcctgccgctggccttgctgctccacgccgccaggccggaagttcagctgctggaatctggcggaggactcgttcaacctggcggctctctgagactgagctgtgccgcttctggcttcagcttctctagctacgccctgagctgggttcgacaagctcccggaaagggccttgaatgggtgtccagcatcggcgagaatgacggcaccacagactatgccgatgccgtgaaaggccggtttaccatcagcagagacaattccaagaacacgctctatctgcaaatgaactccctgcgcgtggaagatacagccgtgtattattgcgtgaaggacggcgtgcactggggacagggaaccctggttacagtgtctagcctcgagagcggcggaggcggatctttcgaacagctccagctgcaagagtctggacctggcctggtcaagcctagcgagacactgagcctgacctgtaccgtgtccggcgatagcatcagcagcggcgattactactggggctggatcagacagcctcctggcaaaggactggaatggatcggccacatctactacagcggcgtgacctactacaaccccagcctgaagtccagagtgaccatcagcgtggacaccagccggaaccagttctccctgaagctgtctagcgtgacagccgccgataccgccgtgtactactgcaccagagaggacagcagcaactggcggagtagaggccagggaacactggtcacagttagctctacgcgtgacggtaacgaggagatgggaggaatcactcaaaccccttacaaagtctcaatttcaggaacaactgttatccttacatgtccccagtatcctggcagcgagatcctttggcagcataacgacaagaatatagggggagatgaagacgataagaatatcggatctgacgaggatcacttgagcctgaaagagttctccgagcttgaacaaagcggatattatgtgtgctatccgcgcgggtcaaagccggaagacgctaacttttacctttatctccgagccagagtgtgcgaaaattgcatggaaatggacgttatgtccgttgctacaatagttatcgtagatatatgcatcacgggtggactgcttctgctggtttattattggtccaagaatagaaaggccaaagctaaacccgtgaccagaggcgctggcgcaggcggaaggcaaaggggacaaaacaaagaacggccaccaccagtgccaaatccagattatgagcctattcggaaaggacagagggacctgtactctggcctgaatcagagaagaatc

SEQ ID NO: 6573 - DNA, 1242 bp, Artificial Sequence
  Synthetic Polynucloetide
atggccttaccagtgaccgccttgctcctgccgctggccttgctgctccacgccgccaggccggaagttcagctgctggaatctggcggaggactcgttcaacctggcggctctctgagactgagctgtgccgcttctggcttcagcttctctagctacgccctgagctgggttcgacaagctcccggaaagggccttgaatgggtgtccagcatcggcgagaatgacggcaccacagactatgccgatgccgtgaaaggccggtttaccatcagcagagacaattccaagaacacgctctatctgcaaatgaactccctgcgcgtggaagatacagccgtgtattattgcgtgaaggacggcgtgcactggggacagggaaccctggttacagtgtctagcctcgagagcggcggaggcggatctttcgaacagctccagctgcaagagtctggacctggcctggtcaagcctagcgagacactgagcctgacctgtaccgtgtccggcgatagcatcagcagcggcgattactactggggctggatcagacagcctcctggcaaaggactggaatggatcggccacatctactacagcggcgtgacctactacaaccccagcctgaagtccagagtgaccatcagcgtggacaccagccggaaccagttctccctgaagctgtctagcgtgacagccgccgataccgccgtgtactactgcaccagagaggacagcagcaactggcggagtagaggccagggaacactggtcacagttagctctacgcgtttcaagatccccatcgaggaactggaagatcgggtgttcgtgaactgcaacacctctatcacctgggtggaaggcaccgtgggaacactgctgagcgacatcaccagactggacctcggcaagcggattctggaccctcggggcatctacagatgcaacggcaccgacatctacaaggacaaagaaagcaccgtgcaggtccactacagaatgtgccagtcctgcgtggaactggaccctgctacagtggccggcatcatcgtgaccgatgtgatcgctactctgctgctggctctgggagtgttctgcttcgccggacacgaaacaggcagactgtctggcgctgccgatacacaggccctgctgagaaacgaccaagtgtatcagcccctgcgcgacagagatgatgcccagtattctcacctcggcggcaactgggctagaaacaag

SEQ ID NO: 6574 - DNA, 1272 bp, Artificial Sequence
  Synthetic Polynucloetide
atggccttaccagtgaccgccttgctcctgccgctggccttgctgctccacgccgccaggccggaagttcagctgctggaatctggcggaggactcgttcaacctggcggctctctgagactgagctgtgccgcttctggcttcagcttctctagctacgccctgagctgggttcgacaagctcccggaaagggccttgaatgggtgtccagcatcggcgagaatgacggcaccacagactatgccgatgccgtgaaaggccggtttaccatcagcagagacaattccaagaacacgctctatctgcaaatgaactccctgcgcgtggaagatacagccgtgtattattgcgtgaaggacggcgtgcactggggacagggaaccctggttacagtgtctagcctcgagagcggcggaggcggatctttcgaacagctccagctgcaagagtctggacctggcctggtcaagcctagcgagacactgagcctgacctgtaccgtgtccggcgatagcatcagcagcggcgattactactggggctggatcagacagcctcctggcaaaggactggaatggatcggccacatctactacagcggcgtgacctactacaaccccagcctgaagtccagagtgaccatcagcgtggacaccagccggaaccagttctccctgaagctgtctagcgtgacagccgccgataccgccgtgtactactgcaccagagaggacagcagcaactggcggagtagaggccagggaacactggtcacagttagctctacgcgtcagagcatcaagggcaaccacctggtcaaggtgtacgactaccaagaggacggcagcgtgctgctgacatgtgatgccgaggccaagaacatcacctggtttaaggacggcaagatgatcggcttcctgaccgaggacaagaagaagtggaacctgggcagcaacgctaaggaccccagaggcatgtatcagtgcaagggcagccagaacaagagcaagcccctccaggtgtactaccggatgtgccagaactgcatcgagctgaacgccgctaccatcagcggctttctgttcgccgagatcgtgtccatcttcgtgctggccgtgggcgtgtactttatcgctggacaggatggcgtgcggcagagcagagcttccgataagcaaaccctgctgcctaacgaccagctgtaccagcctctgaaggacagagaggacgaccagtacagccacctccagggcaatcagctgagaagaaac

SEQ ID NO: 6575 - DNA, 1221 bp, Artificial Sequence
  Synthetic Polynucloetide
atggccttaccagtgaccgccttgctcctgccgctggccttgctgctccacgccgccaggccggaagttcagctgctggaatctggcggaggactcgttcaacctggcggctctctgagactgagctgtgccgcttctggcttcagcttctctagctacgccctgagctgggttcgacaagctcccggaaagggccttgaatgggtgtccagcatcggcgagaatgacggcaccacagactatgccgatgccgtgaaaggccggtttaccatcagcagagacaattccaagaacacgctctatctgcaaatgaactccctgcgcgtggaagatacagccgtgtattattgcgtgaaggacggcgtgcactggggacagggaaccctggttacagtgtctagcctcgagagcggcggaggcggatctttcgaacagctccagctgcaagagtctggacctggcctggtcaagcctagcgagacactgagcctgacctgtaccgtgtccggcgatagcatcagcagcggcgattactactggggctggatcagacagcctcctggcaaaggactggaatggatcggccacatctactacagcggcgtgacctactacaaccccagcctgaagtccagagtgaccatcagcgtggacaccagccggaaccagttctccctgaagctgtctagcgtgacagccgccgataccgccgtgtactactgcaccagagaggacagcagcaactggcggagtagaggccagggaacactggtcacagttagctctacgcgtcagagttttgggttgttggaccctaaattgtgctatctgttggacggaatcctgttcatttacggagtgatcctgaccgcattgttcctgcgggttaagttttccagatccgcagacgcacccgcttaccaacaagggcagaaccaactctacaatgaacttaatttggggcggagggaagagtacgacgttctggacaaaaggaggggacgagatcccgagatgggcggaaagcctcagcgaaggaagaatccgcaagaggggctttataacgaactccagaaagataaaatggcagaagcctatagtgagattgggatgaagggagaaaggaggaggggtaaaggtcacgatgggttgtaccaaggattgagcacagccactaaagatacctatgatgcgctccacatgcaggccctgccgccaaga

SEQ ID NO: 6576 - DNA, 1920 bp, Artificial Sequence
  Synthetic Polynucloetide
atggccttaccagtgaccgccttgctcctgccgctggccttgctgctccacgccgccaggccgcagctccagctgcaagagtctggacctggcctggtcaagcctagcgagacactgagcctgacctgtaccgtgtccggcgatagcatcagcagcggcgattactactggggctggatcagacagcctcctggcaaaggactggaatggatcggccacatctactacagcggcgtgacctactacaaccccagcctgaagtccagagtgaccatcagcgtggacaccagccggaaccagttctccctgaagctgtctagcgtgacagccgccgataccgccgtgtactactgcaccagagaggacagcagcaactggcggagtagaggccagggaacactggtcacagttagctctctcgagagcggcggaggcggatctttcgaagttcagctgctggaatctggcggaggactcgttcaacctggcggctctctgagactgagctgtgccgcttctggcttcagcttctctagctacgccctgagctgggttcgacaagctcccggaaagggccttgaatgggtgtccagcatcggcgagaatgacggcaccacagactatgccgatgccgtgaaaggccggtttaccatcagcagagacaattccaagaacacgctctatctgcaaatgaactccctgcgcgtggaagatacagccgtgtattattgcgtgaaggacggcgtgcactggggacagggaaccctggttacagtgtctagcacgcgtgggagcggcatccagaaccctgatcctgccgtgtaccagctgcgggatagcaagagcagcgacaagagcgtgtgtctgttcaccgacttcgacagccagaccaacgtgtcccagagcaaggactccgacgtgtacatcaccgataagaccgtgctggacatgcggagcatggacttcaagagcaactccgccgtggcctggtccaacaagtccgatttcgcctgcgccaacgccttcaacaacagcattatccccgaggacacattcttcccaagccccgagagcagctgcgacgtgaagctggtggaaaagagcttcgagacagacaccaacctgaacttccagaacctgagcgtgatcggcttcagaatcctgctgctgaaagtggccggctttaacctgctgatgaccctgcggctgtggtccagccgcgccaagagaagcggatctggcgtgaagcagaccctgaatttcgacctgctgaagctggctggcgacgtggaatccaacccaggcccttctagaggccatatgaccgagtacaagcccacggtgcgcctcgccacccgcgacgacgtccccagggccgtacgcaccctcgccgccgcgttcgccgactaccccgccacgcgccacaccgtcgatccggaccgccacatcgagcgggtcaccgagctgcaagaactcttcctcacgcgcgtcgggctcgacatcggcaaggtgtgggtcgcggacgacggcgccgcggtggcggtctggaccacgccggagagcgtcgaagcgggggcggtgttcgccgagatcggcccgcgcatggccgagttgagcggttcccggctggccgcgcagcaacagatggaaggcctcctggcgccgcaccggcccaaggagcccgcgtggttcctggccaccgtcggcgtctcgcccgaccaccagggcaagggtctgggcagcgccgtcgtgctccccggagtggaggcggccgagcgcgccggggtgcccgccttcctggagacctccgcgccccgcaacctccccttctacgagcggctcggcttcaccgtcaccgccgacgtcgaggtgcccgaaggaccgcgcacctggtgcatgacccgcaagcccggtgcctga

SEQ ID NO: 6577 - DNA, 2016 bp, Artificial Sequence
  Synthetic Polynucloetide
atggccttaccagtgaccgccttgctcctgccgctggccttgctgctccacgccgccaggccgcagctccagctgcaagagtctggacctggcctggtcaagcctagcgagacactgagcctgacctgtaccgtgtccggcgatagcatcagcagcggcgattactactggggctggatcagacagcctcctggcaaaggactggaatggatcggccacatctactacagcggcgtgacctactacaaccccagcctgaagtccagagtgaccatcagcgtggacaccagccggaaccagttctccctgaagctgtctagcgtgacagccgccgataccgccgtgtactactgcaccagagaggacagcagcaactggcggagtagaggccagggaacactggtcacagttagctctctcgagagcggcggaggcggatctttcgaagttcagctgctggaatctggcggaggactcgttcaacctggcggctctctgagactgagctgtgccgcttctggcttcagcttctctagctacgccctgagctgggttcgacaagctcccggaaagggccttgaatgggtgtccagcatcggcgagaatgacggcaccacagactatgccgatgccgtgaaaggccggtttaccatcagcagagacaattccaagaacacgctctatctgcaaatgaactccctgcgcgtggaagatacagccgtgtattattgcgtgaaggacggcgtgcactggggacagggaaccctggttacagtgtctagcctcgaggacctgaagaacgtgttcccacctgaggtggccgtgttcgagcctagcgaggccgagatcagccacacccagaaagccaccctcgtgtgcctggctaccggcttctaccccgaccatgtggaactgtcttggtgggtcaacggcaaagaggtgcacagcggcgtgtctaccgacccccagccactgaaagaacagcccgccctgaacgacagccggtactgcctgagcagcagactgagagtgtccgccaccttctggcagaacccccggaaccacttcagatgccaggtgcagttctacggcctgagcgagaacgacgagtggacccaggacagagccaagcccgtgacccagatcgtgtctgccgaagcctggggcagagccgattgcggctttaccagcgagagctaccagcagggcgtgctgagcgccaccatcctgtacgagatcctgctgggcaaggccaccctgtacgccgtgctggtgtctgccctggtgctgatggctatggtcaagcggaaggacagccggggaagggccaagcgatctggatctggagcaacaaacttctcactactcaaacaagcaggtgacgtggaggagaatcccgggcctactagaggccatatgaccgagtacaagcccacggtgcgcctcgccacccgcgacgacgtccccagggccgtacgcaccctcgccgccgcgttcgccgactaccccgccacgcgccacaccgtcgatccggaccgccacatcgagcgggtcaccgagctgcaagaactcttcctcacgcgcgtcgggctcgacatcggcaaggtgtgggtcgcggacgacggcgccgcggtggcggtctggaccacgccggagagcgtcgaagcgggggcggtgttcgccgagatcggcccgcgcatggccgagttgagcggttcccggctggccgcgcagcaacagatggaaggcctcctggcgccgcaccggcccaaggagcccgcgtggttcctggccaccgtcggcgtctcgcccgaccaccagggcaagggtctgggcagcgccgtcgtgctccccggagtggaggcggccgagcgcgccggggtgcccgccttcctggagacctccgcgccccgcaacctccccttctacgagcggctcggcttcaccgtcaccgccgacgtcgaggtgcccgaaggaccgcgcacctggtgcatgacccgcaagcccggtgcctga

SEQ ID NO: 6578 - DNA, 2166 bp, Artificial Sequence
  Synthetic Polynucloetide
atggccttaccagtgaccgccttgctcctgccgctggccttgctgctccacgccgccaggccgcagctccagctgcaagagtctggacctggcctggtcaagcctagcgagacactgagcctgacctgtaccgtgtccggcgatagcatcagcagcggcgattactactggggctggatcagacagcctcctggcaaaggactggaatggatcggccacatctactacagcggcgtgacctactacaaccccagcctgaagtccagagtgaccatcagcgtggacaccagccggaaccagttctccctgaagctgtctagcgtgacagccgccgataccgccgtgtactactgcaccagagaggacagcagcaactggcggagtagaggccagggaacactggtcacagttagctctctcgagagcggcggaggcggatctttcgaagttcagctgctggaatctggcggaggactcgttcaacctggcggctctctgagactgagctgtgccgcttctggcttcagcttctctagctacgccctgagctgggttcgacaagctcccggaaagggccttgaatgggtgtccagcatcggcgagaatgacggcaccacagactatgccgatgccgtgaaaggccggtttaccatcagcagagacaattccaagaacacgctctatctgcaaatgaactccctgcgcgtggaagatacagccgtgtattattgcgtgaaggacggcgtgcactggggacagggaaccctggttacagtgtctagcacgcgtgagcagaaactgatctcggaagaggatctggggagcggcaccccattcccttctctggcccctcccatcatgctgctggtggacggcaagcagcagatggtggtcgtgtgcctggtgctggatgtggccccacctggactggacagccccatctggtttagcgccggcaatggctctgccctggacgcctttacctacggcccaagccctgccaccgatggcacctggacaaatctggcccacctgagcctgcccagcgaggaactggcttcttgggagcctctcgtgtgccacacaggacctggcgctgagggacacagcagatccacccagcctatgcacctgtctggcgaggccagcaccgccagaacctgtcctcaggaacctctgagaggcacccctggcggagcactgtggctgggagtgctgagactgctgctgttcaagctgctgctgtttgacctgctgctgacctgctcctgtctgtgcgatcctgccggccctctgccttctcctgccaccaccacaagactgagagccctgggcagccacagactgcaccctgccacagagacaggcggcagagaggccacaagcagccctagaccccagcccagagacagaagatggggcgataccccccctggcagaaagcctggatctccagtccgcgccaagagaagcggatctggcgtgaagcagaccctgaatttcgacctgctgaagctggctggcgacgtggaatccaacccaggcccttctagatctagaggccatatgaccgagtacaagcccacggtgcgcctcgccacccgcgacgacgtccccagggccgtacgcaccctcgccgccgcgttcgccgactaccccgccacgcgccacaccgtcgatccggaccgccacatcgagcgggtcaccgagctgcaagaactcttcctcacgcgcgtcgggctcgacatcggcaaggtgtgggtcgcggacgacggcgccgcggtggcggtctggaccacgccggagagcgtcgaagcgggggcggtgttcgccgagatcggcccgcgcatggccgagttgagcggttcccggctggccgcgcagcaacagatggaaggcctcctggcgccgcaccggcccaaggagcccgcgtggttcctggccaccgtcggcgtctcgcccgaccaccagggcaagggtctgggcagcgccgtcgtgctccccggagtggaggcggccgagcgcgccggggtgcccgccttcctggagacctccgcgccccgcaacctccccttctacgagcggctcggcttcaccgtcaccgccgacgtcgaggtgcccgaaggaccgcgcacctggtgcatgacccgcaagcccggtgcctga

SEQ ID NO: 6579 - DNA, 1650 bp, Artificial Sequence; identical to SEQ ID NO: 6506
  Synthetic Polynucloetide

SEQ ID NO: 6580 - DNA, 957 bp, Artificial Sequence; identical to SEQ ID NO: 6507
  Synthetic Polynucloetide

SEQ ID NO: 6581 - DNA, 1326 bp, Artificial Sequence
  Synthetic Polynucloetide
atggactggatttggcgcatccttttccttgtcggcgctgctaccggcgcgcattccttcgaagttcagctgctggaatctggcggaggactcgttcaacctggcggctctctgagactgagctgtgccgcttctggcttcagcttctctagctacgccctgagctgggttcgacaagctcccggaaagggccttgaatgggtgtccagcatcggcgagaatgacggcaccacagactatgccgatgccgtgaaaggccggtttaccatcagcagagacaattccaagaacacgctctatctgcaaatgaactccctgcgcgtggaagatacagccgtgtattattgcgtgaaggacggcgtgcactggggacagggaaccctggttacagtgtctagcacgcgtatccagaaccctgatcctgccgtgtaccagctgcgggatagcaagagcagcgacaagagcgtgtgtctgttcaccgacttcgacagccagaccaacgtgtcccagagcaaggactccgacgtgtacatcaccgataagaccgtgctggacatgcggagcatggacttcaagagcaactccgccgtggcctggtccaacaagtccgatttcgcctgcgccaacgccttcaacaacagcattatccccgaggacacattcttcccaagccccgagagcagctgcgacgtgaagctggtggaaaagagcttcgagacagacaccaacctgaacttccagaacctgagcgtgatcggcttcagaatcctgctgctgaaagtggccggctttaacctgctgatgaccctgcggctgtggtccagccgcgccaagagaagcggatctggcgtgaagcagaccctgaatttcgacctgctgaagctggctggcgacgtggaatccaacccaggcccttctagaggccatatggccaagcctttgtctcaagaagaatccaccctcattgaaagagcaacggctacaatcaacagcatccccatctctgaagactacagcgtcgccagcgcagctctctctagcgacggccgcatcttcactggtgtcaatgtatatcattttactgggggaccttgtgcagaactcgtggtgctgggcactgctgctgctgcggcagctggcaacctgacttgtatcgtcgcgatcggaaatgagaacaggggcatcttgagcccctgcggacggtgccgacaggtgcttctcgatctgcatcctgggatcaaagccatagtgaaggacagtgatggacagccgacggcagttgggattcgtgaattgctgccctctggttatgtgtgggagggctga

SEQ ID NO: 6582 - DNA, 825 bp, Artificial Sequence
  Synthetic Polynucloetide
atggactggatttggcgcatccttttccttgtcggcgctgctaccggcgcgcattccttcgaagttcagctgctggaatctggcggaggactcgttcaacctggcggctctctgagactgagctgtgccgcttctggcttcagcttctctagctacgccctgagctgggttcgacaagctcccggaaagggccttgaatgggtgtccagcatcggcgagaatgacggcaccacagactatgccgatgccgtgaaaggccggtttaccatcagcagagacaattccaagaacacgctctatctgcaaatgaactccctgcgcgtggaagatacagccgtgtattattgcgtgaaggacggcgtgcactggggacagggaaccctggttacagtgtctagcacgcgtatccagaaccctgatcctgccgtgtaccagctgcgggatagcaagagcagcgacaagagcgtgtgtctgttcaccgacttcgacagccagaccaacgtgtcccagagcaaggactccgacgtgtacatcaccgataagaccgtgctggacatgcggagcatggacttcaagagcaactccgccgtggcctggtccaacaagtccgatttcgcctgcgccaacgccttcaacaacagcattatccccgaggacacattcttcccaagccccgagagcagctgcgacgtgaagctggtggaaaagagcttcgagacagacaccaacctgaacttccagaacctgagcgtgatcggcttcagaatcctgctgctgaaagtggccggctttaacctgctgatgaccctgcggctgtggtccagc

SEQ ID NO: 6583 - DNA, 1704 bp, Artificial Sequence; identical to SEQ ID NO: 6510
  Synthetic Polynucloetide

SEQ ID NO: 6584 - DNA, 1014 bp, Artificial Sequence; identical to SEQ ID NO: 6511
  Synthetic Polynucloetide

SEQ ID NO: 6585 - DNA, 1362 bp, Artificial Sequence
  Synthetic Polynucloetide
atggactggatttggcgcatccttttccttgtcggcgctgctaccggcgcgcattccttcgaagttcagctgctggaatctggcggaggactcgttcaacctggcggctctctgagactgagctgtgccgcttctggcttcagcttctctagctacgccctgagctgggttcgacaagctcccggaaagggccttgaatgggtgtccagcatcggcgagaatgacggcaccacagactatgccgatgccgtgaaaggccggtttaccatcagcagagacaattccaagaacacgctctatctgcaaatgaactccctgcgcgtggaagatacagccgtgtattattgcgtgaaggacggcgtgcactggggacagggaaccctggttacagtgtctagcacgcgtgagcagaaactgatctcggaagaggatgggagcggcatccagaaccctgatcctgccgtgtaccagctgcgggatagcaagagcagcgacaagagcgtgtgtctgttcaccgacttcgacagccagaccaacgtgtcccagagcaaggactccgacgtgtacatcaccgataagtgcgtgctggacatgcggagcatggacttcaagagcaactccgccgtggcctggtccaacaagtccgatttcgcctgcgccaacgccttcaacaacagcattatccccgaggacacattcttcccaagccccgagagcagctgcgacgtgaagctggtggaaaagagcttcgagacagacaccaacctgaacttccagaacctgagcgtgatcggcttcagaatcctgctgctgaaagtggccggctttaacctgctgatgaccctgcggctgtggtccagccgcgccaagagaagcggatctggcgtgaagcagaccctgaatttcgacctgctgaagctggctggcgacgtggaatccaacccaggcccttctagaggccatatggccaagcctttgtctcaagaagaatccaccctcattgaaagagcaacggctacaatcaacagcatccccatctctgaagactacagcgtcgccagcgcagctctctctagcgacggccgcatcttcactggtgtcaatgtatatcattttactgggggaccttgtgcagaactcgtggtgctgggcactgctgctgctgcggcagctggcaacctgacttgtatcgtcgcgatcggaaatgagaacaggggcatcttgagcccctgcggacggtgccgacaggtgcttctcgatctgcatcctgggatcaaagccatagtgaaggacagtgatggacagccgacggcagttgggattcgtgaattgctgccctctggttatgtgtgggagggctga

SEQ ID NO: 6586 - DNA, 864 bp, Artificial Sequence
  Synthetic Polynucloetide
atggactggatttggcgcatccttttccttgtcggcgctgctaccggcgcgcattccttcgaagttcagctgctggaatctggcggaggactcgttcaacctggcggctctctgagactgagctgtgccgcttctggcttcagcttctctagctacgccctgagctgggttcgacaagctcccggaaagggccttgaatgggtgtccagcatcggcgagaatgacggcaccacagactatgccgatgccgtgaaaggccggtttaccatcagcagagacaattccaagaacacgctctatctgcaaatgaactccctgcgcgtggaagatacagccgtgtattattgcgtgaaggacggcgtgcactggggacagggaaccctggttacagtgtctagcacgcgtgagcagaaactgatctcggaagaggatgggagcggcatccagaaccctgatcctgccgtgtaccagctgcgggatagcaagagcagcgacaagagcgtgtgtctgttcaccgacttcgacagccagaccaacgtgtcccagagcaaggactccgacgtgtacatcaccgataagtgcgtgctggacatgcggagcatggacttcaagagcaactccgccgtggcctggtccaacaagtccgatttcgcctgcgccaacgccttcaacaacagcattatccccgaggacacattcttcccaagccccgagagcagctgcgacgtgaagctggtggaaaagagcttcgagacagacaccaacctgaacttccagaacctgagcgtgatcggcttcagaatcctgctgctgaaagtggccggctttaacctgctgatgaccctgcggctgtggtccagctga

SEQ ID NO: 6587 - DNA, 1920 bp, Artificial Sequence
  Synthetic Polynucloetide
atggccttaccagtgaccgccttgctcctgccgctggccttgctgctccacgccgccaggccgcagctccagctgcaagagtctggacctggcctggtcaagcctagcgagacactgagcctgacctgtaccgtgtccggcgatagcatcagcagcggcgattactactggggctggatcagacagcctcctggcaaaggactggaatggatcggccacatctactacagcggcgtgacctactacaaccccagcctgaagtccagagtgaccatcagcgtggacaccagccggaaccagttctccctgaagctgtctagcgtgacagccgccgataccgccgtgtactactgcaccagagaggacagcagcaactggcggagtagaggccagggaacactggtcacagttagctctctcgagagcggcggaggcggatctttcgaagttcagctgctggaatctggcggaggactcgttcaacctggcggctctctgagactgagctgtgccgcttctggcttcagcttctctagctacgccctgagctgggttcgacaagctcccggaaagggccttgaatgggtgtccagcatcggcgagaatgacggcaccacagactatgccgatgccgtgaaaggccggtttaccatcagcagagacaattccaagaacacgctctatctgcaaatgaactccctgcgcgtggaagatacagccgtgtattattgcgtgaaggacggcgtgcactggggacagggaaccctggttacagtgtctagcacgcgtgggagcggcatccagaaccctgatcctgccgtgtaccagctgcgggatagcaagagcagcgacaagagcgtgtgtctgttcaccgacttcgacagccagaccaacgtgtcccagagcaaggactccgacgtgtacatcaccgataagaccgtgctggacatgcggagcatggacttcaagagcaactccgccgtggcctggtccaacaagtccgatttcgcctgcgccaacgccttcaacaacagcattatccccgaggacacattcttcccaagcagcgacgtgccctgcgacgtgaagctggtggaaaagagcttcgagacagacaccaacctgaacttccagaacctgagcgtgatcggcttcagaatcctgctgctgaaagtggccggctttaacctgctgatgaccctgcggctgtggtccagccgcgccaagagaagcggatctggcgtgaagcagaccctgaatttcgacctgctgaagctggctggcgacgtggaatccaacccaggcccttctagaggccatatgaccgagtacaagcccacggtgcgcctcgccacccgcgacgacgtccccagggccgtacgcaccctcgccgccgcgttcgccgactaccccgccacgcgccacaccgtcgatccggaccgccacatcgagcgggtcaccgagctgcaagaactcttcctcacgcgcgtcgggctcgacatcggcaaggtgtgggtcgcggacgacggcgccgcggtggcggtctggaccacgccggagagcgtcgaagcgggggcggtgttcgccgagatcggcccgcgcatggccgagttgagcggttcccggctggccgcgcagcaacagatggaaggcctcctggcgccgcaccggcccaaggagcccgcgtggttcctggccaccgtcggcgtctcgcccgaccaccagggcaagggtctgggcagcgccgtcgtgctccccggagtggaggcggccgagcgcgccggggtgcccgccttcctggagacctccgcgccccgcaacctccccttctacgagcggctcggcttcaccgtcaccgccgacgtcgaggtgcccgaaggaccgcgcacctggtgcatgacccgcaagcccggtgcctga

SEQ ID NO: 6588 - DNA, 2016 bp, Artificial Sequence
  Synthetic Polynucloetide
atggccttaccagtgaccgccttgctcctgccgctggccttgctgctccacgccgccaggccgcagctccagctgcaagagtctggacctggcctggtcaagcctagcgagacactgagcctgacctgtaccgtgtccggcgatagcatcagcagcggcgattactactggggctggatcagacagcctcctggcaaaggactggaatggatcggccacatctactacagcggcgtgacctactacaaccccagcctgaagtccagagtgaccatcagcgtggacaccagccggaaccagttctccctgaagctgtctagcgtgacagccgccgataccgccgtgtactactgcaccagagaggacagcagcaactggcggagtagaggccagggaacactggtcacagttagctctctcgagagcggcggaggcggatctttcgaagttcagctgctggaatctggcggaggactcgttcaacctggcggctctctgagactgagctgtgccgcttctggcttcagcttctctagctacgccctgagctgggttcgacaagctcccggaaagggccttgaatgggtgtccagcatcggcgagaatgacggcaccacagactatgccgatgccgtgaaaggccggtttaccatcagcagagacaattccaagaacacgctctatctgcaaatgaactccctgcgcgtggaagatacagccgtgtattattgcgtgaaggacggcgtgcactggggacagggaaccctggttacagtgtctagcctcgaggacctgaagaacgtgttcccacctgaggtggccgtgttcgagcctagcaaggccgagatcgcccacacccagaaagccaccctcgtgtgcctggctaccggcttctaccccgaccatgtggaactgtcttggtgggtcaacggcaaagaggtgcacagcggcgtgtctaccgacccccagccactgaaagaacagcccgccctgaacgacagccggtactgcctgagcagcagactgagagtgtccgccaccttctggcagaacccccggaaccacttcagatgccaggtgcagttctacggcctgagcgagaacgacgagtggacccaggacagagccaagcccgtgacccagatcgtgtctgccgaagcctggggcagagccgattgcggcatcaccagcgccagctaccaccagggcgtgctgagcgccaccatcctgtacgagatcctgctgggcaaggccaccctgtacgccgtgctggtgtctgccctggtgctgatggctatggtcaagcggaaggacagccggggaagggccaagcgatctggatctggagcaacaaacttctcactactcaaacaagcaggtgacgtggaggagaatcccgggcctactagaggccatatgaccgagtacaagcccacggtgcgcctcgccacccgcgacgacgtccccagggccgtacgcaccctcgccgccgcgttcgccgactaccccgccacgcgccacaccgtcgatccggaccgccacatcgagcgggtcaccgagctgcaagaactcttcctcacgcgcgtcgggctcgacatcggcaaggtgtgggtcgcggacgacggcgccgcggtggcggtctggaccacgccggagagcgtcgaagcgggggcggtgttcgccgagatcggcccgcgcatggccgagttgagcggttcccggctggccgcgcagcaacagatggaaggcctcctggcgccgcaccggcccaaggagcccgcgtggttcctggccaccgtcggcgtctcgcccgaccaccagggcaagggtctgggcagcgccgtcgtgctccccggagtggaggcggccgagcgcgccggggtgcccgccttcctggagacctccgcgccccgcaacctccccttctacgagcggctcggcttcaccgtcaccgccgacgtcgaggtgcccgaaggaccgcgcacctggtgcatgacccgcaagcccggtgcctga

SEQ ID NO: 6589 - DNA, 2085 bp, Artificial Sequence
  Synthetic Polynucloetide
atggccttaccagtgaccgccttgctcctgccgctggccttgctgctccacgccgccaggccgcagctccagctgcaagagtctggacctggcctggtcaagcctagcgagacactgagcctgacctgtaccgtgtccggcgatagcatcagcagcggcgattactactggggctggatcagacagcctcctggcaaaggactggaatggatcggccacatctactacagcggcgtgacctactacaaccccagcctgaagtccagagtgaccatcagcgtggacaccagccggaaccagttctccctgaagctgtctagcgtgacagccgccgataccgccgtgtactactgcaccagagaggacagcagcaactggcggagtagaggccagggaacactggtcacagttagctctctcgagagcggcggaggcggatctttcgaagttcagctgctggaatctggcggaggactcgttcaacctggcggctctctgagactgagctgtgccgcttctggcttcagcttctctagctacgccctgagctgggttcgacaagctcccggaaagggccttgaatgggtgtccagcatcggcgagaatgacggcaccacagactatgccgatgccgtgaaaggccggtttaccatcagcagagacaattccaagaacacgctctatctgcaaatgaactccctgcgcgtggaagatacagccgtgtattattgcgtgaaggacggcgtgcactggggacagggaaccctggttacagtgtctagcacgcgtgggtctggaggcggaggcagcggcggaggcgggagcggcgacggtaacgaggagatgggaggaatcactcaaaccccttacaaagtctcaatttcaggaacaactgttatccttacatgtccccagtatcctggcagcgagatcctttggcagcataacgacaagaatatagggggagatgaagacgataagaatatcggatctgacgaggatcacttgagcctgaaagagttctccgagcttgaacaaagcggatattatgtgtgctatccgcgcgggtcaaagccggaagacgctaacttttacctttatctccgagccagagtgtgcgaaaattgcatggaaatggacgttatgtccgttgctacaatagttatcgtagatatatgcatcacgggtggactgcttctgctggtttattattggtccaagaatagaaaggccaaagctaaacccgtgaccagaggcgctggcgcaggcggaaggcaaaggggacaaaacaaagaacggccaccaccagtgccaaatccagattatgagcctattcggaaaggacagagggacctgtactctggcctgaatcagagaagaatccgcgccaagagaagcggatctggcgtgaagcagaccctgaatttcgacctgctgaagctggctggcgacgtggaatccaacccaggcccttctagaggccatatgaccgagtacaagcccacggtgcgcctcgccacccgcgacgacgtccccagggccgtacgcaccctcgccgccgcgttcgccgactaccccgccacgcgccacaccgtcgatccggaccgccacatcgagcgggtcaccgagctgcaagaactcttcctcacgcgcgtcgggctcgacatcggcaaggtgtgggtcgcggacgacggcgccgcggtggcggtctggaccacgccggagagcgtcgaagcgggggcggtgttcgccgagatcggcccgcgcatggccgagttgagcggttcccggctggccgcgcagcaacagatggaaggcctcctggcgccgcaccggcccaaggagcccgcgtggttcctggccaccgtcggcgtctcgcccgaccaccagggcaagggtctgggcagcgccgtcgtgctccccggagtggaggcggccgagcgcgccggggtgcccgccttcctggagacctccgcgccccgcaacctccccttctacgagcggctcggcttcaccgtcaccgccgacgtcgaggtgcccgaaggaccgcgcacctggtgcatgacccgcaagcccggtgcctga

SEQ ID NO: 6590 - DNA, 1980 bp, Artificial Sequence
  Synthetic Polynucloetide
atggccttaccagtgaccgccttgctcctgccgctggccttgctgctccacgccgccaggccgcagctccagctgcaagagtctggacctggcctggtcaagcctagcgagacactgagcctgacctgtaccgtgtccggcgatagcatcagcagcggcgattactactggggctggatcagacagcctcctggcaaaggactggaatggatcggccacatctactacagcggcgtgacctactacaaccccagcctgaagtccagagtgaccatcagcgtggacaccagccggaaccagttctccctgaagctgtctagcgtgacagccgccgataccgccgtgtactactgcaccagagaggacagcagcaactggcggagtagaggccagggaacactggtcacagttagctctctcgagagcggcggaggcggatctttcgaagttcagctgctggaatctggcggaggactcgttcaacctggcggctctctgagactgagctgtgccgcttctggcttcagcttctctagctacgccctgagctgggttcgacaagctcccggaaagggccttgaatgggtgtccagcatcggcgagaatgacggcaccacagactatgccgatgccgtgaaaggccggtttaccatcagcagagacaattccaagaacacgctctatctgcaaatgaactccctgcgcgtggaagatacagccgtgtattattgcgtgaaggacggcgtgcactggggacagggaaccctggttacagtgtctagcacgcgtgggtctggaggcggaggcagcggcggaggcgggagcggcttcaagatccccatcgaggaactggaagatcgggtgttcgtgaactgcaacacctctatcacctgggtggaaggcaccgtgggaacactgctgagcgacatcaccagactggacctcggcaagcggattctggaccctcggggcatctacagatgcaacggcaccgacatctacaaggacaaagaaagcaccgtgcaggtccactacagaatgtgccagtcctgcgtggaactggaccctgctacagtggccggcatcatcgtgaccgatgtgatcgctactctgctgctggctctgggagtgttctgcttcgccggacacgaaacaggcagactgtctggcgctgccgatacacaggccctgctgagaaacgaccaagtgtatcagcccctgcgcgacagagatgatgcccagtattctcacctcggcggcaactgggctagaaacaagcgcgccaagagaagcggatctggcgtgaagcagaccctgaatttcgacctgctgaagctggctggcgacgtggaatccaacccaggcccttctagaggccatatgaccgagtacaagcccacggtgcgcctcgccacccgcgacgacgtccccagggccgtacgcaccctcgccgccgcgttcgccgactaccccgccacgcgccacaccgtcgatccggaccgccacatcgagcgggtcaccgagctgcaagaactcttcctcacgcgcgtcgggctcgacatcggcaaggtgtgggtcgcggacgacggcgccgcggtggcggtctggaccacgccggagagcgtcgaagcgggggcggtgttcgccgagatcggcccgcgcatggccgagttgagcggttcccggctggccgcgcagcaacagatggaaggcctcctggcgccgcaccggcccaaggagcccgcgtggttcctggccaccgtcggcgtctcgcccgaccaccagggcaagggtctgggcagcgccgtcgtgctccccggagtggaggcggccgagcgcgccggggtgcccgccttcctggagacctccgcgccccgcaacctccccttctacgagcggctcggcttcaccgtcaccgccgacgtcgaggtgcccgaaggaccgcgcacctggtgcatgacccgcaagcccggtgcctga

SEQ ID NO: 6591 - DNA, 2010 bp, Artificial Sequence
  Synthetic Polynucloetide
atggccttaccagtgaccgccttgctcctgccgctggccttgctgctccacgccgccaggccgcagctccagctgcaagagtctggacctggcctggtcaagcctagcgagacactgagcctgacctgtaccgtgtccggcgatagcatcagcagcggcgattactactggggctggatcagacagcctcctggcaaaggactggaatggatcggccacatctactacagcggcgtgacctactacaaccccagcctgaagtccagagtgaccatcagcgtggacaccagccggaaccagttctccctgaagctgtctagcgtgacagccgccgataccgccgtgtactactgcaccagagaggacagcagcaactggcggagtagaggccagggaacactggtcacagttagctctctcgagagcggcggaggcggatctttcgaagttcagctgctggaatctggcggaggactcgttcaacctggcggctctctgagactgagctgtgccgcttctggcttcagcttctctagctacgccctgagctgggttcgacaagctcccggaaagggccttgaatgggtgtccagcatcggcgagaatgacggcaccacagactatgccgatgccgtgaaaggccggtttaccatcagcagagacaattccaagaacacgctctatctgcaaatgaactccctgcgcgtggaagatacagccgtgtattattgcgtgaaggacggcgtgcactggggacagggaaccctggttacagtgtctagcacgcgtgggtctggaggcggaggcagcggcggaggcgggagcggccagagcatcaagggcaaccacctggtcaaggtgtacgactaccaagaggacggcagcgtgctgctgacatgtgatgccgaggccaagaacatcacctggtttaaggacggcaagatgatcggcttcctgaccgaggacaagaagaagtggaacctgggcagcaacgctaaggaccccagaggcatgtatcagtgcaagggcagccagaacaagagcaagcccctccaggtgtactaccggatgtgccagaactgcatcgagctgaacgccgctaccatcagcggctttctgttcgccgagatcgtgtccatcttcgtgctggccgtgggcgtgtactttatcgctggacaggatggcgtgcggcagagcagagcttccgataagcaaaccctgctgcctaacgaccagctgtaccagcctctgaaggacagagaggacgaccagtacagccacctccagggcaatcagctgagaagaaaccgcgccaagagaagcggatctggcgtgaagcagaccctgaatttcgacctgctgaagctggctggcgacgtggaatccaacccaggcccttctagaggccatatgaccgagtacaagcccacggtgcgcctcgccacccgcgacgacgtccccagggccgtacgcaccctcgccgccgcgttcgccgactaccccgccacgcgccacaccgtcgatccggaccgccacatcgagcgggtcaccgagctgcaagaactcttcctcacgcgcgtcgggctcgacatcggcaaggtgtgggtcgcggacgacggcgccgcggtggcggtctggaccacgccggagagcgtcgaagcgggggcggtgttcgccgagatcggcccgcgcatggccgagttgagcggttcccggctggccgcgcagcaacagatggaaggcctcctggcgccgcaccggcccaaggagcccgcgtggttcctggccaccgtcggcgtctcgcccgaccaccagggcaagggtctgggcagcgccgtcgtgctccccggagtggaggcggccgagcgcgccggggtgcccgccttcctggagacctccgcgccccgcaacctccccttctacgagcggctcggcttcaccgtcaccgccgacgtcgaggtgcccgaaggaccgcgcacctggtgcatgacccgcaagcccggtgcctga

SEQ ID NO: 6592 - DNA, 1959 bp, Artificial Sequence
  Synthetic Polynucloetide
atggccttaccagtgaccgccttgctcctgccgctggccttgctgctccacgccgccaggccgcagctccagctgcaagagtctggacctggcctggtcaagcctagcgagacactgagcctgacctgtaccgtgtccggcgatagcatcagcagcggcgattactactggggctggatcagacagcctcctggcaaaggactggaatggatcggccacatctactacagcggcgtgacctactacaaccccagcctgaagtccagagtgaccatcagcgtggacaccagccggaaccagttctccctgaagctgtctagcgtgacagccgccgataccgccgtgtactactgcaccagagaggacagcagcaactggcggagtagaggccagggaacactggtcacagttagctctctcgagagcggcggaggcggatctttcgaagttcagctgctggaatctggcggaggactcgttcaacctggcggctctctgagactgagctgtgccgcttctggcttcagcttctctagctacgccctgagctgggttcgacaagctcccggaaagggccttgaatgggtgtccagcatcggcgagaatgacggcaccacagactatgccgatgccgtgaaaggccggtttaccatcagcagagacaattccaagaacacgctctatctgcaaatgaactccctgcgcgtggaagatacagccgtgtattattgcgtgaaggacggcgtgcactggggacagggaaccctggttacagtgtctagcacgcgtgggtctggaggcggaggcagcggcggaggcgggagcggccagagttttgggttgttggaccctaaattgtgctatctgttggacggaatcctgttcatttacggagtgatcctgaccgcattgttcctgcgggttaagttttccagatccgcagacgcacccgcttaccaacaagggcagaaccaactctacaatgaacttaatttggggcggagggaagagtacgacgttctggacaaaaggaggggacgagatcccgagatgggcggaaagcctcagcgaaggaagaatccgcaagaggggctttataacgaactccagaaagataaaatggcagaagcctatagtgagattgggatgaagggagaaaggaggaggggtaaaggtcacgatgggttgtaccaaggattgagcacagccactaaagatacctatgatgcgctccacatgcaggccctgccgccaagacgcgccaagagaagcggatctggcgtgaagcagaccctgaatttcgacctgctgaagctggctggcgacgtggaatccaacccaggcccttctagaggccatatgaccgagtacaagcccacggtgcgcctcgccacccgcgacgacgtccccagggccgtacgcaccctcgccgccgcgttcgccgactaccccgccacgcgccacaccgtcgatccggaccgccacatcgagcgggtcaccgagctgcaagaactcttcctcacgcgcgtcgggctcgacatcggcaaggtgtgggtcgcggacgacggcgccgcggtggcggtctggaccacgccggagagcgtcgaagcgggggcggtgttcgccgagatcggcccgcgcatggccgagttgagcggttcccggctggccgcgcagcaacagatggaaggcctcctggcgccgcaccggcccaaggagcccgcgtggttcctggccaccgtcggcgtctcgcccgaccaccagggcaagggtctgggcagcgccgtcgtgctccccggagtggaggcggccgagcgcgccggggtgcccgccttcctggagacctccgcgccccgcaacctccccttctacgagcggctcggcttcaccgtcaccgccgacgtcgaggtgcccgaaggaccgcgcacctggtgcatgacccgcaagcccggtgcctga

SEQ ID NO: 6593 - DNA, 2583 bp, Artificial Sequence
  Synthetic Polynucloetide
atggccttaccagtgaccgccttgctcctgccgctggccttgctgctccacgccgccaggccgcagctccagctgcaagagtctggacctggcctggtcaagcctagcgagacactgagcctgacctgtaccgtgtccggcgatagcatcagcagcggcgattactactggggctggatcagacagcctcctggcaaaggactggaatggatcggccacatctactacagcggcgtgacctactacaaccccagcctgaagtccagagtgaccatcagcgtggacaccagccggaaccagttctccctgaagctgtctagcgtgacagccgccgataccgccgtgtactactgcaccagagaggacagcagcaactggcggagtagaggccagggaacactggtcacagttagctctctcgagggacagcctaaggccaatcctaccgtgacactgttccctccaagcagcgaagaactccaggccaacaaggccacacttgtgtgcctgatctccgacttctaccctggggctgtgacagtggcttggaaggccgatggatctcctgtgaaagccggcgtggaaaccaccaagccatccaagcagagcaacaacaaatacgccgccagctcctacctgagcctgacacctgagcagtggaagtcccacagatcctacagctgccaagtgacccacgaaggcagcaccgtggaaaagacagtggcccctacagagtgcagcggcagagccgattgcggctttaccagcgagagctaccagcagggcgtgctgagcgccaccatcctgtacgagatcctgctgggcaaggccaccctgtacgccgtgctggtgtctgccctggtgctgatggctatggtcaagcggaaggacagccggggaagggccaagcgatctggatctggagcaacaaacttctcactactcaaacaagcaggtgacgtggaggagaatcccgggcctactagtatggactggatttggcgcatccttttccttgtcggcgctgctaccggcgcgcattccttcgaagttcagctgctggaatctggcggaggactcgttcaacctggcggctctctgagactgagctgtgccgcttctggcttcagcttctctagctacgccctgagctgggttcgacaagctcccggaaagggccttgaatgggtgtccagcatcggcgagaatgacggcaccacagactatgccgatgccgtgaaaggccggtttaccatcagcagagacaattccaagaacacgctctatctgcaaatgaactccctgcgcgtggaagatacagccgtgtattattgcgtgaaggacggcgtgcactggggacagggaaccctggttacagtgtctagcacgcgtgcctctacaaagggaccctccgtgtttcctctggctcccagcagcaagtctacaagcggaggaacagccgctctgggctgcctggtcaaggattactttcccgagcctgtgaccgtgtcctggaatagcggagcactgacaagcggcgtgcacacctttccagccgtgctgcaaagcagcggcctgtactctctgagcagcgtggtcacagtgcctagctctagcctgggcacccagacctacatctgcaatgtgaaccacaagcctagcaacaccaaggtggacaagagagtggaacccaagagctgtatccccgaggacacattcttcccaagccccgagagcagctgcgacgtgaagctggtggaaaagagcttcgagacagacaccaacctgaacttccagaacctgagcgtgatcggcttcagaatcctgctgctgaaagtggccggctttaacctgctgatgaccctgcggctgtggtccagccgcgccaagagaagcggatctggcgtgaagcagaccctgaatttcgacctgctgaagctggctggcgacgtggaatccaacccaggcccttctagaggccatatgaccgagtacaagcccacggtgcgcctcgccacccgcgacgacgtccccagggccgtacgcaccctcgccgccgcgttcgccgactaccccgccacgcgccacaccgtcgatccggaccgccacatcgagcgggtcaccgagctgcaagaactcttcctcacgcgcgtcgggctcgacatcggcaaggtgtgggtcgcggacgacggcgccgcggtggcggtctggaccacgccggagagcgtcgaagcgggggcggtgttcgccgagatcggcccgcgcatggccgagttgagcggttcccggctggccgcgcagcaacagatggaaggcctcctggcgccgcaccggcccaaggagcccgcgtggttcctggccaccgtcggcgtctcgcccgaccaccagggcaagggtctgggcagcgccgtcgtgctccccggagtggaggcggccgagcgcgccggggtgcccgccttcctggagacctccgcgccccgcaacctccccttctacgagcggctcggcttcaccgtcaccgccgacgtcgaggtgcccgaaggaccgcgcacctggtgcatgacccgcaagcccggtgcctga

SEQ ID NO: 6594 - DNA, 1881 bp, Artificial Sequence; identical to SEQ ID NO: 6567
  Synthetic Polynucloetide

SEQ ID NO: 6595 - DNA, 1968 bp, Artificial Sequence
  Synthetic Polynucloetide
atggccttaccagtgaccgccttgctcctgccgctggccttgctgctccacgccgccaggccgcagctccagctgcaagagtctggacctggcctggtcaagcctagcgagacactgagcctgacctgtaccgtgtccggcgatagcatcagcagcggcgattactactggggctggatcagacagcctcctggcaaaggactggaatggatcggccacatctactacagcggcgtgacctactacaaccccagcctgaagtccagagtgaccatcagcgtggacaccagccggaaccagttctccctgaagctgtctagcgtgacagccgccgataccgccgtgtactactgcaccagagaggacagcagcaactggcggagtagaggccagggaacactggtcacagttagctctctcgagggatctggcagagccgattgcggctttaccagcgagagctaccagcagggcgtgctgagcgccaccatcctgtacgagatcctgctgggcaaggccaccctgtacgccgtgctggtgtctgccctggtgctgatggctatggtcaagcggaaggacagccggggaagggccaagcgatctggatctggagcaacaaacttctcactactcaaacaagcaggtgacgtggaggagaatcccgggcctactagtatggactggatttggcgcatccttttccttgtcggcgctgctaccggcgcgcattccttcgaagttcagctgctggaatctggcggaggactcgttcaacctggcggctctctgagactgagctgtgccgcttctggcttcagcttctctagctacgccctgagctgggttcgacaagctcccggaaagggccttgaatgggtgtccagcatcggcgagaatgacggcaccacagactatgccgatgccgtgaaaggccggtttaccatcagcagagacaattccaagaacacgctctatctgcaaatgaactccctgcgcgtggaagatacagccgtgtattattgcgtgaaggacggcgtgcactggggacagggaaccctggttacagtgtctagcacgcgtggcagcatccccgaggacacattcttcccaagccccgagagcagctgcgacgtgaagctggtggaaaagagcttcgagacagacaccaacctgaacttccagaacctgagcgtgatcggcttcagaatcctgctgctgaaagtggccggctttaacctgctgatgaccctgcggctgtggtccagccgcgccaagagaagcggatctggcgtgaagcagaccctgaatttcgacctgctgaagctggctggcgacgtggaatccaacccaggcccttctagaggccatatgaccgagtacaagcccacggtgcgcctcgccacccgcgacgacgtccccagggccgtacgcaccctcgccgccgcgttcgccgactaccccgccacgcgccacaccgtcgatccggaccgccacatcgagcgggtcaccgagctgcaagaactcttcctcacgcgcgtcgggctcgacatcggcaaggtgtgggtcgcggacgacggcgccgcggtggcggtctggaccacgccggagagcgtcgaagcgggggcggtgttcgccgagatcggcccgcgcatggccgagttgagcggttcccggctggccgcgcagcaacagatggaaggcctcctggcgccgcaccggcccaaggagcccgcgtggttcctggccaccgtcggcgtctcgcccgaccaccagggcaagggtctgggcagcgccgtcgtgctccccggagtggaggcggccgagcgcgccggggtgcccgccttcctggagacctccgcgccccgcaacctccccttctacgagcggctcggcttcaccgtcaccgccgacgtcgaggtgcccgaaggaccgcgcacctggtgcatgacccgcaagcccggtgcctga

SEQ ID NO: 6596 - DNA, 1266 bp, Artificial Sequence
  Synthetic Polynucloetide
atggccttaccagtgaccgccttgctcctgccgctggccttgctgctccacgccgccaggccgcagctccagctgcaagagtctggacctggcctggtcaagcctagcgagacactgagcctgacctgtaccgtgtccggcgatagcatcagcagcggcgattactactggggctggatcagacagcctcctggcaaaggactggaatggatcggccacatctactacagcggcgtgacctactacaaccccagcctgaagtccagagtgaccatcagcgtggacaccagccggaaccagttctccctgaagctgtctagcgtgacagccgccgataccgccgtgtactactgcaccagagaggacagcagcaactggcggagtagaggccagggaacactggtcacagttagctctctcgagggatctggcagagccgattgcggctttaccagcgagagctaccagcagggcgtgctgagcgccaccatcctgtacgagatcctgctgggcaaggccaccctgtacgccgtgctggtgtctgccctggtgctgatggctatggtcaagcggaaggacagccggggaagggccaagcgatctggatctggagcaacaaacttctcactactcaaacaagcaggtgacgtggaggagaatcccgggcctactagtatggactggatttggcgcatccttttccttgtcggcgctgctaccggcgcgcattccttcgaagttcagctgctggaatctggcggaggactcgttcaacctggcggctctctgagactgagctgtgccgcttctggcttcagcttctctagctacgccctgagctgggttcgacaagctcccggaaagggccttgaatgggtgtccagcatcggcgagaatgacggcaccacagactatgccgatgccgtgaaaggccggtttaccatcagcagagacaattccaagaacacgctctatctgcaaatgaactccctgcgcgtggaagatacagccgtgtattattgcgtgaaggacggcgtgcactggggacagggaaccctggttacagtgtctagcacgcgtggcagcatccccgaggacacattcttcccaagccccgagagcagctgcgacgtgaagctggtggaaaagagcttcgagacagacaccaacctgaacttccagaacctgagcgtgatcggcttcagaatcctgctgctgaaagtggccggctttaacctgctgatgaccctgcggctgtggtccagc

SEQ ID NO: 6597 - DNA, 1995 bp, Artificial Sequence
  Synthetic Polynucloetide
atggccttaccagtgaccgccttgctcctgccgctggccttgctgctccacgccgccaggccgcagctccagctgcaagagtctggacctggcctggtcaagcctagcgagacactgagcctgacctgtaccgtgtccggcgatagcatcagcagcggcgattactactggggctggatcagacagcctcctggcaaaggactggaatggatcggccacatctactacagcggcgtgacctactacaaccccagcctgaagtccagagtgaccatcagcgtggacaccagccggaaccagttctccctgaagctgtctagcgtgacagccgccgataccgccgtgtactactgcaccagagaggacagcagcaactggcggagtagaggccagggaacactggtcacagttagctctctcgaggacaaaactcacacatgcccaccgtgcccagcaggcagagccgattgcggctttaccagcgagagctaccagcagggcgtgctgagcgccaccatcctgtacgagatcctgctgggcaaggccaccctgtacgccgtgctggtgtctgccctggtgctgatggctatggtcaagcggaaggacagccggggaagggccaagcgatctggatctggagcaacaaacttctcactactcaaacaagcaggtgacgtggaggagaatcccgggcctactagtatggactggatttggcgcatccttttccttgtcggcgctgctaccggcgcgcattccttcgaagttcagctgctggaatctggcggaggactcgttcaacctggcggctctctgagactgagctgtgccgcttctggcttcagcttctctagctacgccctgagctgggttcgacaagctcccggaaagggccttgaatgggtgtccagcatcggcgagaatgacggcaccacagactatgccgatgccgtgaaaggccggtttaccatcagcagagacaattccaagaacacgctctatctgcaaatgaactccctgcgcgtggaagatacagccgtgtattattgcgtgaaggacggcgtgcactggggacagggaaccctggttacagtgtctagcacgcgtggcagcatccccgaggacacattcttcccaagccccgagagcagctgcgacgtgaagctggtggaaaagagcttcgagacagacaccaacctgaacttccagaacctgagcgtgatcggcttcagaatcctgctgctgaaagtggccggctttaacctgctgatgaccctgcggctgtggtccagccgcgccaagagaagcggatctggcgtgaagcagaccctgaatttcgacctgctgaagctggctggcgacgtggaatccaacccaggcccttctagaggccatatgaccgagtacaagcccacggtgcgcctcgccacccgcgacgacgtccccagggccgtacgcaccctcgccgccgcgttcgccgactaccccgccacgcgccacaccgtcgatccggaccgccacatcgagcgggtcaccgagctgcaagaactcttcctcacgcgcgtcgggctcgacatcggcaaggtgtgggtcgcggacgacggcgccgcggtggcggtctggaccacgccggagagcgtcgaagcgggggcggtgttcgccgagatcggcccgcgcatggccgagttgagcggttcccggctggccgcgcagcaacagatggaaggcctcctggcgccgcaccggcccaaggagcccgcgtggttcctggccaccgtcggcgtctcgcccgaccaccagggcaagggtctgggcagcgccgtcgtgctccccggagtggaggcggccgagcgcgccggggtgcccgccttcctggagacctccgcgccccgcaacctccccttctacgagcggctcggcttcaccgtcaccgccgacgtcgaggtgcccgaaggaccgcgcacctggtgcatgacccgcaagcccggtgcctga

SEQ ID NO: 6598 - DNA, 1995 bp, Artificial Sequence
  Synthetic Polynucloetide
atggccttaccagtgaccgccttgctcctgccgctggccttgctgctccacgccgccaggccgcagctccagctgcaagagtctggacctggcctggtcaagcctagcgagacactgagcctgacctgtaccgtgtccggcgatagcatcagcagcggcgattactactggggctggatcagacagcctcctggcaaaggactggaatggatcggccacatctactacagcggcgtgacctactacaaccccagcctgaagtccagagtgaccatcagcgtggacaccagccggaaccagttctccctgaagctgtctagcgtgacagccgccgataccgccgtgtactactgcaccagagaggacagcagcaactggcggagtagaggccagggaacactggtcacagttagctctctcgagggatctggcagagccgattgcggctttaccagcgagagctaccagcagggcgtgctgagcgccaccatcctgtacgagatcctgctgggcaaggccaccctgtacgccgtgctggtgtctgccctggtgctgatggctatggtcaagcggaaggacagccggggaagggccaagcgatctggatctggagcaacaaacttctcactactcaaacaagcaggtgacgtggaggagaatcccgggcctactagtatggactggatttggcgcatccttttccttgtcggcgctgctaccggcgcgcattccttcgaagttcagctgctggaatctggcggaggactcgttcaacctggcggctctctgagactgagctgtgccgcttctggcttcagcttctctagctacgccctgagctgggttcgacaagctcccggaaagggccttgaatgggtgtccagcatcggcgagaatgacggcaccacagactatgccgatgccgtgaaaggccggtttaccatcagcagagacaattccaagaacacgctctatctgcaaatgaactccctgcgcgtggaagatacagccgtgtattattgcgtgaaggacggcgtgcactggggacagggaaccctggttacagtgtctagcacgcgtgataaaactcatacctgtccgccatgcccggcaatccccgaggacacattcttcccaagccccgagagcagctgcgacgtgaagctggtggaaaagagcttcgagacagacaccaacctgaacttccagaacctgagcgtgatcggcttcagaatcctgctgctgaaagtggccggctttaacctgctgatgaccctgcggctgtggtccagccgcgccaagagaagcggatctggcgtgaagcagaccctgaatttcgacctgctgaagctggctggcgacgtggaatccaacccaggcccttctagaggccatatgaccgagtacaagcccacggtgcgcctcgccacccgcgacgacgtccccagggccgtacgcaccctcgccgccgcgttcgccgactaccccgccacgcgccacaccgtcgatccggaccgccacatcgagcgggtcaccgagctgcaagaactcttcctcacgcgcgtcgggctcgacatcggcaaggtgtgggtcgcggacgacggcgccgcggtggcggtctggaccacgccggagagcgtcgaagcgggggcggtgttcgccgagatcggcccgcgcatggccgagttgagcggttcccggctggccgcgcagcaacagatggaaggcctcctggcgccgcaccggcccaaggagcccgcgtggttcctggccaccgtcggcgtctcgcccgaccaccagggcaagggtctgggcagcgccgtcgtgctccccggagtggaggcggccgagcgcgccggggtgcccgccttcctggagacctccgcgccccgcaacctccccttctacgagcggctcggcttcaccgtcaccgccgacgtcgaggtgcccgaaggaccgcgcacctggtgcatgacccgcaagcccggtgcctga

SEQ ID NO: 6599 - DNA, 2022 bp, Artificial Sequence
  Synthetic Polynucloetide
atggccttaccagtgaccgccttgctcctgccgctggccttgctgctccacgccgccaggccgcagctccagctgcaagagtctggacctggcctggtcaagcctagcgagacactgagcctgacctgtaccgtgtccggcgatagcatcagcagcggcgattactactggggctggatcagacagcctcctggcaaaggactggaatggatcggccacatctactacagcggcgtgacctactacaaccccagcctgaagtccagagtgaccatcagcgtggacaccagccggaaccagttctccctgaagctgtctagcgtgacagccgccgataccgccgtgtactactgcaccagagaggacagcagcaactggcggagtagaggccagggaacactggtcacagttagctctctcgaggacaaaactcacacatgcccaccgtgcccagcaggcagagccgattgcggctttaccagcgagagctaccagcagggcgtgctgagcgccaccatcctgtacgagatcctgctgggcaaggccaccctgtacgccgtgctggtgtctgccctggtgctgatggctatggtcaagcggaaggacagccggggaagggccaagcgatctggatctggagcaacaaacttctcactactcaaacaagcaggtgacgtggaggagaatcccgggcctactagtatggactggatttggcgcatccttttccttgtcggcgctgctaccggcgcgcattccttcgaagttcagctgctggaatctggcggaggactcgttcaacctggcggctctctgagactgagctgtgccgcttctggcttcagcttctctagctacgccctgagctgggttcgacaagctcccggaaagggccttgaatgggtgtccagcatcggcgagaatgacggcaccacagactatgccgatgccgtgaaaggccggtttaccatcagcagagacaattccaagaacacgctctatctgcaaatgaactccctgcgcgtggaagatacagccgtgtattattgcgtgaaggacggcgtgcactggggacagggaaccctggttacagtgtctagcacgcgtgataaaactcatacctgtccgccatgcccggcaatccccgaggacacattcttcccaagccccgagagcagctgcgacgtgaagctggtggaaaagagcttcgagacagacaccaacctgaacttccagaacctgagcgtgatcggcttcagaatcctgctgctgaaagtggccggctttaacctgctgatgaccctgcggctgtggtccagccgcgccaagagaagcggatctggcgtgaagcagaccctgaatttcgacctgctgaagctggctggcgacgtggaatccaacccaggcccttctagaggccatatgaccgagtacaagcccacggtgcgcctcgccacccgcgacgacgtccccagggccgtacgcaccctcgccgccgcgttcgccgactaccccgccacgcgccacaccgtcgatccggaccgccacatcgagcgggtcaccgagctgcaagaactcttcctcacgcgcgtcgggctcgacatcggcaaggtgtgggtcgcggacgacggcgccgcggtggcggtctggaccacgccggagagcgtcgaagcgggggcggtgttcgccgagatcggcccgcgcatggccgagttgagcggttcccggctggccgcgcagcaacagatggaaggcctcctggcgccgcaccggcccaaggagcccgcgtggttcctggccaccgtcggcgtctcgcccgaccaccagggcaagggtctgggcagcgccgtcgtgctccccggagtggaggcggccgagcgcgccggggtgcccgccttcctggagacctccgcgccccgcaacctccccttctacgagcggctcggcttcaccgtcaccgccgacgtcgaggtgcccgaaggaccgcgcacctggtgcatgacccgcaagcccggtgcctga

SEQ ID NO: 6600 - DNA, 1320 bp, Artificial Sequence
  Synthetic Polynucloetide
atggccttaccagtgaccgccttgctcctgccgctggccttgctgctccacgccgccaggccgcagctccagctgcaagagtctggacctggcctggtcaagcctagcgagacactgagcctgacctgtaccgtgtccggcgatagcatcagcagcggcgattactactggggctggatcagacagcctcctggcaaaggactggaatggatcggccacatctactacagcggcgtgacctactacaaccccagcctgaagtccagagtgaccatcagcgtggacaccagccggaaccagttctccctgaagctgtctagcgtgacagccgccgataccgccgtgtactactgcaccagagaggacagcagcaactggcggagtagaggccagggaacactggtcacagttagctctctcgaggacaaaactcacacatgcccaccgtgcccagcaggcagagccgattgcggctttaccagcgagagctaccagcagggcgtgctgagcgccaccatcctgtacgagatcctgctgggcaaggccaccctgtacgccgtgctggtgtctgccctggtgctgatggctatggtcaagcggaaggacagccggggaagggccaagcgatctggatctggagcaacaaacttctcactactcaaacaagcaggtgacgtggaggagaatcccgggcctactagtatggactggatttggcgcatccttttccttgtcggcgctgctaccggcgcgcattccttcgaagttcagctgctggaatctggcggaggactcgttcaacctggcggctctctgagactgagctgtgccgcttctggcttcagcttctctagctacgccctgagctgggttcgacaagctcccggaaagggccttgaatgggtgtccagcatcggcgagaatgacggcaccacagactatgccgatgccgtgaaaggccggtttaccatcagcagagacaattccaagaacacgctctatctgcaaatgaactccctgcgcgtggaagatacagccgtgtattattgcgtgaaggacggcgtgcactggggacagggaaccctggttacagtgtctagcacgcgtgataaaactcatacctgtccgccatgcccggcaatccccgaggacacattcttcccaagccccgagagcagctgcgacgtgaagctggtggaaaagagcttcgagacagacaccaacctgaacttccagaacctgagcgtgatcggcttcagaatcctgctgctgaaagtggccggctttaacctgctgatgaccctgcggctgtggtccagc

SEQ ID NO: 6601 - DNA, 1293 bp, Artificial Sequence
  Synthetic Polynucloetide
atggccttaccagtgaccgccttgctcctgccgctggccttgctgctccacgccgccaggccgcagctccagctgcaagagtctggacctggcctggtcaagcctagcgagacactgagcctgacctgtaccgtgtccggcgatagcatcagcagcggcgattactactggggctggatcagacagcctcctggcaaaggactggaatggatcggccacatctactacagcggcgtgacctactacaaccccagcctgaagtccagagtgaccatcagcgtggacaccagccggaaccagttctccctgaagctgtctagcgtgacagccgccgataccgccgtgtactactgcaccagagaggacagcagcaactggcggagtagaggccagggaacactggtcacagttagctctctcgagggatctggcagagccgattgcggctttaccagcgagagctaccagcagggcgtgctgagcgccaccatcctgtacgagatcctgctgggcaaggccaccctgtacgccgtgctggtgtctgccctggtgctgatggctatggtcaagcggaaggacagccggggaagggccaagcgatctggatctggagcaacaaacttctcactactcaaacaagcaggtgacgtggaggagaatcccgggcctactagtatggactggatttggcgcatccttttccttgtcggcgctgctaccggcgcgcattccttcgaagttcagctgctggaatctggcggaggactcgttcaacctggcggctctctgagactgagctgtgccgcttctggcttcagcttctctagctacgccctgagctgggttcgacaagctcccggaaagggccttgaatgggtgtccagcatcggcgagaatgacggcaccacagactatgccgatgccgtgaaaggccggtttaccatcagcagagacaattccaagaacacgctctatctgcaaatgaactccctgcgcgtggaagatacagccgtgtattattgcgtgaaggacggcgtgcactggggacagggaaccctggttacagtgtctagcacgcgtgataaaactcatacctgtccgccatgcccggcaatccccgaggacacattcttcccaagccccgagagcagctgcgacgtgaagctggtggaaaagagcttcgagacagacaccaacctgaacttccagaacctgagcgtgatcggcttcagaatcctgctgctgaaagtggccggctttaacctgctgatgaccctgcggctgtggtccagc

SEQ ID NO: 6602 - DNA, 2649 bp, Artificial Sequence
  Synthetic Polynucloetide
atggccttaccagtgaccgccttgctcctgccgctggccttgctgctccacgccgccaggccgcagctccagctgcaagagtctggacctggcctggtcaagcctagcgagacactgagcctgacctgtaccgtgtccggcgatagcatcagcagcggcgattactactggggctggatcagacagcctcctggcaaaggactggaatggatcggccacatctactacagcggcgtgacctactacaaccccagcctgaagtccagagtgaccatcagcgtggacaccagccggaaccagttctccctgaagctgtctagcgtgacagccgccgataccgccgtgtactactgcaccagagaggacagcagcaactggcggagtagaggccagggaacactggtcacagttagctctctcgagggacagcctaaggccaatcctaccgtgacactgttccctccaagcagcgaagaactccaggccaacaaggccacacttgtgtgcctgatctccgacttctaccctggggctgtgacagtggcttggaaggccgatggatctcctgtgaaagccggcgtggaaaccaccaagccatccaagcagagcaacaacaaatacgccgccagctcctacctgagcctgacacctgagcagtggaagtcccacagatcctacagctgccaagtgacccacgaaggcagcaccgtggaaaagacagtggcccctacagagtgcagccccatcaagaccgatgtgattacaatggaccccaaggacaactgctccaaggacgccaacgataccctgctgctccagctgaccaacaccagcgcctactacatgtacttgttgctgctgctgaagtccgtggtgtacttcgccatcatcacatgctgcctgctgcggagaaccgccttctgctgcaacggcgagaagtctagggccaagcgatctggatctggagcaacaaacttctcactactcaaacaagcaggtgacgtggaggagaatcccgggcctactagtatggactggatttggcgcatccttttccttgtcggcgctgctaccggcgcgcattccttcgaagttcagctgctggaatctggcggaggactcgttcaacctggcggctctctgagactgagctgtgccgcttctggcttcagcttctctagctacgccctgagctgggttcgacaagctcccggaaagggccttgaatgggtgtccagcatcggcgagaatgacggcaccacagactatgccgatgccgtgaaaggccggtttaccatcagcagagacaattccaagaacacgctctatctgcaaatgaactccctgcgcgtggaagatacagccgtgtattattgcgtgaaggacggcgtgcactggggacagggaaccctggttacagtgtctagcacgcgtgcctctacaaagggaccctccgtgtttcctctggctcccagcagcaagtctacaagcggaggaacagccgctctgggctgcctggtcaaggattactttcccgagcctgtgaccgtgtcctggaatagcggagcactgacaagcggcgtgcacacctttccagccgtgctgcaaagcagcggcctgtactctctgagcagcgtggtcacagtgcctagctctagcctgggcacccagacctacatctgcaatgtgaaccacaagcctagcaacaccaaggtggacaagagagtggaacccaagagctgtgaagtgaaaaccgactccaccgaccacgtgaagcccaaagagacagagaacaccaagcagcccagcaagagctgccacaagcccaaggccatcgtgcacaccgagaaagtgaacatgatgagcctgaccgtgctgggcctgcggatgctgttcgccaaaaccgtggccgtgaacttcctgctgaccgccaagctgttcttcctccgcgccaagagaagcggatctggcgtgaagcagaccctgaatttcgacctgctgaagctggctggcgacgtggaatccaacccaggcccttctagaggccatatgaccgagtacaagcccacggtgcgcctcgccacccgcgacgacgtccccagggccgtacgcaccctcgccgccgcgttcgccgactaccccgccacgcgccacaccgtcgatccggaccgccacatcgagcgggtcaccgagctgcaagaactcttcctcacgcgcgtcgggctcgacatcggcaaggtgtgggtcgcggacgacggcgccgcggtggcggtctggaccacgccggagagcgtcgaagcgggggcggtgttcgccgagatcggcccgcgcatggccgagttgagcggttcccggctggccgcgcagcaacagatggaaggcctcctggcgccgcaccggcccaaggagcccgcgtggttcctggccaccgtcggcgtctcgcccgaccaccagggcaagggtctgggcagcgccgtcgtgctccccggagtggaggcggccgagcgcgccggggtgcccgccttcctggagacctccgcgccccgcaacctccccttctacgagcggctcggcttcaccgtcaccgccgacgtcgaggtgcccgaaggaccgcgcacctggtgcatgacccgcaagcccggtgcctga

SEQ ID NO: 6603 - DNA, 1947 bp, Artificial Sequence; identical to SEQ ID NO: 6565
  Synthetic Polynucloetide

SEQ ID NO: 6604 - DNA, 2034 bp, Artificial Sequence
  Synthetic Polynucloetide
atggccttaccagtgaccgccttgctcctgccgctggccttgctgctccacgccgccaggccgcagctccagctgcaagagtctggacctggcctggtcaagcctagcgagacactgagcctgacctgtaccgtgtccggcgatagcatcagcagcggcgattactactggggctggatcagacagcctcctggcaaaggactggaatggatcggccacatctactacagcggcgtgacctactacaaccccagcctgaagtccagagtgaccatcagcgtggacaccagccggaaccagttctccctgaagctgtctagcgtgacagccgccgataccgccgtgtactactgcaccagagaggacagcagcaactggcggagtagaggccagggaacactggtcacagttagctctctcgagggatctcccatcaagaccgatgtgattacaatggaccccaaggacaactgctccaaggacgccaacgataccctgctgctccagctgaccaacaccagcgcctactacatgtacttgttgctgctgctgaagtccgtggtgtacttcgccatcatcacatgctgcctgctgcggagaaccgccttctgctgcaacggcgagaagtctagggccaagcgatctggatctggagcaacaaacttctcactactcaaacaagcaggtgacgtggaggagaatcccgggcctactagtatggactggatttggcgcatccttttccttgtcggcgctgctaccggcgcgcattccttcgaagttcagctgctggaatctggcggaggactcgttcaacctggcggctctctgagactgagctgtgccgcttctggcttcagcttctctagctacgccctgagctgggttcgacaagctcccggaaagggccttgaatgggtgtccagcatcggcgagaatgacggcaccacagactatgccgatgccgtgaaaggccggtttaccatcagcagagacaattccaagaacacgctctatctgcaaatgaactccctgcgcgtggaagatacagccgtgtattattgcgtgaaggacggcgtgcactggggacagggaaccctggttacagtgtctagcacgcgtggcagcgaagtgaaaaccgactccaccgaccacgtgaagcccaaagagacagagaacaccaagcagcccagcaagagctgccacaagcccaaggccatcgtgcacaccgagaaagtgaacatgatgagcctgaccgtgctgggcctgcggatgctgttcgccaaaaccgtggccgtgaacttcctgctgaccgccaagctgttcttcctccgcgccaagagaagcggatctggcgtgaagcagaccctgaatttcgacctgctgaagctggctggcgacgtggaatccaacccaggcccttctagaggccatatgaccgagtacaagcccacggtgcgcctcgccacccgcgacgacgtccccagggccgtacgcaccctcgccgccgcgttcgccgactaccccgccacgcgccacaccgtcgatccggaccgccacatcgagcgggtcaccgagctgcaagaactcttcctcacgcgcgtcgggctcgacatcggcaaggtgtgggtcgcggacgacggcgccgcggtggcggtctggaccacgccggagagcgtcgaagcgggggcggtgttcgccgagatcggcccgcgcatggccgagttgagcggttcccggctggccgcgcagcaacagatggaaggcctcctggcgccgcaccggcccaaggagcccgcgtggttcctggccaccgtcggcgtctcgcccgaccaccagggcaagggtctgggcagcgccgtcgtgctccccggagtggaggcggccgagcgcgccggggtgcccgccttcctggagacctccgcgccccgcaacctccccttctacgagcggctcggcttcaccgtcaccgccgacgtcgaggtgcccgaaggaccgcgcacctggtgcatgacccgcaagcccggtgcctga

SEQ ID NO: 6605 - DNA, 1332 bp, Artificial Sequence
  Synthetic Polynucloetide
atggccttaccagtgaccgccttgctcctgccgctggccttgctgctccacgccgccaggccgcagctccagctgcaagagtctggacctggcctggtcaagcctagcgagacactgagcctgacctgtaccgtgtccggcgatagcatcagcagcggcgattactactggggctggatcagacagcctcctggcaaaggactggaatggatcggccacatctactacagcggcgtgacctactacaaccccagcctgaagtccagagtgaccatcagcgtggacaccagccggaaccagttctccctgaagctgtctagcgtgacagccgccgataccgccgtgtactactgcaccagagaggacagcagcaactggcggagtagaggccagggaacactggtcacagttagctctctcgagggatctcccatcaagaccgatgtgattacaatggaccccaaggacaactgctccaaggacgccaacgataccctgctgctccagctgaccaacaccagcgcctactacatgtacttgttgctgctgctgaagtccgtggtgtacttcgccatcatcacatgctgcctgctgcggagaaccgccttctgctgcaacggcgagaagtctagggccaagcgatctggatctggagcaacaaacttctcactactcaaacaagcaggtgacgtggaggagaatcccgggcctactagtatggactggatttggcgcatccttttccttgtcggcgctgctaccggcgcgcattccttcgaagttcagctgctggaatctggcggaggactcgttcaacctggcggctctctgagactgagctgtgccgcttctggcttcagcttctctagctacgccctgagctgggttcgacaagctcccggaaagggccttgaatgggtgtccagcatcggcgagaatgacggcaccacagactatgccgatgccgtgaaaggccggtttaccatcagcagagacaattccaagaacacgctctatctgcaaatgaactccctgcgcgtggaagatacagccgtgtattattgcgtgaaggacggcgtgcactggggacagggaaccctggttacagtgtctagcacgcgtggcagcgaagtgaaaaccgactccaccgaccacgtgaagcccaaagagacagagaacaccaagcagcccagcaagagctgccacaagcccaaggccatcgtgcacaccgagaaagtgaacatgatgagcctgaccgtgctgggcctgcggatgctgttcgccaaaaccgtggccgtgaacttcctgctgaccgccaagctgttcttcctc

SEQ ID NO: 6606 - DNA, 2061 bp, Artificial Sequence
  Synthetic Polynucloetide
atggccttaccagtgaccgccttgctcctgccgctggccttgctgctccacgccgccaggccgcagctccagctgcaagagtctggacctggcctggtcaagcctagcgagacactgagcctgacctgtaccgtgtccggcgatagcatcagcagcggcgattactactggggctggatcagacagcctcctggcaaaggactggaatggatcggccacatctactacagcggcgtgacctactacaaccccagcctgaagtccagagtgaccatcagcgtggacaccagccggaaccagttctccctgaagctgtctagcgtgacagccgccgataccgccgtgtactactgcaccagagaggacagcagcaactggcggagtagaggccagggaacactggtcacagttagctctctcgaggacaaaactcacacatgcccaccgtgcccagcacccatcaagaccgatgtgattacaatggaccccaaggacaactgctccaaggacgccaacgataccctgctgctccagctgaccaacaccagcgcctactacatgtacttgttgctgctgctgaagtccgtggtgtacttcgccatcatcacatgctgcctgctgcggagaaccgccttctgctgcaacggcgagaagtctagggccaagcgatctggatctggagcaacaaacttctcactactcaaacaagcaggtgacgtggaggagaatcccgggcctactagtatggactggatttggcgcatccttttccttgtcggcgctgctaccggcgcgcattccttcgaagttcagctgctggaatctggcggaggactcgttcaacctggcggctctctgagactgagctgtgccgcttctggcttcagcttctctagctacgccctgagctgggttcgacaagctcccggaaagggccttgaatgggtgtccagcatcggcgagaatgacggcaccacagactatgccgatgccgtgaaaggccggtttaccatcagcagagacaattccaagaacacgctctatctgcaaatgaactccctgcgcgtggaagatacagccgtgtattattgcgtgaaggacggcgtgcactggggacagggaaccctggttacagtgtctagcacgcgtggcagcgaagtgaaaaccgactccaccgaccacgtgaagcccaaagagacagagaacaccaagcagcccagcaagagctgccacaagcccaaggccatcgtgcacaccgagaaagtgaacatgatgagcctgaccgtgctgggcctgcggatgctgttcgccaaaaccgtggccgtgaacttcctgctgaccgccaagctgttcttcctccgcgccaagagaagcggatctggcgtgaagcagaccctgaatttcgacctgctgaagctggctggcgacgtggaatccaacccaggcccttctagaggccatatgaccgagtacaagcccacggtgcgcctcgccacccgcgacgacgtccccagggccgtacgcaccctcgccgccgcgttcgccgactaccccgccacgcgccacaccgtcgatccggaccgccacatcgagcgggtcaccgagctgcaagaactcttcctcacgcgcgtcgggctcgacatcggcaaggtgtgggtcgcggacgacggcgccgcggtggcggtctggaccacgccggagagcgtcgaagcgggggcggtgttcgccgagatcggcccgcgcatggccgagttgagcggttcccggctggccgcgcagcaacagatggaaggcctcctggcgccgcaccggcccaaggagcccgcgtggttcctggccaccgtcggcgtctcgcccgaccaccagggcaagggtctgggcagcgccgtcgtgctccccggagtggaggcggccgagcgcgccggggtgcccgccttcctggagacctccgcgccccgcaacctccccttctacgagcggctcggcttcaccgtcaccgccgacgtcgaggtgcccgaaggaccgcgcacctggtgcatgacccgcaagcccggtgcctga

SEQ ID NO: 6607 - DNA, 2061 bp, Artificial Sequence
  Synthetic Polynucloetide
atggccttaccagtgaccgccttgctcctgccgctggccttgctgctccacgccgccaggccgcagctccagctgcaagagtctggacctggcctggtcaagcctagcgagacactgagcctgacctgtaccgtgtccggcgatagcatcagcagcggcgattactactggggctggatcagacagcctcctggcaaaggactggaatggatcggccacatctactacagcggcgtgacctactacaaccccagcctgaagtccagagtgaccatcagcgtggacaccagccggaaccagttctccctgaagctgtctagcgtgacagccgccgataccgccgtgtactactgcaccagagaggacagcagcaactggcggagtagaggccagggaacactggtcacagttagctctctcgagggatctcccatcaagaccgatgtgattacaatggaccccaaggacaactgctccaaggacgccaacgataccctgctgctccagctgaccaacaccagcgcctactacatgtacttgttgctgctgctgaagtccgtggtgtacttcgccatcatcacatgctgcctgctgcggagaaccgccttctgctgcaacggcgagaagtctagggccaagcgatctggatctggagcaacaaacttctcactactcaaacaagcaggtgacgtggaggagaatcccgggcctactagtatggactggatttggcgcatccttttccttgtcggcgctgctaccggcgcgcattccttcgaagttcagctgctggaatctggcggaggactcgttcaacctggcggctctctgagactgagctgtgccgcttctggcttcagcttctctagctacgccctgagctgggttcgacaagctcccggaaagggccttgaatgggtgtccagcatcggcgagaatgacggcaccacagactatgccgatgccgtgaaaggccggtttaccatcagcagagacaattccaagaacacgctctatctgcaaatgaactccctgcgcgtggaagatacagccgtgtattattgcgtgaaggacggcgtgcactggggacagggaaccctggttacagtgtctagcacgcgtgataaaactcatacctgtccgccatgcccggcagaagtgaaaaccgactccaccgaccacgtgaagcccaaagagacagagaacaccaagcagcccagcaagagctgccacaagcccaaggccatcgtgcacaccgagaaagtgaacatgatgagcctgaccgtgctgggcctgcggatgctgttcgccaaaaccgtggccgtgaacttcctgctgaccgccaagctgttcttcctccgcgccaagagaagcggatctggcgtgaagcagaccctgaatttcgacctgctgaagctggctggcgacgtggaatccaacccaggcccttctagaggccatatgaccgagtacaagcccacggtgcgcctcgccacccgcgacgacgtccccagggccgtacgcaccctcgccgccgcgttcgccgactaccccgccacgcgccacaccgtcgatccggaccgccacatcgagcgggtcaccgagctgcaagaactcttcctcacgcgcgtcgggctcgacatcggcaaggtgtgggtcgcggacgacggcgccgcggtggcggtctggaccacgccggagagcgtcgaagcgggggcggtgttcgccgagatcggcccgcgcatggccgagttgagcggttcccggctggccgcgcagcaacagatggaaggcctcctggcgccgcaccggcccaaggagcccgcgtggttcctggccaccgtcggcgtctcgcccgaccaccagggcaagggtctgggcagcgccgtcgtgctccccggagtggaggcggccgagcgcgccggggtgcccgccttcctggagacctccgcgccccgcaacctccccttctacgagcggctcggcttcaccgtcaccgccgacgtcgaggtgcccgaaggaccgcgcacctggtgcatgacccgcaagcccggtgcctga

SEQ ID NO: 6608 - DNA, 2088 bp, Artificial Sequence
  Synthetic Polynucloetide
atggccttaccagtgaccgccttgctcctgccgctggccttgctgctccacgccgccaggccgcagctccagctgcaagagtctggacctggcctggtcaagcctagcgagacactgagcctgacctgtaccgtgtccggcgatagcatcagcagcggcgattactactggggctggatcagacagcctcctggcaaaggactggaatggatcggccacatctactacagcggcgtgacctactacaaccccagcctgaagtccagagtgaccatcagcgtggacaccagccggaaccagttctccctgaagctgtctagcgtgacagccgccgataccgccgtgtactactgcaccagagaggacagcagcaactggcggagtagaggccagggaacactggtcacagttagctctctcgaggacaaaactcacacatgcccaccgtgcccagcacccatcaagaccgatgtgattacaatggaccccaaggacaactgctccaaggacgccaacgataccctgctgctccagctgaccaacaccagcgcctactacatgtacttgttgctgctgctgaagtccgtggtgtacttcgccatcatcacatgctgcctgctgcggagaaccgccttctgctgcaacggcgagaagtctagggccaagcgatctggatctggagcaacaaacttctcactactcaaacaagcaggtgacgtggaggagaatcccgggcctactagtatggactggatttggcgcatccttttccttgtcggcgctgctaccggcgcgcattccttcgaagttcagctgctggaatctggcggaggactcgttcaacctggcggctctctgagactgagctgtgccgcttctggcttcagcttctctagctacgccctgagctgggttcgacaagctcccggaaagggccttgaatgggtgtccagcatcggcgagaatgacggcaccacagactatgccgatgccgtgaaaggccggtttaccatcagcagagacaattccaagaacacgctctatctgcaaatgaactccctgcgcgtggaagatacagccgtgtattattgcgtgaaggacggcgtgcactggggacagggaaccctggttacagtgtctagcacgcgtgataaaactcatacctgtccgccatgcccggcagaagtgaaaaccgactccaccgaccacgtgaagcccaaagagacagagaacaccaagcagcccagcaagagctgccacaagcccaaggccatcgtgcacaccgagaaagtgaacatgatgagcctgaccgtgctgggcctgcggatgctgttcgccaaaaccgtggccgtgaacttcctgctgaccgccaagctgttcttcctccgcgccaagagaagcggatctggcgtgaagcagaccctgaatttcgacctgctgaagctggctggcgacgtggaatccaacccaggcccttctagaggccatatgaccgagtacaagcccacggtgcgcctcgccacccgcgacgacgtccccagggccgtacgcaccctcgccgccgcgttcgccgactaccccgccacgcgccacaccgtcgatccggaccgccacatcgagcgggtcaccgagctgcaagaactcttcctcacgcgcgtcgggctcgacatcggcaaggtgtgggtcgcggacgacggcgccgcggtggcggtctggaccacgccggagagcgtcgaagcgggggcggtgttcgccgagatcggcccgcgcatggccgagttgagcggttcccggctggccgcgcagcaacagatggaaggcctcctggcgccgcaccggcccaaggagcccgcgtggttcctggccaccgtcggcgtctcgcccgaccaccagggcaagggtctgggcagcgccgtcgtgctccccggagtggaggcggccgagcgcgccggggtgcccgccttcctggagacctccgcgccccgcaacctccccttctacgagcggctcggcttcaccgtcaccgccgacgtcgaggtgcccgaaggaccgcgcacctggtgcatgacccgcaagcccggtgcctga

SEQ ID NO: 6609 - DNA, 1386 bp, Artificial Sequence
  Synthetic Polynucloetide
atggccttaccagtgaccgccttgctcctgccgctggccttgctgctccacgccgccaggccgcagctccagctgcaagagtctggacctggcctggtcaagcctagcgagacactgagcctgacctgtaccgtgtccggcgatagcatcagcagcggcgattactactggggctggatcagacagcctcctggcaaaggactggaatggatcggccacatctactacagcggcgtgacctactacaaccccagcctgaagtccagagtgaccatcagcgtggacaccagccggaaccagttctccctgaagctgtctagcgtgacagccgccgataccgccgtgtactactgcaccagagaggacagcagcaactggcggagtagaggccagggaacactggtcacagttagctctctcgaggacaaaactcacacatgcccaccgtgcccagcacccatcaagaccgatgtgattacaatggaccccaaggacaactgctccaaggacgccaacgataccctgctgctccagctgaccaacaccagcgcctactacatgtacttgttgctgctgctgaagtccgtggtgtacttcgccatcatcacatgctgcctgctgcggagaaccgccttctgctgcaacggcgagaagtctagggccaagcgatctggatctggagcaacaaacttctcactactcaaacaagcaggtgacgtggaggagaatcccgggcctactagtatggactggatttggcgcatccttttccttgtcggcgctgctaccggcgcgcattccttcgaagttcagctgctggaatctggcggaggactcgttcaacctggcggctctctgagactgagctgtgccgcttctggcttcagcttctctagctacgccctgagctgggttcgacaagctcccggaaagggccttgaatgggtgtccagcatcggcgagaatgacggcaccacagactatgccgatgccgtgaaaggccggtttaccatcagcagagacaattccaagaacacgctctatctgcaaatgaactccctgcgcgtggaagatacagccgtgtattattgcgtgaaggacggcgtgcactggggacagggaaccctggttacagtgtctagcacgcgtgataaaactcatacctgtccgccatgcccggcagaagtgaaaaccgactccaccgaccacgtgaagcccaaagagacagagaacaccaagcagcccagcaagagctgccacaagcccaaggccatcgtgcacaccgagaaagtgaacatgatgagcctgaccgtgctgggcctgcggatgctgttcgccaaaaccgtggccgtgaacttcctgctgaccgccaagctgttcttcctc

SEQ ID NO: 6610 - DNA, 2178 bp, Artificial Sequence
  Synthetic Polynucloetide
atggccttaccagtgaccgccttgctcctgccgctggccttgctgctccacgccgccaggccgcagctccagctgcaagagtctggacctggcctggtcaagcctagcgagacactgagcctgacctgtaccgtgtccggcgatagcatcagcagcggcgattactactggggctggatcagacagcctcctggcaaaggactggaatggatcggccacatctactacagcggcgtgacctactacaaccccagcctgaagtccagagtgaccatcagcgtggacaccagccggaaccagttctccctgaagctgtctagcgtgacagccgccgataccgccgtgtactactgcaccagagaggacagcagcaactggcggagtagaggccagggaacactggtcacagttagctctctcgagagcggcggaggcggatctttcgaagtgcagctggttgaatctggcggaggactggttcagcctggcggatctctgagactgtcttgtgccgccagcggcttcagcttcagcgacttttggatgagctgggtccgacaggcccctggcaaaggacttgaatgggtcgccacaatcagccaggccggcagcgagaaggactacgtggactctgtgaagggcagattcaccatcagccgggacaacgccaagaagtccctgtacctccagatgaacagcctgagagccgaggacaccgccgtgtactattgtgcctctggcgtgtacagcttcgactacagaggccagggcaccctggtcacagtctcttctacgcgtgagcagaaactgatctcggaagaggatctggcgaagcccaccacgacgccagcgccgcgaccaccaacaccggcgcccaccatcgcgtcgcagcccctgtccctgcgcccagaggcgtgccggccagcggcggggggcgcagtgcacacgagggggctggacttcgcctgtgacatctacatctgggcgcccttggccgggacttgtggggtccttctcctgtcactggttatcaccctttactgcaaacggggcagaaagaaactcctgtatatattcaaacaaccatttatgagaccagtacaaactactcaagaggaagatggctgtagctgccgatttccagaagaagaagaaggaggatgtgaactgagagtgaagttcagcaggagcgcagacgcccccgcgtaccagcagggccagaaccagctctataacgagctgaatctaggacgaagagaggagtacgatgttttggacaagagacgtggccgggaccctgagatggggggaaagccgagaaggaagaaccctcaggaaggcctgtacaatgaactgcagaaagataagatggcggaggcctacagtgagattgggatgaaaggcgagcgccggaggggcaaggggcacgatggcctttaccagggtctcagtacagccaccaaggacacctacgacgcccttcacatgcaggccctgccccctcgctctagtggctccggcgagggcagaggaagtctactaacctgcggagatgtggaagaaaatcctggcccacatatgaccgagtacaagcccacggtgcgcctcgccacccgcgacgacgtccccagggccgtacgcaccctcgccgccgcgttcgccgactaccccgccacgcgccacaccgtcgatccggaccgccacatcgagcgggtcaccgagctgcaagaactcttcctcacgcgcgtcgggctcgacatcggcaaggtgtgggtcgcggacgacggcgccgcggtggcggtctggaccacgccggagagcgtcgaagcgggggcggtgttcgccgagatcggcccgcgcatggccgagttgagcggttcccggctggccgcgcagcaacagatggaaggcctcctggcgccgcaccggcccaaggagcccgcgtggttcctggccaccgtcggcgtctcgcccgaccaccagggcaagggtctgggcagcgccgtcgtgctccccggagtggaggcggccgagcgcgccggggtgcccgccttcctggagacctccgcgccccgcaacctccccttctacgagcggctcggcttcaccgtcaccgccgacgtcgaggtgcccgaaggaccgcgcacctggtgcatgacccgcaagcccggtgcctga

SEQ ID NO: 6611 - DNA, 2160 bp, Artificial Sequence
  Synthetic Polynucloetide
atggccttaccagtgaccgccttgctcctgccgctggccttgctgctccacgccgccaggccgcagctccagctgcaagagtctggacctggcctggtcaagcctagcgagacactgagcctgacctgtaccgtgtccggcgatagcatcagcagcggcgattactactggggctggatcagacagcctcctggcaaaggactggaatggatcggccacatctactacagcggcgtgacctactacaaccccagcctgaagtccagagtgaccatcagcgtggacaccagccggaaccagttctccctgaagctgtctagcgtgacagccgccgataccgccgtgtactactgcaccagagaggacagcagcaactggcggagtagaggccagggaacactggtcacagttagctctctcgagagcggcggaggcggatctttcgaagtgcagctggttgaatctggcggaggactggttcagcctggcggatctctgagactgtcttgtgccgccagcggcttcagcttcagcgacttttggatgagctgggtccgacaggcccctggcaaaggacttgaatgggtcgccacaatcagccaggccggcagcgagaaggactacgtggactctgtgaagggcagattcaccatcagccgggacaacgccaagaagtccctgtacctccagatgaacagcctgagagccgaggacaccgccgtgtactattgtgcctctggcgtgtacagcttcgactacagaggccagggcaccctggtcacagtctcttctacgcgtgagcagaaactgatctcggaagaggatctgaaaattgaagttatgtatcctcctccttacctagacaatgagaagagcaatggaaccattatccatgtgaaagggaaacacctttgtccaagtcccctatttcccggaccttctaagcccttttgggtgctggtggtggttgggggagtcctggcttgctatagcttgctagtaacagtggcctttattattttctgggtgaggagtaagaggagcaggctcctgcacagtgactacatgaacatgactccacgccgccccggacccacccgcaagcattaccagccctatgccccaccacgcgacttcgcagcctatcgctccagagtgaagttcagcaggagcgcagacgcccccgcgtaccagcagggccagaaccagctctataacgagctcaatctaggacgaagagaggagtacgatgttttggacaagagacgtggccgggaccctgagatggggggaaagccgagaaggaagaaccctcaggaaggcctgtacaatgaactgcagaaagataagatggcggaggcctacagtgagattgggatgaaaggcgagcgccggaggggcaaggggcacgatggcctttaccagggtctcagtacagccaccaaggacacctacgacgcccttcacatgcaggccctgccccctcgctctagtggctccggcgagggcagaggaagtctactaacctgcggagatgtggaagaaaatcctggcccacatatgaccgagtacaagcccacggtgcgcctcgccacccgcgacgacgtccccagggccgtacgcaccctcgccgccgcgttcgccgactaccccgccacgcgccacaccgtcgatccggaccgccacatcgagcgggtcaccgagctgcaagaactcttcctcacgcgcgtcgggctcgacatcggcaaggtgtgggtcgcggacgacggcgccgcggtggcggtctggaccacgccggagagcgtcgaagcgggggcggtgttcgccgagatcggcccgcgcatggccgagttgagcggttcccggctggccgcgcagcaacagatggaaggcctcctggcgccgcaccggcccaaggagcccgcgtggttcctggccaccgtcggcgtctcgcccgaccaccagggcaagggtctgggcagcgccgtcgtgctccccggagtggaggcggccgagcgcgccggggtgcccgccttcctggagacctccgcgccccgcaacctccccttctacgagcggctcggcttcaccgtcaccgccgacgtcgaggtgcccgaaggaccgcgcacctggtgcatgacccgcaagcccggtgcctga

SEQ ID NO: 6612 - DNA, 1488 bp, Artificial Sequence
  Synthetic Polynucloetide
atggccttaccagtgaccgccttgctcctgccgctggccttgctgctccacgccgccaggccgcagctccagctgcaagagtctggacctggcctggtcaagcctagcgagacactgagcctgacctgtaccgtgtccggcgatagcatcagcagcggcgattactactggggctggatcagacagcctcctggcaaaggactggaatggatcggccacatctactacagcggcgtgacctactacaaccccagcctgaagtccagagtgaccatcagcgtggacaccagccggaaccagttctccctgaagctgtctagcgtgacagccgccgataccgccgtgtactactgcaccagagaggacagcagcaactggcggagtagaggccagggaacactggtcacagttagctctctcgagagcggcggaggcggatctttcgaagtgcagctggttgaatctggcggaggactggttcagcctggcggatctctgagactgtcttgtgccgccagcggcttcagcttcagcgacttttggatgagctgggtccgacaggcccctggcaaaggacttgaatgggtcgccacaatcagccaggccggcagcgagaaggactacgtggactctgtgaagggcagattcaccatcagccgggacaacgccaagaagtccctgtacctccagatgaacagcctgagagccgaggacaccgccgtgtactattgtgcctctggcgtgtacagcttcgactacagaggccagggcaccctggtcacagtctcttctacgcgtgagcagaaactgatctcggaagaggatctgaaaattgaagttatgtatcctcctccttacctagacaatgagaagagcaatggaaccattatccatgtgaaagggaaacacctttgtccaagtcccctatttcccggaccttctaagcccttttgggtgctggtggtggttgggggagtcctggcttgctatagcttgctagtaacagtggcctttattattttctgggtgaggagtaagaggagcaggctcctgcacagtgactacatgaacatgactccacgccgccccggacccacccgcaagcattaccagccctatgccccaccacgcgacttcgcagcctatcgctccagagtgaagttcagcaggagcgcagacgcccccgcgtaccagcagggccagaaccagctctataacgagctcaatctaggacgaagagaggagtacgatgttttggacaagagacgtggccgggaccctgagatggggggaaagccgagaaggaagaaccctcaggaaggcctgtacaatgaactgcagaaagataagatggcggaggcctacagtgagattgggatgaaaggcgagcgccggaggggcaaggggcacgatggcctttaccagggtctcagtacagccaccaaggacacctacgacgcccttcacatgcaggccctgccccctcgc

SEQ ID NO: 6613 - DNA, 1509 bp, Artificial Sequence
  Synthetic Polynucloetide
atggccttaccagtgaccgccttgctcctgccgctggccttgctgctccacgccgccaggccgcagctccagctgcaagagtctggacctggcctggtcaagcctagcgagacactgagcctgacctgtaccgtgtccggcgatagcatcagcagcggcgattactactggggctggatcagacagcctcctggcaaaggactggaatggatcggccacatctactacagcggcgtgacctactacaaccccagcctgaagtccagagtgaccatcagcgtggacaccagccggaaccagttctccctgaagctgtctagcgtgacagccgccgataccgccgtgtactactgcaccagagaggacagcagcaactggcggagtagaggccagggaacactggtcacagttagctctctcgagagcggcggaggcggatctttcgaagtgcagctggttgaatctggcggaggactggttcagcctggcggatctctgagactgtcttgtgccgccagcggcttcagcttcagcgacttttggatgagctgggtccgacaggcccctggcaaaggacttgaatgggtcgccacaatcagccaggccggcagcgagaaggactacgtggactctgtgaagggcagattcaccatcagccgggacaacgccaagaagtccctgtacctccagatgaacagcctgagagccgaggacaccgccgtgtactattgtgcctctggcgtgtacagcttcgactacagaggccagggcaccctggtcacagtctcttctacgcgtgagcagaaactgatctcggaagaggatctggcgaagcccaccacgacgccagcgccgcgaccaccaacaccggcgcccaccatcgcgtcgcagcccctgtccctgcgcccagaggcgtgccggccagcggcggggggcgcagtgcacacgagggggctggacttcgcctgtgacatctacatctgggcgcccttggccgggacttgtggggtccttctcctgtcactggttatcaccctttactgcaaacggggcagaaagaaactcctgtatatattcaaacaaccatttatgagaccagtacaaactactcaagaggaagatggctgtagctgccgatttccagaagaagaagaaggaggatgtgaactgagagtgaagttcagcaggagcgcagacgcccccgcgtaccagcagggccagaaccagctctataacgagctgaatctaggacgaagagaggagtacgatgttttggacaagagacgtggccgggaccctgagatggggggaaagccgagaaggaagaaccctcaggaaggcctgtacaatgaactgcagaaagataagatggcggaggcctacagtgagattgggatgaaaggcgagcgccggaggggcaaggggcacgatggcctttaccagggtctcagtacagccaccaaggacacctacgacgcccttcacatgcaggccctgccccctcgctga

SEQ ID NO: 6614 - DNA, 1512 bp, Artificial Sequence
  Synthetic Polynucloetide
atggccttaccagtgaccgccttgctcctgccgctggccttgctgctccacgccgccaggccggaagtgcagctggttgaatctggcggaggactggttcagcctggcggatctctgagactgtcttgtgccgccagcggcttcagcttcagcgacttttggatgagctgggtccgacaggcccctggcaaaggacttgaatgggtcgccacaatcagccaggccggcagcgagaaggactacgtggactctgtgaagggcagattcaccatcagccgggacaacgccaagaagtccctgtacctccagatgaacagcctgagagccgaggacaccgccgtgtactattgtgcctctggcgtgtacagcttcgactacagaggccagggcaccctggtcacagtctcttctctcgagagcggcggaggcggatctttcgaacagctccagctgcaagagtctggacctggcctggtcaagcctagcgagacactgagcctgacctgtaccgtgtccggcgatagcatcagcagcggcgattactactggggctggatcagacagcctcctggcaaaggactggaatggatcggccacatctactacagcggcgtgacctactacaaccccagcctgaagtccagagtgaccatcagcgtggacaccagccggaaccagttctccctgaagctgtctagcgtgacagccgccgataccgccgtgtactactgcaccagagaggacagcagcaactggcggagtagaggccagggaacactggtcacagttagctctacgcgtgagcagaaactgatctcggaagaggatctggcgaagcccaccacgacgccagcgccgcgaccaccaacaccggcgcccaccatcgcgtcgcagcccctgtccctgcgcccagaggcgtgccggccagcggcggggggcgcagtgcacacgagggggctggacttcgcctgtgacatctacatctgggcgcccttggccgggacttgtggggtccttctcctgtcactggttatcaccctttactgcaaacggggcagaaagaaactcctgtatatattcaaacaaccatttatgagaccagtacaaactactcaagaggaagatggctgtagctgccgatttccagaagaagaagaaggaggatgtgaactgagagtgaagttcagcaggagcgcagacgcccccgcgtaccagcagggccagaaccagctctataacgagctgaatctaggacgaagagaggagtacgatgttttggacaagagacgtggccgggaccctgagatggggggaaagccgagaaggaagaaccctcaggaaggcctgtacaatgaactgcagaaagataagatggcggaggcctacagtgagattgggatgaaaggcgagcgccggaggggcaaggggcacgatggcctttaccagggtctcagtacagccaccaaggacacctacgacgcccttcacatgcaggccctgccccctcgctga

SEQ ID NO: 6615 - DNA, 2748 bp, Artificial Sequence
  Synthetic Polynucloetide
atggccttaccagtgaccgccttgctcctgccgctggccttgctgctccacgccgccaggccgcagctccagctgcaagagtctggacctggcctggtcaagcctagcgagacactgagcctgacctgtaccgtgtccggcgatagcatcagcagcggcgattactactggggctggatcagacagcctcctggcaaaggactggaatggatcggccacatctactacagcggcgtgacctactacaaccccagcctgaagtccagagtgaccatcagcgtggacaccagccggaaccagttctccctgaagctgtctagcgtgacagccgccgataccgccgtgtactactgcaccagagaggacagcagcaactggcggagtagaggccagggaacactggtcacagttagctctctcgagagcggcggaggcggatctttcgaagtgcagctggttgaatctggcggaggactggttcagcctggcggatctctgagactgtcttgtgccgccagcggcttcagcttcagcgacttttggatgagctgggtccgacaggcccctggcaaaggacttgaatgggtcgccacaatcagccaggccggcagcgagaaggactacgtggactctgtgaagggcagattcaccatcagccgggacaacgccaagaagtccctgtacctccagatgaacagcctgagagccgaggacaccgccgtgtactattgtgcctctggcgtgtacagcttcgactacagaggccagggcaccctggtcacagtctcttctacgcgtgagcagaaactgatctcggaagaggatctggcgaagcccaccacgacgccagcgccgcgaccaccaacaccggcgcccaccatcgcgtcgcagcccctgtccctgcgcccagaggcgtgccggccagcggcggggggcgcagtgcacacgagggggctggacttcgcctgtgacatctacatctgggcgcccttggccgggacttgtggggtccttctcctgtcactggttatcaccctttactgcgggcgcgccagagtgaagttcagcaggagcgcagacgcccccgcgtaccagcagggccagaaccagctctataacgagctgaatctaggacgaagagaggagtacgatgttttggacaagagacgtggccgggaccctgagatggggggaaagccgagaaggaagaaccctcaggaaggcctgtacaatgaactgcagaaagataagatggcggaggcctacagtgagattgggatgaaaggcgagcgccggaggggcaaggggcacgatggcctttaccagggtctcagtacagccaccaaggacacctacgacgcccttcacatgcaggccctgccccctcgctctagaggatctggagcaacaaacttctcactactcaaacaagcaggtgacgtggaggagaatcccgggcctgggatccacatggccacttacgaggttctctgtgaggtggcgcggaaactgggcacggatgacagggaagtggtattgttcctcctaaacgtgttcatacctcaacccacactggcccaattaattggagctcttagagctttaaaggaggagggcaggttaacgtttcccctgttagcggaatgtctgtttcgtgcaggtcgcagagacctcttgcgcgacctgcttcacttagacccgcgttttttagagcgccacctagcgggcacaatgagttatttcagcccttatcagctcactgttctccacgtagacggggagctgtgtgcgagggatattaggtctttgatatttttaagcaaggacactatagggtctcgcagcacaccacagacattcttacactgggtgtactgtatggaaaacttagacctactgggtcccactgacgtggatgccctaatgtcaatgcttagatctttgtcaagagtagacctacagcgccaagtgcaaaccctaatgggccttcacctttccggcccatcacactcccaacactatcgccatacaccactcgagaccgatttctacgactacaaggacgacgatgacaagactagtggctccggcgagggcagaggaagtctactaacctgcggagatgtggaagaaaatcctggcccacatatgaccgagtacaagcccacggtgcgcctcgccacccgcgacgacgtccccagggccgtacgcaccctcgccgccgcgttcgccgactaccccgccacgcgccacaccgtcgatccggaccgccacatcgagcgggtcaccgagctgcaagaactcttcctcacgcgcgtcgggctcgacatcggcaaggtgtgggtcgcggacgacggcgccgcggtggcggtctggaccacgccggagagcgtcgaagcgggggcggtgttcgccgagatcggcccgcgcatggccgagttgagcggttcccggctggccgcgcagcaacagatggaaggcctcctggcgccgcaccggcccaaggagcccgcgtggttcctggccaccgtcggcgtctcgcccgaccaccagggcaagggtctgggcagcgccgtcgtgctccccggagtggaggcggccgagcgcgccggggtgcccgccttcctggagacctccgcgccccgcaacctccccttctacgagcggctcggcttcaccgtcaccgccgacgtcgaggtgcccgaaggaccgcgcacctggtgcatgacccgcaagcccggtgcctga

SEQ ID NO: 6616 - DNA, 2583 bp, Artificial Sequence
  Synthetic Polynucloetide
atggccttaccagtgaccgccttgctcctgccgctggccttgctgctccacgccgccaggccgcagctccagctgcaagagtctggacctggcctggtcaagcctagcgagacactgagcctgacctgtaccgtgtccggcgatagcatcagcagcggcgattactactggggctggatcagacagcctcctggcaaaggactggaatggatcggccacatctactacagcggcgtgacctactacaaccccagcctgaagtccagagtgaccatcagcgtggacaccagccggaaccagttctccctgaagctgtctagcgtgacagccgccgataccgccgtgtactactgcaccagagaggacagcagcaactggcggagtagaggccagggaacactggtcacagttagctctctcgagatccagaaccctgatcctgccgtgtaccagctgcgggatagcaagagcagcgacaagagcgtgtgtctgttcaccgacttcgacagccagaccaacgtgtcccagagcaaggactccgacgtgtacatcaccgataagtgcgtgctggacatgcggagcatggacttcaagagcaactccgccgtggcctggtccaacaagtccgatttcgcctgcgccaacgccttcaacaacagcattatccccgaggacacattcttcccaagcagcgacgtgccctgcgacgtgaagctggtggaaaagagcttcgagacagacaccaacctgaacttccagaacctgagcgtgatcggcttcagaatcctgctgctgaaagtggccggctttaacctgctgatgaccctgcggctgtggtccagccgcgccaagagaagcggatctggcgtgaagcagaccctgaatttcgacctgctgaagctggctggcgacgtggaatccaacccaggccctactagtatggactggatttggcgcatccttttccttgtcggcgctgctaccggcgcgcattccttcgaagtgcagctggttgaatctggcggaggactggttcagcctggcggatctctgagactgtcttgtgccgccagcggcttcagcttcagcgacttttggatgagctgggtccgacaggcccctggcaaaggacttgaatgggtcgccacaatcagccaggccggcagcgagaaggactacgtggactctgtgaagggcagattcaccatcagccgggacaacgccaagaagtccctgtacctccagatgaacagcctgagagccgaggacaccgccgtgtactattgtgcctctggcgtgtacagcttcgactacagaggccagggcaccctggtcacagtctcttctacgcgtgaggacctgaagaacgtgttcccacctgaggtggccgtgttcgagcctagcaaggccgagatcgcccacacccagaaagccaccctcgtgtgcctggctaccggcttctaccccgaccatgtggaactgtcttggtgggtcaacggcaaagaggtgcacagcggcgtgtgtaccgacccccagccactgaaagaacagcccgccctgaacgacagccggtactgcctgagcagcagactgagagtgtccgccaccttctggcagaacccccggaaccacttcagatgccaggtgcagttctacggcctgagcgagaacgacgagtggacccaggacagagccaagcccgtgacccagatcgtgtctgccgaagcctggggcagagccgattgcggcatcaccagcgccagctaccaccagggcgtgctgagcgccaccatcctgtacgagatcctgctgggcaaggccaccctgtacgccgtgctggtgtctgccctggtgctgatggctatggtcaagcggaaggacagccggggaagggccaagcgatctggatctggagcaacaaacttctcactactcaaacaagcaggtgacgtggaggagaatcccgggccttctagaggccatatgaccgagtacaagcccacggtgcgcctcgccacccgcgacgacgtccccagggccgtacgcaccctcgccgccgcgttcgccgactaccccgccacgcgccacaccgtcgatccggaccgccacatcgagcgggtcaccgagctgcaagaactcttcctcacgcgcgtcgggctcgacatcggcaaggtgtgggtcgcggacgacggcgccgcggtggcggtctggaccacgccggagagcgtcgaagcgggggcggtgttcgccgagatcggcccgcgcatggccgagttgagcggttcccggctggccgcgcagcaacagatggaaggcctcctggcgccgcaccggcccaaggagcccgcgtggttcctggccaccgtcggcgtctcgcccgaccaccagggcaagggtctgggcagcgccgtcgtgctccccggagtggaggcggccgagcgcgccggggtgcccgccttcctggagacctccgcgccccgcaacctccccttctacgagcggctcggcttcaccgtcaccgccgacgtcgaggtgcccgaaggaccgcgcacctggtgcatgacccgcaagcccggtgcctga

SEQ ID NO: 6617 - DNA, 2580 bp, Artificial Sequence
  Synthetic Polynucloetide
atggccttaccagtgaccgccttgctcctgccgctggccttgctgctccacgccgccaggccgcagctccagctgcaagagtctggacctggcctggtcaagcctagcgagacactgagcctgacctgtaccgtgtccggcgatagcatcagcagcggcgattactactggggctggatcagacagcctcctggcaaaggactggaatggatcggccacatctactacagcggcgtgacctactacaaccccagcctgaagtccagagtgaccatcagcgtggacaccagccggaaccagttctccctgaagctgtctagcgtgacagccgccgataccgccgtgtactactgcaccagagaggacagcagcaactggcggagtagaggccagggaacactggtcacagttagctctctcgaggacctgaagaacgtgttcccacctgaggtggccgtgttcgagcctagcaaggccgagatcgcccacacccagaaagccaccctcgtgtgcctggctaccggcttctaccccgaccatgtggaactgtcttggtgggtcaacggcaaagaggtgcacagcggcgtgtgtaccgacccccagccactgaaagaacagcccgccctgaacgacagccggtactgcctgagcagcagactgagagtgtccgccaccttctggcagaacccccggaaccacttcagatgccaggtgcagttctacggcctgagcgagaacgacgagtggacccaggacagagccaagcccgtgacccagatcgtgtctgccgaagcctggggcagagccgattgcggcatcaccagcgccagctaccaccagggcgtgctgagcgccaccatcctgtacgagatcctgctgggcaaggccaccctgtacgccgtgctggtgtctgccctggtgctgatggctatggtcaagcggaaggacagccggggaagggccaagcgatctggatctggagcaacaaacttctcactactcaaacaagcaggtgacgtggaggagaatcccgggcctactagtatggactggatttggcgcatccttttccttgtcggcgctgctaccggcgcgcattccttcgaagtgcagctggttgaatctggcggaggactggttcagcctggcggatctctgagactgtcttgtgccgccagcggcttcagcttcagcgacttttggatgagctgggtccgacaggcccctggcaaaggacttgaatgggtcgccacaatcagccaggccggcagcgagaaggactacgtggactctgtgaagggcagattcaccatcagccgggacaacgccaagaagtccctgtacctccagatgaacagcctgagagccgaggacaccgccgtgtactattgtgcctctggcgtgtacagcttcgactacagaggccagggcaccctggtcacagtctcttctacgcgtatccagaaccctgatcctgccgtgtaccagctgcgggatagcaagagcagcgacaagagcgtgtgtctgttcaccgacttcgacagccagaccaacgtgtcccagagcaaggactccgacgtgtacatcaccgataagtgcgtgctggacatgcggagcatggacttcaagagcaactccgccgtggcctggtccaacaagtccgatttcgcctgcgccaacgccttcaacaacagcattatccccgaggacacattcttcccaagcagcgacgtgccctgcgacgtgaagctggtggaaaagagcttcgagacagacaccaacctgaacttccagaacctgagcgtgatcggcttcagaatcctgctgctgaaagtggccggctttaacctgctgatgaccctgcggctgtggtccagccgcgccaagagaagcggatctggcgtgaagcagaccctgaatttcgacctgctgaagctggctggcgacgtggaatccaacccaggcccttctagaggccatatgaccgagtacaagcccacggtgcgcctcgccacccgcgacgacgtccccagggccgtacgcaccctcgccgccgcgttcgccgactaccccgccacgcgccacaccgtcgatccggaccgccacatcgagcgggtcaccgagctgcaagaactcttcctcacgcgcgtcgggctcgacatcggcaaggtgtgggtcgcggacgacggcgccgcggtggcggtctggaccacgccggagagcgtcgaagcgggggcggtgttcgccgagatcggcccgcgcatggccgagttgagcggttcccggctggccgcgcagcaacagatggaaggcctcctggcgccgcaccggcccaaggagcccgcgtggttcctggccaccgtcggcgtctcgcccgaccaccagggcaagggtctgggcagcgccgtcgtgctccccggagtggaggcggccgagcgcgccggggtgcccgccttcctggagacctccgcgccccgcaacctccccttctacgagcggctcggcttcaccgtcaccgccgacgtcgaggtgcccgaaggaccgcgcacctggtgcatgacccgcaagcccggtgcctga

SEQ ID NO: 6618 - DNA, 1878 bp, Artificial Sequence
  Synthetic Polynucloetide
atggccttaccagtgaccgccttgctcctgccgctggccttgctgctccacgccgccaggccgcagctccagctgcaagagtctggacctggcctggtcaagcctagcgagacactgagcctgacctgtaccgtgtccggcgatagcatcagcagcggcgattactactggggctggatcagacagcctcctggcaaaggactggaatggatcggccacatctactacagcggcgtgacctactacaaccccagcctgaagtccagagtgaccatcagcgtggacaccagccggaaccagttctccctgaagctgtctagcgtgacagccgccgataccgccgtgtactactgcaccagagaggacagcagcaactggcggagtagaggccagggaacactggtcacagttagctctctcgaggacctgaagaacgtgttcccacctgaggtggccgtgttcgagcctagcgaggccgagatcagccacacccagaaagccaccctcgtgtgcctggctaccggcttctaccccgaccatgtggaactgtcttggtgggtcaacggcaaagaggtgcacagcggcgtgtgtaccgacccccagccactgaaagaacagcccgccctgaacgacagccggtactgcctgagcagcagactgagagtgtccgccaccttctggcagaacccccggaaccacttcagatgccaggtgcagttctacggcctgagcgagaacgacgagtggacccaggacagagccaagcccgtgacccagatcgtgtctgccgaagcctggggcagagccgattgcggctttaccagcgagagctaccagcagggcgtgctgagcgccaccatcctgtacgagatcctgctgggcaaggccaccctgtacgccgtgctggtgtctgccctggtgctgatggctatggtcaagcggaaggacagccggggaagggccaagcgatctggatctggagcaacaaacttctcactactcaaacaagcaggtgacgtggaggagaatcccgggcctactagtatggactggatttggcgcatccttttccttgtcggcgctgctaccggcgcgcattccttcgaagtgcagctggttgaatctggcggaggactggttcagcctggcggatctctgagactgtcttgtgccgccagcggcttcagcttcagcgacttttggatgagctgggtccgacaggcccctggcaaaggacttgaatgggtcgccacaatcagccaggccggcagcgagaaggactacgtggactctgtgaagggcagattcaccatcagccgggacaacgccaagaagtccctgtacctccagatgaacagcctgagagccgaggacaccgccgtgtactattgtgcctctggcgtgtacagcttcgactacagaggccagggcaccctggtcacagtctcttctacgcgtatccagaaccctgatcctgccgtgtaccagctgcgggatagcaagagcagcgacaagagcgtgtgtctgttcaccgacttcgacagccagaccaacgtgtcccagagcaaggactccgacgtgtacatcaccgataagtgcgtgctggacatgcggagcatggacttcaagagcaactccgccgtggcctggtccaacaagtccgatttcgcctgcgccaacgccttcaacaacagcattatccccgaggacacattcttcccaagccccgagagcagctgcgacgtgaagctggtggaaaagagcttcgagacagacaccaacctgaacttccagaacctgagcgtgatcggcttcagaatcctgctgctgaaagtggccggctttaacctgctgatgaccctgcggctgtggtccagc

SEQ ID NO: 6619 - DNA, 2553 bp, Artificial Sequence
  Synthetic Polynucloetide
atggccttaccagtgaccgccttgctcctgccgctggccttgctgctccacgccgccaggccgcagctccagctgcaagagtctggacctggcctggtcaagcctagcgagacactgagcctgacctgtaccgtgtccggcgatagcatcagcagcggcgattactactggggctggatcagacagcctcctggcaaaggactggaatggatcggccacatctactacagcggcgtgacctactacaaccccagcctgaagtccagagtgaccatcagcgtggacaccagccggaaccagttctccctgaagctgtctagcgtgacagccgccgataccgccgtgtactactgcaccagagaggacagcagcaactggcggagtagaggccagggaacactggtcacagttagctctctcgaggacctgaagaacgtgttcccacctgaggtggccgtgttcgagcctagcgaggccgagatcagccacacccagaaagccaccctcgtgtgcctggctaccggcttctaccccgaccatgtggaactgtcttggtgggtcaacggcaaagaggtgcacagcggcgtgtgtaccgacccccagccactgaaagaacagcccgccctgaacgacagccggtactgcctgagcagcagactgagagtgtccgccaccttctggcagaacccccggaaccacttcagatgccaggtgcagttctacggcctgagcgagaacgacgagtggacccaggacagagccaagcccgtgacccagatcgtgtctgccgaagcctggggcagagccgattgcggctttaccagcgagagctaccagcagggcgtgctgagcgccaccatcctgtacgagatcctgctgggcaaggccaccctgtacgccgtgctggtgtctgccctggtgctgatggctatggtcaagcggaaggacagccggggaagggccaagcgatctggatctggagcaacaaacttctcactactcaaacaagcaggtgacgtggaggagaatcccgggcctactagtatggactggatttggcgcatccttttccttgtcggcgctgctaccggcgcgcattccttcgaagtgcagctggttgaatctggcggaggactggttcagcctggcggatctctgagactgtcttgtgccgccagcggcttcagcttcagcgacttttggatgagctgggtccgacaggcccctggcaaaggacttgaatgggtcgccacaatcagccaggccggcagcgagaaggactacgtggactctgtgaagggcagattcaccatcagccgggacaacgccaagaagtccctgtacctccagatgaacagcctgagagccgaggacaccgccgtgtactattgtgcctctggcgtgtacagcttcgactacagaggccagggcaccctggtcacagtctcttctacgcgtatccagaaccctgatcctgccgtgtaccagctgcgggatagcaagagcagcgacaagagcgtgtgtctgttcaccgacttcgacagccagaccaacgtgtcccagagcaaggactccgacgtgtacatcaccgataagtgcgtgctggacatgcggagcatggacttcaagagcaactccgccgtggcctggtccaacaagtccgatttcgcctgcgccaacgccttcaacaacagcattatccccgaggacacattcttcccaagccccgagagcagctgcgacgtgaagctggtggaaaagagcttcgagacagacaccaacctgaacttccagaacctgagcgtgatcggcttcagaatcctgctgctgaaagtggccggctttaacctgctgatgaccctgcggctgtggtccagccgcgccaagagaagcggatctggcgtgaagcagaccctgaatttcgacctgctgaagctggctggcgacgtggaatccaacccaggcccttctagaggcgggatccacaccatggctacctacgaggtgctgtgcgaggtggcaagaaagctgggcaccgacgacagagaagtggtgctgttcctgctgaacgtgttcatccctcagcctacactggcccagctgatcggtgcactgagagccctgaaagaggaaggccggctgacctttcctctgctggccgaatgcctgttcagagccggaagaagggatctgctgcgggacctgctgcatctggaccccagatttctggaaagacacctggccggcaccatgagctacttcagcccttaccagctgaccgtgctgcacgttgacggcgaactgtgcgccagagatattcggagcctgatcttcctgagcaaggacaccatcggcagccggtctacccctcagacatttctgcactgggtgtactgcatggaaaacctggacctgctcggccccacagatgtggatgccctgatgtccatgctgagaagcctgagcagagtggacctccagagacaggtgcagacactgatgggactgcacctgagcggacctagccacagccagcactacagacacacccct

SEQ ID NO: 6620 - DNA, 1890 bp, Artificial Sequence
  Synthetic Polynucloetide
atggccttaccagtgaccgccttgctcctgccgctggccttgctgctccacgccgccaggccgcagctccagctgcaagagtctggacctggcctggtcaagcctagcgagacactgagcctgacctgtaccgtgtccggcgatagcatcagcagcggcgattactactggggctggatcagacagcctcctggcaaaggactggaatggatcggccacatctactacagcggcgtgacctactacaaccccagcctgaagtccagagtgaccatcagcgtggacaccagccggaaccagttctccctgaagctgtctagcgtgacagccgccgataccgccgtgtactactgcaccagagaggacagcagcaactggcggagtagaggccagggaacactggtcacagttagctctctcgagatccagaaccctgatcctgccgtgtaccagctgcgggatagcaagagcagcgacaagagcgtgtgtctgttcaccgacttcgacagccagaccaacgtgtcccagagcaaggactccgacgtgtacatcaccgataagtgcgtgctggacatgcggagcatggacttcaagagcaactccgccgtggcctggtccaacaagtccgatttcgcctgcgccaacgccttcaacaacagcattatccccgaggacacattcttcccaagccccgagagcagctgcgacgtgaagctggtggaaaagagcttcgagacagacaccaacctgaacttccagaacctgagcgtgatcggcttcagaatcctgctgctgaaagtggccggctttaacctgctgatgaccctgcggctgtggtccagccgcgccaagagaagcggatctggcgtgaagcagaccctgaatttcgacctgctgaagctggctggcgacgtggaatccaacccaggccctactagtatggactggatttggcgcatccttttccttgtcggcgctgctaccggcgcgcattccttcgaagtgcagctggttgaatctggcggaggactggttcagcctggcggatctctgagactgtcttgtgccgccagcggcttcagcttcagcgacttttggatgagctgggtccgacaggcccctggcaaaggacttgaatgggtcgccacaatcagccaggccggcagcgagaaggactacgtggactctgtgaagggcagattcaccatcagccgggacaacgccaagaagtccctgtacctccagatgaacagcctgagagccgaggacaccgccgtgtactattgtgcctctggcgtgtacagcttcgactacagaggccagggcaccctggtcacagtctcttctacgcgtgaggacctgaagaacgtgttcccacctgaggtggccgtgttcgagcctagcgaggccgagatcagccacacccagaaagccaccctcgtgtgcctggctaccggcttctaccccgaccatgtggaactgtcttggtgggtcaacggcaaagaggtgcacagcggcgtgtgtaccgacccccagccactgaaagaacagcccgccctgaacgacagccggtactgcctgagcagcagactgagagtgtccgccaccttctggcagaacccccggaaccacttcagatgccaggtgcagttctacggcctgagcgagaacgacgagtggacccaggacagagccaagcccgtgacccagatcgtgtctgccgaagcctggggcagagccgattgcggctttaccagcgagagctaccagcagggcgtgctgagcgccaccatcctgtacgagatcctgctgggcaaggccaccctgtacgccgtgctggtgtctgccctggtgctgatggctatggtcaagcggaaggacagccgggga

SEQ ID NO: 6621 - DNA, 2556 bp, Artificial Sequence
  Synthetic Polynucloetide
atggccttaccagtgaccgccttgctcctgccgctggccttgctgctccacgccgccaggccgcagctccagctgcaagagtctggacctggcctggtcaagcctagcgagacactgagcctgacctgtaccgtgtccggcgatagcatcagcagcggcgattactactggggctggatcagacagcctcctggcaaaggactggaatggatcggccacatctactacagcggcgtgacctactacaaccccagcctgaagtccagagtgaccatcagcgtggacaccagccggaaccagttctccctgaagctgtctagcgtgacagccgccgataccgccgtgtactactgcaccagagaggacagcagcaactggcggagtagaggccagggaacactggtcacagttagctctctcgagatccagaaccctgatcctgccgtgtaccagctgcgggatagcaagagcagcgacaagagcgtgtgtctgttcaccgacttcgacagccagaccaacgtgtcccagagcaaggactccgacgtgtacatcaccgataagtgcgtgctggacatgcggagcatggacttcaagagcaactccgccgtggcctggtccaacaagtccgatttcgcctgcgccaacgccttcaacaacagcattatccccgaggacacattcttcccaagccccgagagcagctgcgacgtgaagctggtggaaaagagcttcgagacagacaccaacctgaacttccagaacctgagcgtgatcggcttcagaatcctgctgctgaaagtggccggctttaacctgctgatgaccctgcggctgtggtccagccgcgccaagagaagcggatctggcgtgaagcagaccctgaatttcgacctgctgaagctggctggcgacgtggaatccaacccaggccctactagtatggactggatttggcgcatccttttccttgtcggcgctgctaccggcgcgcattccttcgaagtgcagctggttgaatctggcggaggactggttcagcctggcggatctctgagactgtcttgtgccgccagcggcttcagcttcagcgacttttggatgagctgggtccgacaggcccctggcaaaggacttgaatgggtcgccacaatcagccaggccggcagcgagaaggactacgtggactctgtgaagggcagattcaccatcagccgggacaacgccaagaagtccctgtacctccagatgaacagcctgagagccgaggacaccgccgtgtactattgtgcctctggcgtgtacagcttcgactacagaggccagggcaccctggtcacagtctcttctacgcgtgaggacctgaagaacgtgttcccacctgaggtggccgtgttcgagcctagcgaggccgagatcagccacacccagaaagccaccctcgtgtgcctggctaccggcttctaccccgaccatgtggaactgtcttggtgggtcaacggcaaagaggtgcacagcggcgtgtgtaccgacccccagccactgaaagaacagcccgccctgaacgacagccggtactgcctgagcagcagactgagagtgtccgccaccttctggcagaacccccggaaccacttcagatgccaggtgcagttctacggcctgagcgagaacgacgagtggacccaggacagagccaagcccgtgacccagatcgtgtctgccgaagcctggggcagagccgattgcggctttaccagcgagagctaccagcagggcgtgctgagcgccaccatcctgtacgagatcctgctgggcaaggccaccctgtacgccgtgctggtgtctgccctggtgctgatggctatggtcaagcggaaggacagccggggaagggccaagcgatctggatctggagcaacaaacttctcactactcaaacaagcaggtgacgtggaggagaatcccgggccttctagaggcgggatccacaccatggctacctacgaggtgctgtgcgaggtggcaagaaagctgggcaccgacgacagagaagtggtgctgttcctgctgaacgtgttcatccctcagcctacactggcccagctgatcggtgcactgagagccctgaaagaggaaggccggctgacctttcctctgctggccgaatgcctgttcagagccggaagaagggatctgctgcgggacctgctgcatctggaccccagatttctggaaagacacctggccggcaccatgagctacttcagcccttaccagctgaccgtgctgcacgttgacggcgaactgtgcgccagagatattcggagcctgatcttcctgagcaaggacaccatcggcagccggtctacccctcagacatttctgcactgggtgtactgcatggaaaacctggacctgctcggccccacagatgtggatgccctgatgtccatgctgagaagcctgagcagagtggacctccagagacaggtgcagacactgatgggactgcacctgagcggacctagccacagccagcactacagacacacccct

SEQ ID NO: 6622 - DNA, 2700 bp, Artificial Sequence
  Synthetic Polynucloetide
atggccttaccagtgaccgccttgctcctgccgctggccttgctgctccacgccgccaggccgctcgaggggaaaccaattcccaaccctcttctgggactggattcaaccggcagcggcgaggacctgaagaacgtgttcccacctgaggtggccgtgttcgagcctagcaaggccgagatcgcccacacccagaaagccaccctcgtgtgcctggctaccggcttctaccccgaccatgtggaactgtcttggtgggtcaacggcaaagaggtgcacagcggcgtgtgtaccgacccccagccactgaaagaacagcccgccctgaacgacagccggtactgcctgagcagcagactgagagtgtccgccaccttctggcagaacccccggaaccacttcagatgccaggtgcagttctacggcctgagcgagaacgacgagtggacccaggacagagccaagcccgtgacccagatcgtgtctgccgaagcctggggcagagccgattgcggcatcaccagcgccagctaccaccagggcgtgctgagcgccaccatcctgtacgagatcctgctgggcaaggccaccctgtacgccgtgctggtgtctgccctggtgctgatggctatggtcaagcggaaggacagccggggaagggccaagcgatctggatctggagcaacaaacttctcactactcaaacaagcaggtgacgtggaggagaatcccgggcctactagcatggccttaccagtgaccgccttgctcctgccgctggccttgctgctccacgccgccaggccgcagctccagctgcaagagtctggacctggcctggtcaagcctagcgagacactgagcctgacctgtaccgtgtccggcgatagcatcagcagcggcgattactactggggctggatcagacagcctcctggcaaaggactggaatggatcggccacatctactacagcggcgtgacctactacaaccccagcctgaagtccagagtgaccatcagcgtggacaccagccggaaccagttctccctgaagctgtctagcgtgacagccgccgataccgccgtgtactactgcaccagagaggacagcagcaactggcggagtagaggccagggaacactggtcacagttagctctctcgagagcggcggaggcggatctttcgaagtgcagctggttgaatctggcggaggactggttcagcctggcggatctctgagactgtcttgtgccgccagcggcttcagcttcagcgacttttggatgagctgggtccgacaggcccctggcaaaggacttgaatgggtcgccacaatcagccaggccggcagcgagaaggactacgtggactctgtgaagggcagattcaccatcagccgggacaacgccaagaagtccctgtacctccagatgaacagcctgagagccgaggacaccgccgtgtactattgtgcctctggcgtgtacagcttcgactacagaggccagggcaccctggtcacagtctcttctacgcgtgagcagaaactgatctcggaagaggatgggagcggcatccagaaccctgatcctgccgtgtaccagctgcgggatagcaagagcagcgacaagagcgtgtgtctgttcaccgacttcgacagccagaccaacgtgtcccagagcaaggactccgacgtgtacatcaccgataagtgcgtgctggacatgcggagcatggacttcaagagcaactccgccgtggcctggtccaacaagtccgatttcgcctgcgccaacgccttcaacaacagcattatccccgaggacacattcttcccaagcagcgacgtgccctgcgacgtgaagctggtggaaaagagcttcgagacagacaccaacctgaacttccagaacctgagcgtgatcggcttcagaatcctgctgctgaaagtggccggctttaacctgctgatgaccctgcggctgtggtccagccgcgccaagagaagcggatctggcgtgaagcagaccctgaatttcgacctgctgaagctggctggcgacgtggaatccaacccaggcccttctagaggccatatgaccgagtacaagcccacggtgcgcctcgccacccgcgacgacgtccccagggccgtacgcaccctcgccgccgcgttcgccgactaccccgccacgcgccacaccgtcgatccggaccgccacatcgagcgggtcaccgagctgcaagaactcttcctcacgcgcgtcgggctcgacatcggcaaggtgtgggtcgcggacgacggcgccgcggtggcggtctggaccacgccggagagcgtcgaagcgggggcggtgttcgccgagatcggcccgcgcatggccgagttgagcggttcccggctggccgcgcagcaacagatggaaggcctcctggcgccgcaccggcccaaggagcccgcgtggttcctggccaccgtcggcgtctcgcccgaccaccagggcaagggtctgggcagcgccgtcgtgctccccggagtggaggcggccgagcgcgccggggtgcccgccttcctggagacctccgcgccccgcaacctccccttctacgagcggctcggcttcaccgtcaccgccgacgtcgaggtgcccgaaggaccgcgcacctggtgcatgacccgcaagcccggtgcctga

SEQ ID NO: 6623 - DNA, 2703 bp, Artificial Sequence
  Synthetic Polynucloetide
atggccttaccagtgaccgccttgctcctgccgctggccttgctgctccacgccgccaggccgctcgagcagaaactgatctcggaagaggatctgggctccggcgatcgccctgatcctgccgtgtaccagctgcgggatagcaagagcagcgacaagagcgtgtgtctgttcaccgacttcgacagccagaccaacgtgtcccagagcaaggactccgacgtgtacatcaccgataagtgcgtgctggacatgcggagcatggacttcaagagcaactccgccgtggcctggtccaacaagtccgatttcgcctgcgccaacgccttcaacaacagcattatccccgaggacacattcttcccaagccccgagagcagctgcgacgtgaagctggtggaaaagagcttcgagacagacaccaacctgaacttccagaacctgagcgtgatcggcttcagaatcctgctgctgaaagtggccggctttaacctgctgatgaccctgcggctgtggtccagctctagtcgcgccaagagaagcggatctggcgtgaagcagaccctgaatttcgacctgctgaagctggctggcgacgtggaatccaacccaggccccactagcatggccttaccagtgaccgccttgctcctgccgctggccttgctgctccacgccgccaggccgcagctccagctgcaagagtctggacctggcctggtcaagcctagcgagacactgagcctgacctgtaccgtgtccggcgatagcatcagcagcggcgattactactggggctggatcagacagcctcctggcaaaggactggaatggatcggccacatctactacagcggcgtgacctactacaaccccagcctgaagtccagagtgaccatcagcgtggacaccagccggaaccagttctccctgaagctgtctagcgtgacagccgccgataccgccgtgtactactgcaccagagaggacagcagcaactggcggagtagaggccagggaacactggtcacagttagctctctcgagagcggcggaggcggatctttcgaagtgcagctggttgaatctggcggaggactggttcagcctggcggatctctgagactgtcttgtgccgccagcggcttcagcttcagcgacttttggatgagctgggtccgacaggcccctggcaaaggacttgaatgggtcgccacaatcagccaggccggcagcgagaaggactacgtggactctgtgaagggcagattcaccatcagccgggacaacgccaagaagtccctgtacctccagatgaacagcctgagagccgaggacaccgccgtgtactattgtgcctctggcgtgtacagcttcgactacagaggccagggcaccctggtcacagtctcttctacgcgtgggaaaccaattcccaaccctcttctgggactggattcaaccggcagcggcgaggacctgaagaacgtgttcccacctgaggtggccgtgttcgagcctagcgaggccgagatcagccacacccagaaagccaccctcgtgtgcctggctaccggcttctaccccgaccatgtggaactgtcttggtgggtcaacggcaaagaggtgcacagcggcgtgtgtaccgacccccagccactgaaagaacagcccgccctgaacgacagccggtactgcctgagcagcagactgagagtgtccgccaccttctggcagaacccccggaaccacttcagatgccaggtgcagttctacggcctgagcgagaacgacgagtggacccaggacagagccaagcccgtgacccagatcgtgtctgccgaagcctggggcagagccgattgcggctttaccagcgagagctaccagcagggcgtgctgagcgccaccatcctgtacgagatcctgctgggcaaggccaccctgtacgccgtgctggtgtctgccctggtgctgatggctatggtcaagcggaaggacagccggggaagggccaagcgatctggatctggagcaacaaacttctcactactcaaacaagcaggtgacgtggaggagaatcccgggccttctagaggccatatgaccgagtacaagcccacggtgcgcctcgccacccgcgacgacgtccccagggccgtacgcaccctcgccgccgcgttcgccgactaccccgccacgcgccacaccgtcgatccggaccgccacatcgagcgggtcaccgagctgcaagaactcttcctcacgcgcgtcgggctcgacatcggcaaggtgtgggtcgcggacgacggcgccgcggtggcggtctggaccacgccggagagcgtcgaagcgggggcggtgttcgccgagatcggcccgcgcatggccgagttgagcggttcccggctggccgcgcagcaacagatggaaggcctcctggcgccgcaccggcccaaggagcccgcgtggttcctggccaccgtcggcgtctcgcccgaccaccagggcaagggtctgggcagcgccgtcgtgctccccggagtggaggcggccgagcgcgccggggtgcccgccttcctggagacctccgcgccccgcaacctccccttctacgagcggctcggcttcaccgtcaccgccgacgtcgaggtgcccgaaggaccgcgcacctggtgcatgacccgcaagcccggtgcctga

SEQ ID NO: 6624 - DNA, 2580 bp, Artificial Sequence
  Synthetic Polynucloetide
atggccttaccagtgaccgccttgctcctgccgctggccttgctgctccacgccgccaggccgcagctccagctgcaagagtctggacctggcctggtcaagcctagcgagacactgagcctgacctgtaccgtgtccggcgatagcatcagcagcggcgattactactggggctggatcagacagcctcctggcaaaggactggaatggatcggccacatctactacagcggcgtgacctactacaaccccagcctgaagtccagagtgaccatcagcgtggacaccagccggaaccagttctccctgaagctgtctagcgtgacagccgccgataccgccgtgtactactgcaccagagaggacagcagcaactggcggagtagaggccagggaacactggtcacagttagctctctcgaggacctgaagaacgtgttcccacctgaggtggccgtgttcgagcctagcgaggccgagatcagccacacccagaaagccaccctcgtgtgcctggctaccggcttctaccccgaccatgtggaactgtcttggtgggtcaacggcaaagaggtgcacagcggcgtgtctaccgacccccagccactgaaagaacagcccgccctgaacgacagccggtactgcctgagcagcagactgagagtgtccgccaccttctggcagaacccccggaaccacttcagatgccaggtgcagttctacggcctgagcgagaacgacgagtggacccaggacagagccaagcccgtgacccagatcgtgtctgccgaagcctggggcagagccgattgcggctttaccagcgagagctaccagcagggcgtgctgagcgccaccatcctgtacgagatcctgctgggcaaggccaccctgtacgccgtgctggtgtctgccctggtgctgatggctatggtcaagcggaaggacagccggggaagggccaagcgatctggatctggagcaacaaacttctcactactcaaacaagcaggtgacgtggaggagaatcccgggcctactagtatggactggatttggcgcatccttttccttgtcggcgctgctaccggcgcgcattccttcgaagtgcagctggttgaatctggcggaggactggttcagcctggcggatctctgagactgtcttgtgccgccagcggcttcagcttcagcgacttttggatgagctgggtccgacaggcccctggcaaaggacttgaatgggtcgccacaatcagccaggccggcagcgagaaggactacgtggactctgtgaagggcagattcaccatcagccgggacaacgccaagaagtccctgtacctccagatgaacagcctgagagccgaggacaccgccgtgtactattgtgcctctggcgtgtacagcttcgactacagaggccagggcaccctggtcacagtctcttctacgcgtatccagaaccctgatcctgccgtgtaccagctgcgggatagcaagagcagcgacaagagcgtgtgtctgttcaccgacttcgacagccagaccaacgtgtcccagagcaaggactccgacgtgtacatcaccgataagaccgtgctggacatgcggagcatggacttcaagagcaactccgccgtggcctggtccaacaagtccgatttcgcctgcgccaacgccttcaacaacagcattatccccgaggacacattcttcccaagccccgagagcagctgcgacgtgaagctggtggaaaagagcttcgagacagacaccaacctgaacttccagaacctgagcgtgatcggcttcagaatcctgctgctgaaagtggccggctttaacctgctgatgaccctgcggctgtggtccagccgcgccaagagaagcggatctggcgtgaagcagaccctgaatttcgacctgctgaagctggctggcgacgtggaatccaacccaggcccttctagaggccatatgaccgagtacaagcccacggtgcgcctcgccacccgcgacgacgtccccagggccgtacgcaccctcgccgccgcgttcgccgactaccccgccacgcgccacaccgtcgatccggaccgccacatcgagcgggtcaccgagctgcaagaactcttcctcacgcgcgtcgggctcgacatcggcaaggtgtgggtcgcggacgacggcgccgcggtggcggtctggaccacgccggagagcgtcgaagcgggggcggtgttcgccgagatcggcccgcgcatggccgagttgagcggttcccggctggccgcgcagcaacagatggaaggcctcctggcgccgcaccggcccaaggagcccgcgtggttcctggccaccgtcggcgtctcgcccgaccaccagggcaagggtctgggcagcgccgtcgtgctccccggagtggaggcggccgagcgcgccggggtgcccgccttcctggagacctccgcgccccgcaacctccccttctacgagcggctcggcttcaccgtcaccgccgacgtcgaggtgcccgaaggaccgcgcacctggtgcatgacccgcaagcccggtgcctga

SEQ ID NO: 6625 - DNA, 2826 bp, Artificial Sequence
  Synthetic Polynucloetide
atggccttaccagtgaccgccttgctcctgccgctggccttgctgctccacgccgccaggccgcagctccagctgcaagagtctggacctggcctggtcaagcctagcgagacactgagcctgacctgtaccgtgtccggcgatagcatcagcagcggcgattactactggggctggatcagacagcctcctggcaaaggactggaatggatcggccacatctactacagcggcgtgacctactacaaccccagcctgaagtccagagtgaccatcagcgtggacaccagccggaaccagttctccctgaagctgtctagcgtgacagccgccgataccgccgtgtactactgcaccagagaggacagcagcaactggcggagtagaggccagggaacactggtcacagttagctctctcgaggacctgaagaacgtgttcccacctgaggtggccgtgttcgagcctagcgaggccgagatcagccacacccagaaagccaccctcgtgtgcctggctaccggcttctaccccgaccatgtggaactgtcttggtgggtcaacggcaaagaggtgcacagcggcgtgtctaccgacccccagccactgaaagaacagcccgccctgaacgacagccggtactgcctgagcagcagactgagagtgtccgccaccttctggcagaacccccggaaccacttcagatgccaggtgcagttctacggcctgagcgagaacgacgagtggacccaggacagagccaagcccgtgacccagatcgtgtctgccgaagcctggggcagagccgattgcggctttaccagcgagagctaccagcagggcgtgctgagcgccaccatcctgtacgagatcctgctgggcaaggccaccctgtacgccgtgctggtgtctgccctggtgctgatggctatggtcaagcggaaggacagccggggaagggccaagcgatctggatctggagcaacaaacttctcactactcaaacaagcaggtgacgtggaggagaatcccgggcctactagtatggactggatttggcgcatccttttccttgtcggcgctgctaccggcgcgcattccttcgaagtgcagctggttgaatctggcggaggactggttcagcctggcggatctctgagactgtcttgtgccgccagcggcttcagcttcagcgacttttggatgagctgggtccgacaggcccctggcaaaggacttgaatgggtcgccacaatcagccaggccggcagcgagaaggactacgtggactctgtgaagggcagattcaccatcagccgggacaacgccaagaagtccctgtacctccagatgaacagcctgagagccgaggacaccgccgtgtactattgtgcctctggcgtgtacagcttcgactacagaggccagggcaccctggtcacagtctcttctacgcgtgagcagaaactgatctcggaagaggatgggagcggcaccccattcccttctctggcccctcccatcatgctgctggtggacggcaagcagcagatggtggtcgtgtgcctggtgctggatgtggccccacctggactggacagccccatctggtttagcgccggcaatggctctgccctggacgcctttacctacggcccaagccctgccaccgatggcacctggacaaatctggcccacctgagcctgcccagcgaggaactggcttcttgggagcctctcgtgtgccacacaggacctggcgctgagggacacagcagatccacccagcctatgcacctgtctggcgaggccagcaccgccagaacctgtcctcaggaacctctgagaggcacccctggcggagcactgtggctgggagtgctgagactgctgctgttcaagctgctgctgtttgacctgctgctgacctgctcctgtctgtgcgatcctgccggccctctgccttctcctgccaccaccacaagactgagagccctgggcagccacagactgcaccctgccacagagacaggcggcagagaggccacaagcagccctagaccccagcccagagacagaagatggggcgataccccccctggcagaaagcctggatctccagtccgcgccaagagaagcggatctggcgtgaagcagaccctgaatttcgacctgctgaagctggctggcgacgtggaatccaacccaggcccttctagaggccatatgaccgagtacaagcccacggtgcgcctcgccacccgcgacgacgtccccagggccgtacgcaccctcgccgccgcgttcgccgactaccccgccacgcgccacaccgtcgatccggaccgccacatcgagcgggtcaccgagctgcaagaactcttcctcacgcgcgtcgggctcgacatcggcaaggtgtgggtcgcggacgacggcgccgcggtggcggtctggaccacgccggagagcgtcgaagcgggggcggtgttcgccgagatcggcccgcgcatggccgagttgagcggttcccggctggccgcgcagcaacagatggaaggcctcctggcgccgcaccggcccaaggagcccgcgtggttcctggccaccgtcggcgtctcgcccgaccaccagggcaagggtctgggcagcgccgtcgtgctccccggagtggaggcggccgagcgcgccggggtgcccgccttcctggagacctccgcgccccgcaacctccccttctacgagcggctcggcttcaccgtcaccgccgacgtcgaggtgcccgaaggaccgcgcacctggtgcatgacccgcaagcccggtgcctga

SEQ ID NO: 6626 - DNA, 2865 bp, Artificial Sequence
  Synthetic Polynucloetide
atggccttaccagtgaccgccttgctcctgccgctggccttgctgctccacgccgccaggccgctcgaggacctgaagaacgtgttcccacctgaggtggccgtgttcgagcctagcgaggccgagatcagccacacccagaaagccaccctcgtgtgcctggctaccggcttctaccccgaccatgtggaactgtcttggtgggtcaacggcaaagaggtgcacagcggcgtgtctaccgacccccagccactgaaagaacagcccgccctgaacgacagccggtactgcctgagcagcagactgagagtgtccgccaccttctggcagaacccccggaaccacttcagatgccaggtgcagttctacggcctgagcgagaacgacgagtggacccaggacagagccaagcccgtgacccagatcgtgtctgccgaagcctggggcagagccgattgcggctttaccagcgagagctaccagcagggcgtgctgagcgccaccatcctgtacgagatcctgctgggcaaggccaccctgtacgccgtgctggtgtctgccctggtgctgatggctatggtcaagcggaaggacagccggggaagggccaagcgatctggatctggagcaacaaacttctcactactcaaacaagcaggtgacgtggaggagaatcccgggcctactagcatggccttaccagtgaccgccttgctcctgccgctggccttgctgctccacgccgccaggccgcagctccagctgcaagagtctggacctggcctggtcaagcctagcgagacactgagcctgacctgtaccgtgtccggcgatagcatcagcagcggcgattactactggggctggatcagacagcctcctggcaaaggactggaatggatcggccacatctactacagcggcgtgacctactacaaccccagcctgaagtccagagtgaccatcagcgtggacaccagccggaaccagttctccctgaagctgtctagcgtgacagccgccgataccgccgtgtactactgcaccagagaggacagcagcaactggcggagtagaggccagggaacactggtcacagttagctctctcgagagcggcggaggcggatctttcgaagtgcagctggttgaatctggcggaggactggttcagcctggcggatctctgagactgtcttgtgccgccagcggcttcagcttcagcgacttttggatgagctgggtccgacaggcccctggcaaaggacttgaatgggtcgccacaatcagccaggccggcagcgagaaggactacgtggactctgtgaagggcagattcaccatcagccgggacaacgccaagaagtccctgtacctccagatgaacagcctgagagccgaggacaccgccgtgtactattgtgcctctggcgtgtacagcttcgactacagaggccagggcaccctggtcacagtctcttctacgcgtgagcagaaactgatctcggaagaggatctggggagcggcaccccattcccttctctggcccctcccatcatgctgctggtggacggcaagcagcagatggtggtcgtgtgcctggtgctggatgtggccccacctggactggacagccccatctggtttagcgccggcaatggctctgccctggacgcctttacctacggcccaagccctgccaccgatggcacctggacaaatctggcccacctgagcctgcccagcgaggaactggcttcttgggagcctctcgtgtgccacacaggacctggcgctgagggacacagcagatccacccagcctatgcacctgtctggcgaggccagcaccgccagaacctgtcctcaggaacctctgagaggcacccctggcggagcactgtggctgggagtgctgagactgctgctgttcaagctgctgctgtttgacctgctgctgacctgctcctgtctgtgcgatcctgccggccctctgccttctcctgccaccaccacaagactgagagccctgggcagccacagactgcaccctgccacagagacaggcggcagagaggccacaagcagccctagaccccagcccagagacagaagatggggcgataccccccctggcagaaagcctggatctccagtccgcgccaagagaagcggatctggcgtgaagcagaccctgaatttcgacctgctgaagctggctggcgacgtggaatccaacccaggcccttctagatctagaggccatatgaccgagtacaagcccacggtgcgcctcgccacccgcgacgacgtccccagggccgtacgcaccctcgccgccgcgttcgccgactaccccgccacgcgccacaccgtcgatccggaccgccacatcgagcgggtcaccgagctgcaagaactcttcctcacgcgcgtcgggctcgacatcggcaaggtgtgggtcgcggacgacggcgccgcggtggcggtctggaccacgccggagagcgtcgaagcgggggcggtgttcgccgagatcggcccgcgcatggccgagttgagcggttcccggctggccgcgcagcaacagatggaaggcctcctggcgccgcaccggcccaaggagcccgcgtggttcctggccaccgtcggcgtctcgcccgaccaccagggcaagggtctgggcagcgccgtcgtgctccccggagtggaggcggccgagcgcgccggggtgcccgccttcctggagacctccgcgccccgcaacctccccttctacgagcggctcggcttcaccgtcaccgccgacgtcgaggtgcccgaaggaccgcgcacctggtgcatgacccgcaagcccggtgcctga

SEQ ID NO: 6627 - DNA, 2691 bp, Artificial Sequence
  Synthetic Polynucloetide
atggccttaccagtgaccgccttgctcctgccgctggccttgctgctccacgccgccaggccgcagctccagctgcaagagtctggacctggcctggtcaagcctagcgagacactgagcctgacctgtaccgtgtccggcgatagcatcagcagcggcgattactactggggctggatcagacagcctcctggcaaaggactggaatggatcggccacatctactacagcggcgtgacctactacaaccccagcctgaagtccagagtgaccatcagcgtggacaccagccggaaccagttctccctgaagctgtctagcgtgacagccgccgataccgccgtgtactactgcaccagagaggacagcagcaactggcggagtagaggccagggaacactggtcacagttagctctctcgaggggaaaccaattcccaaccctcttctgggactggattcaaccggcagcggcgacaagcagctggacgccgacgtgtcccccaagcctaccatcttcctgccctctatcgccgagacaaagctccagaaggccggcacctacctgtgcctgctggaaaagttcttcccagatgtgattaagatccactggcaggaaaagaagtccaacaccatcctgggcagccaggaaggcaacaccatgaagaccaacgacacctacatgaagttcagctggctgaccgtgcccgagaagtccctggacaaagaacacagatgcatcgtgcggcacgaaaacaacaagaacggcgtggaccaggaaatcatcttcccacccatcaagaccgatgtgattacaatggaccccaaggacaactgctccaaggacgccaacgataccctgctgctccagctgaccaacaccagcgcctactacatgtacttgttgctgctgctgaagtccgtggtgtacttcgccatcatcacatgctgcctgctgcggagaaccgccttctgctgcaacggcgagaagtctagggccaagcgatctggatctggagcaacaaacttctcactactcaaacaagcaggtgacgtggaggagaatcccgggcctactagtatggactggatttggcgcatccttttccttgtcggcgctgctaccggcgcgcattccttcgaagtgcagctggttgaatctggcggaggactggttcagcctggcggatctctgagactgtcttgtgccgccagcggcttcagcttcagcgacttttggatgagctgggtccgacaggcccctggcaaaggacttgaatgggtcgccacaatcagccaggccggcagcgagaaggactacgtggactctgtgaagggcagattcaccatcagccgggacaacgccaagaagtccctgtacctccagatgaacagcctgagagccgaggacaccgccgtgtactattgtgcctctggcgtgtacagcttcgactacagaggccagggcaccctggtcacagtctcttctacgcgtgagcagaaactgatctcggaagaggatgggagcggcagccagcctcacaccaagcccagcgtgttcgtgatgaagaacggcaccaacgtggcctgcctcgtgaaagagttctaccccaaggacatcaggatcaacctggtgtccagcaagaagatcaccgagttcgaccccgccatcgtgatctcccccagcggcaagtacaacgccgtgaagctggggaagtacgaggacagcaacagcgtgacctgctccgtgcagcacgacaacaagaccgtgcacagcaccgactttgaagtgaaaaccgactccaccgaccacgtgaagcccaaagagacagagaacaccaagcagcccagcaagagctgccacaagcccaaggccatcgtgcacaccgagaaagtgaacatgatgagcctgaccgtgctgggcctgcggatgctgttcgccaaaaccgtggccgtgaacttcctgctgaccgccaagctgttcttcctccgcgccaagagaagcggatctggcgtgaagcagaccctgaatttcgacctgctgaagctggctggcgacgtggaatccaacccaggcccttctagaggccatatgaccgagtacaagcccacggtgcgcctcgccacccgcgacgacgtccccagggccgtacgcaccctcgccgccgcgttcgccgactaccccgccacgcgccacaccgtcgatccggaccgccacatcgagcgggtcaccgagctgcaagaactcttcctcacgcgcgtcgggctcgacatcggcaaggtgtgggtcgcggacgacggcgccgcggtggcggtctggaccacgccggagagcgtcgaagcgggggcggtgttcgccgagatcggcccgcgcatggccgagttgagcggttcccggctggccgcgcagcaacagatggaaggcctcctggcgccgcaccggcccaaggagcccgcgtggttcctggccaccgtcggcgtctcgcccgaccaccagggcaagggtctgggcagcgccgtcgtgctccccggagtggaggcggccgagcgcgccggggtgcccgccttcctggagacctccgcgccccgcaacctccccttctacgagcggctcggcttcaccgtcaccgccgacgtcgaggtgcccgaaggaccgcgcacctggtgcatgacccgcaagcccggtgcctga

SEQ ID NO: 6628 - DNA, 1902 bp, Artificial Sequence
  Synthetic Polynucloetide
atggccttaccagtgaccgccttgctcctgccgctggccttgctgctccacgccgccaggccgcagctccagctgcaagagtctggacctggcctggtcaagcctagcgagacactgagcctgacctgtaccgtgtccggcgatagcatcagcagcggcgattactactggggctggatcagacagcctcctggcaaaggactggaatggatcggccacatctactacagcggcgtgacctactacaaccccagcctgaagtccagagtgaccatcagcgtggacaccagccggaaccagttctccctgaagctgtctagcgtgacagccgccgataccgccgtgtactactgcaccagagaggacagcagcaactggcggagtagaggccagggaacactggtcacagttagctctctcgagagccagcctcacaccaagcccagcgtgttcgtgatgaagaacggcaccaacgtggcctgcctcgtgaaagagttctaccccaaggacatcaggatcaacctggtgtccagcaagaagatcaccgagttcgaccccgccatcgtgatctcccccagcggcaagtacaacgccgtgaagctggggaagtacgaggacagcaacagcgtgacctgctccgtgcagcacgacaacaagaccgtgcacagcaccgactttgaagtgaaaaccgactccaccgaccacgtgaagcccaaagagacagagaacaccaagcagcccagcaagagctgccacaagcccaaggccatcgtgcacaccgagaaagtgaacatgatgagcctgaccgtgctgggcctgcggatgctgttcgccaaaaccgtggccgtgaacttcctgctgaccgccaagctgttcttcctcagggccaagcgatctggatctggagcaacaaacttctcactactcaaacaagcaggtgacgtggaggagaatcccgggcctactagtatggactggatttggcgcatccttttccttgtcggcgctgctaccggcgcgcattccttcgaagtgcagctggttgaatctggcggaggactggttcagcctggcggatctctgagactgtcttgtgccgccagcggcttcagcttcagcgacttttggatgagctgggtccgacaggcccctggcaaaggacttgaatgggtcgccacaatcagccaggccggcagcgagaaggactacgtggactctgtgaagggcagattcaccatcagccgggacaacgccaagaagtccctgtacctccagatgaacagcctgagagccgaggacaccgccgtgtactattgtgcctctggcgtgtacagcttcgactacagaggccagggcaccctggtcacagtctcttctacgcgtgacaagcagctggacgccgacgtgtcccccaagcctaccatcttcctgccctctatcgccgagacaaagctccagaaggccggcacctacctgtgcctgctggaaaagttcttcccagatgtgattaagatccactggcaggaaaagaagtccaacaccatcctgggcagccaggaaggcaacaccatgaagaccaacgacacctacatgaagttcagctggctgaccgtgcccgagaagtccctggacaaagaacacagatgcatcgtgcggcacgaaaacaacaagaacggcgtggaccaggaaatcatcttcccacccatcaagaccgatgtgattacaatggaccccaaggacaactgctccaaggacgccaacgataccctgctgctccagctgaccaacaccagcgcctactacatgtacttgttgctgctgctgaagtccgtggtgtacttcgccatcatcacatgctgcctgctgcggagaaccgccttctgctgcaacggcgagaagtct

SEQ ID NO: 6629 - DNA, 2721 bp, Artificial Sequence
  Synthetic Polynucloetide
atggccttaccagtgaccgccttgctcctgccgctggccttgctgctccacgccgccaggccgctcgaggggaaaccaattcccaaccctcttctgggactggattcaaccggcagcggcgacaagcagctggacgccgacgtgtcccccaagcctaccatcttcctgccctctatcgccgagacaaagctccagaaggccggcacctacctgtgcctgctggaaaagttcttcccagatgtgattaagatccactggcaggaaaagaagtccaacaccatcctgggcagccaggaaggcaacaccatgaagaccaacgacacctacatgaagttcagctggctgaccgtgcccgagaagtccctggacaaagaacacagatgcatcgtgcggcacgaaaacaacaagaacggcgtggaccaggaaatcatcttcccacccatcaagaccgatgtgattacaatggaccccaaggacaactgctccaaggacgccaacgataccctgctgctccagctgaccaacaccagcgcctactacatgtacttgttgctgctgctgaagtccgtggtgtacttcgccatcatcacatgctgcctgctgcggagaaccgccttctgctgcaacggcgagaagtctagggccaagcgatctggatctggagcaacaaacttctcactactcaaacaagcaggtgacgtggaggagaatcccgggcctactagcatggccttaccagtgaccgccttgctcctgccgctggccttgctgctccacgccgccaggccgcagctccagctgcaagagtctggacctggcctggtcaagcctagcgagacactgagcctgacctgtaccgtgtccggcgatagcatcagcagcggcgattactactggggctggatcagacagcctcctggcaaaggactggaatggatcggccacatctactacagcggcgtgacctactacaaccccagcctgaagtccagagtgaccatcagcgtggacaccagccggaaccagttctccctgaagctgtctagcgtgacagccgccgataccgccgtgtactactgcaccagagaggacagcagcaactggcggagtagaggccagggaacactggtcacagttagctctctcgagagcggcggaggcggatctttcgaagtgcagctggttgaatctggcggaggactggttcagcctggcggatctctgagactgtcttgtgccgccagcggcttcagcttcagcgacttttggatgagctgggtccgacaggcccctggcaaaggacttgaatgggtcgccacaatcagccaggccggcagcgagaaggactacgtggactctgtgaagggcagattcaccatcagccgggacaacgccaagaagtccctgtacctccagatgaacagcctgagagccgaggacaccgccgtgtactattgtgcctctggcgtgtacagcttcgactacagaggccagggcaccctggtcacagtctcttctacgcgtgagcagaaactgatctcggaagaggatgggagcggcagccagcctcacaccaagcccagcgtgttcgtgatgaagaacggcaccaacgtggcctgcctcgtgaaagagttctaccccaaggacatcaggatcaacctggtgtccagcaagaagatcaccgagttcgaccccgccatcgtgatctcccccagcggcaagtacaacgccgtgaagctggggaagtacgaggacagcaacagcgtgacctgctccgtgcagcacgacaacaagaccgtgcacagcaccgactttgaagtgaaaaccgactccaccgaccacgtgaagcccaaagagacagagaacaccaagcagcccagcaagagctgccacaagcccaaggccatcgtgcacaccgagaaagtgaacatgatgagcctgaccgtgctgggcctgcggatgctgttcgccaaaaccgtggccgtgaacttcctgctgaccgccaagctgttcttcctccgcgccaagagaagcggatctggcgtgaagcagaccctgaatttcgacctgctgaagctggctggcgacgtggaatccaacccaggcccttctagaggccatatgaccgagtacaagcccacggtgcgcctcgccacccgcgacgacgtccccagggccgtacgcaccctcgccgccgcgttcgccgactaccccgccacgcgccacaccgtcgatccggaccgccacatcgagcgggtcaccgagctgcaagaactcttcctcacgcgcgtcgggctcgacatcggcaaggtgtgggtcgcggacgacggcgccgcggtggcggtctggaccacgccggagagcgtcgaagcgggggcggtgttcgccgagatcggcccgcgcatggccgagttgagcggttcccggctggccgcgcagcaacagatggaaggcctcctggcgccgcaccggcccaaggagcccgcgtggttcctggccaccgtcggcgtctcgcccgaccaccagggcaagggtctgggcagcgccgtcgtgctccccggagtggaggcggccgagcgcgccggggtgcccgccttcctggagacctccgcgccccgcaacctccccttctacgagcggctcggcttcaccgtcaccgccgacgtcgaggtgcccgaaggaccgcgcacctggtgcatgacccgcaagcccggtgcctga

SEQ ID NO: 6630 - DNA, 3111 bp, Artificial Sequence
  Synthetic Polynucloetide
atggccttaccagtgaccgccttgctcctgccgctggccttgctgctccacgccgccaggccgcagctccagctgcaagagtctggacctggcctggtcaagcctagcgagacactgagcctgacctgtaccgtgtccggcgatagcatcagcagcggcgattactactggggctggatcagacagcctcctggcaaaggactggaatggatcggccacatctactacagcggcgtgacctactacaaccccagcctgaagtccagagtgaccatcagcgtggacaccagccggaaccagttctccctgaagctgtctagcgtgacagccgccgataccgccgtgtactactgcaccagagaggacagcagcaactggcggagtagaggccagggaacactggtcacagttagctctggacagcctaaggccaatcctaccgtgacactgttccctccaagcagcgaagaactccaggccaacaaggccacacttgtgtgcctgatctccgacttctaccctggggctgtgacagtggcttggaaggccgatggatctcctgtgaaagccggcgtggaaaccaccaagccatccaagcagagcaacaacaaatacgccgccagctcctacctgagcctgacacctgagcagtggaagtcccacagatcctacagctgccaagtgacccacgaaggcagcaccgtggaaaagacagtggcccctacagagtgcagcggatcccagagcttcggcctgctggaccccaagctgtgctacctgctggatggcatcctgttcatctacggcgtgatcctgaccgccctgttcctgagagtgaagttcagcagaagcgccgacgcccctgcctaccagcagggacagaaccaactgtacaacgagctgaacctgggcagacgggaagagtacgacgtgctggacaagcggagaggcagggaccctgagatgggcggaaagccccagcggagaaagaacccccaggaaggactgtataacgaactccagaaagacaagatggccgaagcctacagcgagatcggcatgaagggcgagcggagaagaggcaagggccacgatggcctgtaccagggcctgagcaccgccaccaaggacacctatgacgccctgcacatgcaggccctgcctccaagaagggccaagcgatctggatctggagcaacaaacttctcactactcaaacaagcaggtgacgtggaggagaatcccgggcctactagtatggactggatttggcgcatccttttccttgtcggcgctgctaccggcgcgcattccttcgaagtgcagctggttgaatctggcggaggactggttcagcctggcggatctctgagactgtcttgtgccgccagcggcttcagcttcagcgacttttggatgagctgggtccgacaggcccctggcaaaggacttgaatgggtcgccacaatcagccaggccggcagcgagaaggactacgtggactctgtgaagggcagattcaccatcagccgggacaacgccaagaagtccctgtacctccagatgaacagcctgagagccgaggacaccgccgtgtactattgtgcctctggcgtgtacagcttcgactacagaggccagggcaccctggtcacagtctcttctgcctctacaaagggaccctccgtgtttcctctggctcccagcagcaagtctacaagcggaggaacagccgctctgggctgcctggtcaaggattactttcccgagcctgtgaccgtgtcctggaatagcggagcactgacaagcggcgtgcacacctttccagccgtgctgcaaagcagcggcctgtactctctgagcagcgtggtcacagtgcctagctctagcctgggcacccagacctacatctgcaatgtgaaccacaagcctagcaacaccaaggtggacaagagagtggaacccaagagctgtggtacccagagttttgggttgttggaccctaaattgtgctatctgttggacggaatcctgttcatttacggagtgatcctgaccgcattgttcctgcgggttaagttttccagatccgcagacgcacccgcttaccaacaagggcagaaccaactctacaatgaacttaatttggggcggagggaagagtacgacgttctggacaaaaggaggggacgagatcccgagatgggcggaaagcctcagcgaaggaagaatccgcaagaggggctttataacgaactccagaaagataaaatggcagaagcctatagtgagattgggatgaagggagaaaggaggaggggtaaaggtcacgatgggttgtaccaaggattgagcacagccactaaagatacctatgatgcgctccacatgcaggccctgccgccaagacgcgccaagagaagcggatctggcgtgaagcagaccctgaatttcgacctgctgaagctggctggcgacgtggaatccaacccaggcccttctagaggccatatgaccgagtacaagcccacggtgcgcctcgccacccgcgacgacgtccccagggccgtacgcaccctcgccgccgcgttcgccgactaccccgccacgcgccacaccgtcgatccggaccgccacatcgagcgggtcaccgagctgcaagaactcttcctcacgcgcgtcgggctcgacatcggcaaggtgtgggtcgcggacgacggcgccgcggtggcggtctggaccacgccggagagcgtcgaagcgggggcggtgttcgccgagatcggcccgcgcatggccgagttgagcggttcccggctggccgcgcagcaacagatggaaggcctcctggcgccgcaccggcccaaggagcccgcgtggttcctggccaccgtcggcgtctcgcccgaccaccagggcaagggtctgggcagcgccgtcgtgctccccggagtggaggcggccgagcgcgccggggtgcccgccttcctggagacctccgcgccccgcaacctccccttctacgagcggctcggcttcaccgtcaccgccgacgtcgaggtgcccgaaggaccgcgcacctggtgcatgacccgcaagcccggtgcctga

SEQ ID NO: 6631 - DNA, 2466 bp, Artificial Sequence
  Synthetic Polynucloetide
atggccttaccagtgaccgccttgctcctgccgctggccttgctgctccacgccgccaggccgcagctccagctgcaagagtctggacctggcctggtcaagcctagcgagacactgagcctgacctgtaccgtgtccggcgatagcatcagcagcggcgattactactggggctggatcagacagcctcctggcaaaggactggaatggatcggccacatctactacagcggcgtgacctactacaaccccagcctgaagtccagagtgaccatcagcgtggacaccagccggaaccagttctccctgaagctgtctagcgtgacagccgccgataccgccgtgtactactgcaccagagaggacagcagcaactggcggagtagaggccagggaacactggtcacagttagctctctcgaggacctgaagaacgtgttcccacctgaggtggccgtgttcgagcctagcgaggccgagatcagccacacccagaaagccaccctcgtgtgcctggctaccggcttctaccccgaccatgtggaactgtcttggtgggtcaacggcaaagaggtgcacagcggcgtgtctaccgacccccagccactgaaagaacagcccgccctgaacgacagccggtactgcctgagcagcagactgagagtgtccgccaccttctggcagaacccccggaaccacttcagatgccaggtgcagttctacggcctgagcgagaacgacgagtggacccaggacagagccaagcccgtgacccagatcgtgtctgccgaagcctggggcagagccgattgcggatcccagagcttcggcctgctggaccccaagctgtgctacctgctggatggcatcctgttcatctacggcgtgatcctgaccgccctgttcctgagagtgaagttcagcagaagcgccgacgcccctgcctaccagcagggacagaaccaactgtacaacgagctgaacctgggcagacgggaagagtacgacgtgctggacaagcggagaggcagggaccctgagatgggcggaaagccccagcggagaaagaacccccaggaaggactgtataacgaactccagaaagacaagatggccgaagcctacagcgagatcggcatgaagggcgagcggagaagaggcaagggccacgatggcctgtaccagggcctgagcaccgccaccaaggacacctatgacgccctgcacatgcaggccctgcctccaagaagggccaagcgatctggatctggagcaacaaacttctcactactcaaacaagcaggtgacgtggaggagaatcccgggcctactagtatggactggatttggcgcatccttttccttgtcggcgctgctaccggcgcgcattccttcgaagtgcagctggttgaatctggcggaggactggttcagcctggcggatctctgagactgtcttgtgccgccagcggcttcagcttcagcgacttttggatgagctgggtccgacaggcccctggcaaaggacttgaatgggtcgccacaatcagccaggccggcagcgagaaggactacgtggactctgtgaagggcagattcaccatcagccgggacaacgccaagaagtccctgtacctccagatgaacagcctgagagccgaggacaccgccgtgtactattgtgcctctggcgtgtacagcttcgactacagaggccagggcaccctggtcacagtctcttctacgcgtatccagaaccctgatcctgccgtgtaccagctgcgggatagcaagagcagcgacaagagcgtgtgtctgttcaccgacttcgacagccagaccaacgtgtcccagagcaaggactccgacgtgtacatcaccgataagaccgtgctggacatgcggagcatggacttcaagagcaactccgccgtggcctggtccaacaagtccgatttcgcctgcgccaacgccttcaacaacagcattatccccgaggacacattcttcccaagccccgagagcagctgcggtacccagagttttgggttgttggaccctaaattgtgctatctgttggacggaatcctgttcatttacggagtgatcctgaccgcattgttcctgcgggttaagttttccagatccgcagacgcacccgcttaccaacaagggcagaaccaactctacaatgaacttaatttggggcggagggaagagtacgacgttctggacaaaaggaggggacgagatcccgagatgggcggaaagcctcagcgaaggaagaatccgcaagaggggctttataacgaactccagaaagataaaatggcagaagcctatagtgagattgggatgaagggagaaaggaggaggggtaaaggtcacgatgggttgtaccaaggattgagcacagccactaaagatacctatgatgcgctccacatgcaggccctgccgccaaga

SEQ ID NO: 6632 - DNA, 2466 bp, Artificial Sequence
  Synthetic Polynucloetide
atggccttaccagtgaccgccttgctcctgccgctggccttgctgctccacgccgccaggccgcagctccagctgcaagagtctggacctggcctggtcaagcctagcgagacactgagcctgacctgtaccgtgtccggcgatagcatcagcagcggcgattactactggggctggatcagacagcctcctggcaaaggactggaatggatcggccacatctactacagcggcgtgacctactacaaccccagcctgaagtccagagtgaccatcagcgtggacaccagccggaaccagttctccctgaagctgtctagcgtgacagccgccgataccgccgtgtactactgcaccagagaggacagcagcaactggcggagtagaggccagggaacactggtcacagttagctctctcgaggacctgaagaacgtgttcccacctgaggtggccgtgttcgagcctagcaaggccgagatcgcccacacccagaaagccaccctcgtgtgcctggctaccggcttctaccccgaccatgtggaactgtcttggtgggtcaacggcaaagaggtgcacagcggcgtgtgtaccgacccccagccactgaaagaacagcccgccctgaacgacagccggtactgcctgagcagcagactgagagtgtccgccaccttctggcagaacccccggaaccacttcagatgccaggtgcagttctacggcctgagcgagaacgacgagtggacccaggacagagccaagcccgtgacccagatcgtgtctgccgaagcctggggcagagccgattgcggatcccagagcttcggcctgctggaccccaagctgtgctacctgctggatggcatcctgttcatctacggcgtgatcctgaccgccctgttcctgagagtgaagttcagcagaagcgccgacgcccctgcctaccagcagggacagaaccaactgtacaacgagctgaacctgggcagacgggaagagtacgacgtgctggacaagcggagaggcagggaccctgagatgggcggaaagccccagcggagaaagaacccccaggaaggactgtataacgaactccagaaagacaagatggccgaagcctacagcgagatcggcatgaagggcgagcggagaagaggcaagggccacgatggcctgtaccagggcctgagcaccgccaccaaggacacctatgacgccctgcacatgcaggccctgcctccaagaagggccaagcgatctggatctggagcaacaaacttctcactactcaaacaagcaggtgacgtggaggagaatcccgggcctactagtatggactggatttggcgcatccttttccttgtcggcgctgctaccggcgcgcattccttcgaagtgcagctggttgaatctggcggaggactggttcagcctggcggatctctgagactgtcttgtgccgccagcggcttcagcttcagcgacttttggatgagctgggtccgacaggcccctggcaaaggacttgaatgggtcgccacaatcagccaggccggcagcgagaaggactacgtggactctgtgaagggcagattcaccatcagccgggacaacgccaagaagtccctgtacctccagatgaacagcctgagagccgaggacaccgccgtgtactattgtgcctctggcgtgtacagcttcgactacagaggccagggcaccctggtcacagtctcttctacgcgtatccagaaccctgatcctgccgtgtaccagctgcgggatagcaagagcagcgacaagagcgtgtgtctgttcaccgacttcgacagccagaccaacgtgtcccagagcaaggactccgacgtgtacatcaccgataagtgcgtgctggacatgcggagcatggacttcaagagcaactccgccgtggcctggtccaacaagtccgatttcgcctgcgccaacgccttcaacaacagcattatccccgaggacacattcttcccaagcagcgacgtgccctgcggtacccagagttttgggttgttggaccctaaattgtgctatctgttggacggaatcctgttcatttacggagtgatcctgaccgcattgttcctgcgggttaagttttccagatccgcagacgcacccgcttaccaacaagggcagaaccaactctacaatgaacttaatttggggcggagggaagagtacgacgttctggacaaaaggaggggacgagatcccgagatgggcggaaagcctcagcgaaggaagaatccgcaagaggggctttataacgaactccagaaagataaaatggcagaagcctatagtgagattgggatgaagggagaaaggaggaggggtaaaggtcacgatgggttgtaccaaggattgagcacagccactaaagatacctatgatgcgctccacatgcaggccctgccgccaaga

SEQ ID NO: 6633 - DNA, 2679 bp, Artificial Sequence
  Synthetic Polynucloetide
atggccttaccagtgaccgccttgctcctgccgctggccttgctgctccacgccgccaggccgcagctccagctgcaagagtctggacctggcctggtcaagcctagcgagacactgagcctgacctgtaccgtgtccggcgatagcatcagcagcggcgattactactggggctggatcagacagcctcctggcaaaggactggaatggatcggccacatctactacagcggcgtgacctactacaaccccagcctgaagtccagagtgaccatcagcgtggacaccagccggaaccagttctccctgaagctgtctagcgtgacagccgccgataccgccgtgtactactgcaccagagaggacagcagcaactggcggagtagaggccagggaacactggtcacagttagctctctcgaggggaaaccaattcccaaccctcttctgggactggattcaaccggcagcggcgaggacctgaagaacgtgttcccacctgaggtggccgtgttcgagcctagcgaggccgagatcagccacacccagaaagccaccctcgtgtgcctggctaccggcttctaccccgaccatgtggaactgtcttggtgggtcaacggcaaagaggtgcacagcggcgtgtctaccgacccccagccactgaaagaacagcccgccctgaacgacagccggtactgcctgagcagcagactgagagtgtccgccaccttctggcagaacccccggaaccacttcagatgccaggtgcagttctacggcctgagcgagaacgacgagtggacccaggacagagccaagcccgtgacccagatcgtgtctgccgaagcctggggcagagccgattgcggatcccagagcttcggcctgctggaccccaagctgtgctacctgctggatggcatcctgttcatctacggcgtgatcctgaccgccctgttcctgagagtgaagttcagcagaagcgccgacgcccctgcctaccagcagggacagaaccaactgtacaacgagctgaacctgggcagacgggaagagtacgacgtgctggacaagcggagaggcagggaccctgagatgggcggaaagccccagcggagaaagaacccccaggaaggactgtataacgaactccagaaagacaagatggccgaagcctacagcgagatcggcatgaagggcgagcggagaagaggcaagggccacgatggcctgtaccagggcctgagcaccgccaccaaggacacctatgacgccctgcacatgcaggccctgcctccaagaagggccaagcgatctggatctggagcaacaaacttctcactactcaaacaagcaggtgacgtggaggagaatcccgggcctactagtatggactggatttggcgcatccttttccttgtcggcgctgctaccggcgcgcattccttcgaagtgcagctggttgaatctggcggaggactggttcagcctggcggatctctgagactgtcttgtgccgccagcggcttcagcttcagcgacttttggatgagctgggtccgacaggcccctggcaaaggacttgaatgggtcgccacaatcagccaggccggcagcgagaaggactacgtggactctgtgaagggcagattcaccatcagccgggacaacgccaagaagtccctgtacctccagatgaacagcctgagagccgaggacaccgccgtgtactattgtgcctctggcgtgtacagcttcgactacagaggccagggcaccctggtcacagtctcttctacgcgtgagcagaaactgatctcggaagaggatgggagcggcatccagaaccctgatcctgccgtgtaccagctgcgggatagcaagagcagcgacaagagcgtgtgtctgttcaccgacttcgacagccagaccaacgtgtcccagagcaaggactccgacgtgtacatcaccgataagaccgtgctggacatgcggagcatggacttcaagagcaactccgccgtggcctggtccaacaagtccgatttcgcctgcgccaacgccttcaacaacagcattatccccgaggacacattcttcccaagccccgagagcagctgcggtacccagagttttgggttgttggaccctaaattgtgctatctgttggacggaatcctgttcatttacggagtgatcctgaccgcattgttcctgaggagcaagcggtcacggctgctccacagcgattacatgaatatgacaccacgaagaccgggtcctactcgcaaacactaccaaccctacgcacctccccgcgactttgcagcgtaccgatctcgggttaagttttccagatccgcagacgcacccgcttaccaacaagggcagaaccaactctacaatgaacttaatttggggcggagggaagagtacgacgttctggacaaaaggaggggacgagatcccgagatgggcggaaagcctcagcgaaggaagaatccgcaagaggggctttataacgaactccagaaagataaaatggcagaagcctatagtgagattgggatgaagggagaaaggaggaggggtaaaggtcacgatgggttgtaccaaggattgagcacagccactaaagatacctatgatgcgctccacatgcaggccctgccgccaaga

SEQ ID NO: 6634 - DNA, 2802 bp, Artificial Sequence
  Synthetic Polynucloetide
atggccttaccagtgaccgccttgctcctgccgctggccttgctgctccacgccgccaggccgcagctccagctgcaagagtctggacctggcctggtcaagcctagcgagacactgagcctgacctgtaccgtgtccggcgatagcatcagcagcggcgattactactggggctggatcagacagcctcctggcaaaggactggaatggatcggccacatctactacagcggcgtgacctactacaaccccagcctgaagtccagagtgaccatcagcgtggacaccagccggaaccagttctccctgaagctgtctagcgtgacagccgccgataccgccgtgtactactgcaccagagaggacagcagcaactggcggagtagaggccagggaacactggtcacagttagctctctcgaggggaaaccaattcccaaccctcttctgggactggattcaaccggcagcggcgaggacctgaagaacgtgttcccacctgaggtggccgtgttcgagcctagcgaggccgagatcagccacacccagaaagccaccctcgtgtgcctggctaccggcttctaccccgaccatgtggaactgtcttggtgggtcaacggcaaagaggtgcacagcggcgtgtctaccgacccccagccactgaaagaacagcccgccctgaacgacagccggtactgcctgagcagcagactgagagtgtccgccaccttctggcagaacccccggaaccacttcagatgccaggtgcagttctacggcctgagcgagaacgacgagtggacccaggacagagccaagcccgtgacccagatcgtgtctgccgaagcctggggcagagccgattgcggatcccagagcttcggcctgctggaccccaagctgtgctacctgctggatggcatcctgttcatctacggcgtgatcctgaccgccctgttcctgaggagtaagaggagcaggctcctgcacagtgactacatgaacatgactccacgccgccccggacccacccgcaagcattaccagccctatgccccaccacgcgacttcgcagcctatcgctccagagtgaagttcagcagaagcgccgacgcccctgcctaccagcagggacagaaccaactgtacaacgagctgaacctgggcagacgggaagagtacgacgtgctggacaagcggagaggcagggaccctgagatgggcggaaagccccagcggagaaagaacccccaggaaggactgtataacgaactccagaaagacaagatggccgaagcctacagcgagatcggcatgaagggcgagcggagaagaggcaagggccacgatggcctgtaccagggcctgagcaccgccaccaaggacacctatgacgccctgcacatgcaggccctgcctccaagaagggccaagcgatctggatctggagcaacaaacttctcactactcaaacaagcaggtgacgtggaggagaatcccgggcctactagtatggactggatttggcgcatccttttccttgtcggcgctgctaccggcgcgcattccttcgaagtgcagctggttgaatctggcggaggactggttcagcctggcggatctctgagactgtcttgtgccgccagcggcttcagcttcagcgacttttggatgagctgggtccgacaggcccctggcaaaggacttgaatgggtcgccacaatcagccaggccggcagcgagaaggactacgtggactctgtgaagggcagattcaccatcagccgggacaacgccaagaagtccctgtacctccagatgaacagcctgagagccgaggacaccgccgtgtactattgtgcctctggcgtgtacagcttcgactacagaggccagggcaccctggtcacagtctcttctacgcgtgagcagaaactgatctcggaagaggatgggagcggcatccagaaccctgatcctgccgtgtaccagctgcgggatagcaagagcagcgacaagagcgtgtgtctgttcaccgacttcgacagccagaccaacgtgtcccagagcaaggactccgacgtgtacatcaccgataagaccgtgctggacatgcggagcatggacttcaagagcaactccgccgtggcctggtccaacaagtccgatttcgcctgcgccaacgccttcaacaacagcattatccccgaggacacattcttcccaagccccgagagcagctgcggtacccagagttttgggttgttggaccctaaattgtgctatctgttggacggaatcctgttcatttacggagtgatcctgaccgcattgttcctgaggagcaagcggtcacggctgctccacagcgattacatgaatatgacaccacgaagaccgggtcctactcgcaaacactaccaaccctacgcacctccccgcgactttgcagcgtaccgatctcgggttaagttttccagatccgcagacgcacccgcttaccaacaagggcagaaccaactctacaatgaacttaatttggggcggagggaagagtacgacgttctggacaaaaggaggggacgagatcccgagatgggcggaaagcctcagcgaaggaagaatccgcaagaggggctttataacgaactccagaaagataaaatggcagaagcctatagtgagattgggatgaagggagaaaggaggaggggtaaaggtcacgatgggttgtaccaaggattgagcacagccactaaagatacctatgatgcgctccacatgcaggccctgccgccaaga

SEQ ID NO: 6635 - DNA, 2685 bp, Artificial Sequence
  Synthetic Polynucloetide
atggccttaccagtgaccgccttgctcctgccgctggccttgctgctccacgccgccaggccgcagctccagctgcaagagtctggacctggcctggtcaagcctagcgagacactgagcctgacctgtaccgtgtccggcgatagcatcagcagcggcgattactactggggctggatcagacagcctcctggcaaaggactggaatggatcggccacatctactacagcggcgtgacctactacaaccccagcctgaagtccagagtgaccatcagcgtggacaccagccggaaccagttctccctgaagctgtctagcgtgacagccgccgataccgccgtgtactactgcaccagagaggacagcagcaactggcggagtagaggccagggaacactggtcacagttagctctctcgaggggaaaccaattcccaaccctcttctgggactggattcaaccggcagcggcgaggacctgaagaacgtgttcccacctgaggtggccgtgttcgagcctagcgaggccgagatcagccacacccagaaagccaccctcgtgtgcctggctaccggcttctaccccgaccatgtggaactgtcttggtgggtcaacggcaaagaggtgcacagcggcgtgtctaccgacccccagccactgaaagaacagcccgccctgaacgacagccggtactgcctgagcagcagactgagagtgtccgccaccttctggcagaacccccggaaccacttcagatgccaggtgcagttctacggcctgagcgagaacgacgagtggacccaggacagagccaagcccgtgacccagatcgtgtctgccgaagcctggggcagagccgattgcggatcccagagcttcggcctgctggaccccaagctgtgctacctgctggatggcatcctgttcatctacggcgtgatcctgaccgccctgttcctgagagtgaagttcagcagaagcgccgacgcccctgcctaccagcagggacagaaccaactgtacaacgagctgaacctgggcagacgggaagagtacgacgtgctggacaagcggagaggcagggaccctgagatgggcggaaagccccagcggagaaagaacccccaggaaggactgtataacgaactccagaaagacaagatggccgaagcctacagcgagatcggcatgaagggcgagcggagaagaggcaagggccacgatggcctgtaccagggcctgagcaccgccaccaaggacacctatgacgccctgcacatgcaggccctgcctccaagaagggccaagcgatctggatctggagcaacaaacttctcactactcaaacaagcaggtgacgtggaggagaatcccgggcctactagtatggactggatttggcgcatccttttccttgtcggcgctgctaccggcgcgcattccttcgaagtgcagctggttgaatctggcggaggactggttcagcctggcggatctctgagactgtcttgtgccgccagcggcttcagcttcagcgacttttggatgagctgggtccgacaggcccctggcaaaggacttgaatgggtcgccacaatcagccaggccggcagcgagaaggactacgtggactctgtgaagggcagattcaccatcagccgggacaacgccaagaagtccctgtacctccagatgaacagcctgagagccgaggacaccgccgtgtactattgtgcctctggcgtgtacagcttcgactacagaggccagggcaccctggtcacagtctcttctacgcgtgagcagaaactgatctcggaagaggatctggggagcggcatccagaaccctgatcctgccgtgtaccagctgcgggatagcaagagcagcgacaagagcgtgtgtctgttcaccgacttcgacagccagaccaacgtgtcccagagcaaggactccgacgtgtacatcaccgataagaccgtgctggacatgcggagcatggacttcaagagcaactccgccgtggcctggtccaacaagtccgatttcgcctgcgccaacgccttcaacaacagcattatccccgaggacacattcttcccaagccccgagagcagctgcggtacccagagttttgggttgttggaccctaaattgtgctatctgttggacggaatcctgttcatttacggagtgatcctgaccgcattgttcctgaagagaggccggaagaagctgctgtacatcttcaagcagcctttcatgcggcccgtgcagaccacccaggaagaggacggctgctcctgccggttccccgaggaagaagaaggcggctgcgagctgcgggttaagttttccagatccgcagacgcacccgcttaccaacaagggcagaaccaactctacaatgaacttaatttggggcggagggaagagtacgacgttctggacaaaaggaggggacgagatcccgagatgggcggaaagcctcagcgaaggaagaatccgcaagaggggctttataacgaactccagaaagataaaatggcagaagcctatagtgagattgggatgaagggagaaaggaggaggggtaaaggtcacgatgggttgtaccaaggattgagcacagccactaaagatacctatgatgcgctccacatgcaggccctgccgccaaga

SEQ ID NO: 6636 - DNA, 2811 bp, Artificial Sequence
  Synthetic Polynucloetide
atggccttaccagtgaccgccttgctcctgccgctggccttgctgctccacgccgccaggccgcagctccagctgcaagagtctggacctggcctggtcaagcctagcgagacactgagcctgacctgtaccgtgtccggcgatagcatcagcagcggcgattactactggggctggatcagacagcctcctggcaaaggactggaatggatcggccacatctactacagcggcgtgacctactacaaccccagcctgaagtccagagtgaccatcagcgtggacaccagccggaaccagttctccctgaagctgtctagcgtgacagccgccgataccgccgtgtactactgcaccagagaggacagcagcaactggcggagtagaggccagggaacactggtcacagttagctctctcgaggggaaaccaattcccaaccctcttctgggactggattcaaccggcagcggcgaggacctgaagaacgtgttcccacctgaggtggccgtgttcgagcctagcgaggccgagatcagccacacccagaaagccaccctcgtgtgcctggctaccggcttctaccccgaccatgtggaactgtcttggtgggtcaacggcaaagaggtgcacagcggcgtgtctaccgacccccagccactgaaagaacagcccgccctgaacgacagccggtactgcctgagcagcagactgagagtgtccgccaccttctggcagaacccccggaaccacttcagatgccaggtgcagttctacggcctgagcgagaacgacgagtggacccaggacagagccaagcccgtgacccagatcgtgtctgccgaagcctggggcagagccgattgcggatcccagagcttcggcctgctggaccccaagctgtgctacctgctggatggcatcctgttcatctacggcgtgatcctgaccgccctgttcctgaaacggggcagaaagaaactcctgtatatattcaaacaaccatttatgagaccagtacaaactactcaagaggaagatggctgtagctgccgatttccagaagaagaagaaggaggatgtgaactgagagtgaagttcagcagaagcgccgacgcccctgcctaccagcagggacagaaccaactgtacaacgagctgaacctgggcagacgggaagagtacgacgtgctggacaagcggagaggcagggaccctgagatgggcggaaagccccagcggagaaagaacccccaggaaggactgtataacgaactccagaaagacaagatggccgaagcctacagcgagatcggcatgaagggcgagcggagaagaggcaagggccacgatggcctgtaccagggcctgagcaccgccaccaaggacacctatgacgccctgcacatgcaggccctgcctccaagaagggccaagcgatctggatctggagcaacaaacttctcactactcaaacaagcaggtgacgtggaggagaatcccgggcctactagtatggactggatttggcgcatccttttccttgtcggcgctgctaccggcgcgcattccttcgaagtgcagctggttgaatctggcggaggactggttcagcctggcggatctctgagactgtcttgtgccgccagcggcttcagcttcagcgacttttggatgagctgggtccgacaggcccctggcaaaggacttgaatgggtcgccacaatcagccaggccggcagcgagaaggactacgtggactctgtgaagggcagattcaccatcagccgggacaacgccaagaagtccctgtacctccagatgaacagcctgagagccgaggacaccgccgtgtactattgtgcctctggcgtgtacagcttcgactacagaggccagggcaccctggtcacagtctcttctacgcgtgagcagaaactgatctcggaagaggatctggggagcggcatccagaaccctgatcctgccgtgtaccagctgcgggatagcaagagcagcgacaagagcgtgtgtctgttcaccgacttcgacagccagaccaacgtgtcccagagcaaggactccgacgtgtacatcaccgataagaccgtgctggacatgcggagcatggacttcaagagcaactccgccgtggcctggtccaacaagtccgatttcgcctgcgccaacgccttcaacaacagcattatccccgaggacacattcttcccaagccccgagagcagctgcggtacccagagttttgggttgttggaccctaaattgtgctatctgttggacggaatcctgttcatttacggagtgatcctgaccgcattgttcctgaagagaggccggaagaagctgctgtacatcttcaagcagcctttcatgcggcccgtgcagaccacccaggaagaggacggctgctcctgccggttccccgaggaagaagaaggcggctgcgagctgcgggttaagttttccagatccgcagacgcacccgcttaccaacaagggcagaaccaactctacaatgaacttaatttggggcggagggaagagtacgacgttctggacaaaaggaggggacgagatcccgagatgggcggaaagcctcagcgaaggaagaatccgcaagaggggctttataacgaactccagaaagataaaatggcagaagcctatagtgagattgggatgaagggagaaaggaggaggggtaaaggtcacgatgggttgtaccaaggattgagcacagccactaaagatacctatgatgcgctccacatgcaggccctgccgccaaga

SEQ ID NO: 6637 - DNA, 2484 bp, Artificial Sequence
  Synthetic Polynucloetide
atggccttaccagtgaccgccttgctcctgccgctggccttgctgctccacgccgccaggccgcagctccagctgcaagagtctggacctggcctggtcaagcctagcgagacactgagcctgacctgtaccgtgtccggcgatagcatcagcagcggcgattactactggggctggatcagacagcctcctggcaaaggactggaatggatcggccacatctactacagcggcgtgacctactacaaccccagcctgaagtccagagtgaccatcagcgtggacaccagccggaaccagttctccctgaagctgtctagcgtgacagccgccgataccgccgtgtactactgcaccagagaggacagcagcaactggcggagtagaggccagggaacactggtcacagttagctctctcgagcagagcttcggcctgctggaccccaagctgtgctacctgctggatggcatcctgttcatctacggcgtgatcctgaccgccctgttcctgagagtgaagttcagcagaagcgccgacgcccctgcctaccagcagggacagaaccaactgtacaacgagctgaacctgggcagacgggaagagtacgacgtgctggacaagcggagaggcagggaccctgagatgggcggaaagccccagcggagaaagaacccccaggaaggactgtataacgaactccagaaagacaagatggccgaagcctacagcgagatcggcatgaagggcgagcggagaagaggcaagggccacgatggcctgtaccagggcctgagcaccgccaccaaggacacctatgacgccctgcacatgcaggccctgcctccaagaagggccaagcgatctggatctggagcaacaaacttctcactactcaaacaagcaggtgacgtggaggagaatcccgggcctactagtatggactggatttggcgcatccttttccttgtcggcgctgctaccggcgcgcattccttcgaagtgcagctggttgaatctggcggaggactggttcagcctggcggatctctgagactgtcttgtgccgccagcggcttcagcttcagcgacttttggatgagctgggtccgacaggcccctggcaaaggacttgaatgggtcgccacaatcagccaggccggcagcgagaaggactacgtggactctgtgaagggcagattcaccatcagccgggacaacgccaagaagtccctgtacctccagatgaacagcctgagagccgaggacaccgccgtgtactattgtgcctctggcgtgtacagcttcgactacagaggccagggcaccctggtcacagtctcttctacgcgtcagagttttgggttgttggaccctaaattgtgctatctgttggacggaatcctgttcatttacggagtgatcctgaccgcattgttcctgcgggttaagttttccagatccgcagacgcacccgcttaccaacaagggcagaaccaactctacaatgaacttaatttggggcggagggaagagtacgacgttctggacaaaaggaggggacgagatcccgagatgggcggaaagcctcagcgaaggaagaatccgcaagaggggctttataacgaactccagaaagataaaatggcagaagcctatagtgagattgggatgaagggagaaaggaggaggggtaaaggtcacgatgggttgtaccaaggattgagcacagccactaaagatacctatgatgcgctccacatgcaggccctgccgccaagacgcgccaagagaagcggatctggcgtgaagcagaccctgaatttcgacctgctgaagctggctggcgacgtggaatccaacccaggcccttctagaggccatatgaccgagtacaagcccacggtgcgcctcgccacccgcgacgacgtccccagggccgtacgcaccctcgccgccgcgttcgccgactaccccgccacgcgccacaccgtcgatccggaccgccacatcgagcgggtcaccgagctgcaagaactcttcctcacgcgcgtcgggctcgacatcggcaaggtgtgggtcgcggacgacggcgccgcggtggcggtctggaccacgccggagagcgtcgaagcgggggcggtgttcgccgagatcggcccgcgcatggccgagttgagcggttcccggctggccgcgcagcaacagatggaaggcctcctggcgccgcaccggcccaaggagcccgcgtggttcctggccaccgtcggcgtctcgcccgaccaccagggcaagggtctgggcagcgccgtcgtgctccccggagtggaggcggccgagcgcgccggggtgcccgccttcctggagacctccgcgccccgcaacctccccttctacgagcggctcggcttcaccgtcaccgccgacgtcgaggtgcccgaaggaccgcgcacctggtgcatgacccgcaagcccggtgcctga

SEQ ID NO: 6638 - DNA, 1956 bp, Artificial Sequence
  Synthetic Polynucloetide
atggccttaccagtgaccgccttgctcctgccgctggccttgctgctccacgccgccaggccgcagctccagctgcaagagtctggacctggcctggtcaagcctagcgagacactgagcctgacctgtaccgtgtccggcgatagcatcagcagcggcgattactactggggctggatcagacagcctcctggcaaaggactggaatggatcggccacatctactacagcggcgtgacctactacaaccccagcctgaagtccagagtgaccatcagcgtggacaccagccggaaccagttctccctgaagctgtctagcgtgacagccgccgataccgccgtgtactactgcaccagagaggacagcagcaactggcggagtagaggccagggaacactggtcacagttagctctctcgagggacagcctaaggccaatcctaccgtgacactgttccctccaagcagcgaagaactccaggccaacaaggccacacttgtgtgcctgatctccgacttctaccctggggctgtgacagtggcttggaaggccgatggatctcctgtgaaagccggcgtggaaaccaccaagccatccaagcagagcaacaacaaatacgccgccagctcctacctgagcctgacacctgagcagtggaagtcccacagatcctacagctgccaagtgacccacgaaggcagcaccgtggaaaagacagtggcccctacagagtgcagccccatcaagaccgatgtgattacaatggaccccaaggacaactgctccaaggacgccaacgataccctgctgctccagctgaccaacaccagcgcctactacatgtacttgttgctgctgctgaagtccgtggtgtacttcgccatcatcacatgctgcctgctgcggagaaccgccttctgctgcaacggcgagaagtctagggccaagcgatctggatctggagcaacaaacttctcactactcaaacaagcaggtgacgtggaggagaatcccgggcctactagtatggactggatttggcgcatccttttccttgtcggcgctgctaccggcgcgcattccttcgaagtgcagctggttgaatctggcggaggactggttcagcctggcggatctctgagactgtcttgtgccgccagcggcttcagcttcagcgacttttggatgagctgggtccgacaggcccctggcaaaggacttgaatgggtcgccacaatcagccaggccggcagcgagaaggactacgtggactctgtgaagggcagattcaccatcagccgggacaacgccaagaagtccctgtacctccagatgaacagcctgagagccgaggacaccgccgtgtactattgtgcctctggcgtgtacagcttcgactacagaggccagggcaccctggtcacagtctcttctacgcgtgcctctacaaagggaccctccgtgtttcctctggctcccagcagcaagtctacaagcggaggaacagccgctctgggctgcctggtcaaggattactttcccgagcctgtgaccgtgtcctggaatagcggagcactgacaagcggcgtgcacacctttccagccgtgctgcaaagcagcggcctgtactctctgagcagcgtggtcacagtgcctagctctagcctgggcacccagacctacatctgcaatgtgaaccacaagcctagcaacaccaaggtggacaagagagtggaacccaagagctgtgaagtgaaaaccgactccaccgaccacgtgaagcccaaagagacagagaacaccaagcagcccagcaagagctgccacaagcccaaggccatcgtgcacaccgagaaagtgaacatgatgagcctgaccgtgctgggcctgcggatgctgttcgccaaaaccgtggccgtgaacttcctgctgaccgccaagctgttcttcctc

SEQ ID NO: 6639 - DNA, 1890 bp, Artificial Sequence
  Synthetic Polynucloetide
atggccttaccagtgaccgccttgctcctgccgctggccttgctgctccacgccgccaggccgcagctccagctgcaagagtctggacctggcctggtcaagcctagcgagacactgagcctgacctgtaccgtgtccggcgatagcatcagcagcggcgattactactggggctggatcagacagcctcctggcaaaggactggaatggatcggccacatctactacagcggcgtgacctactacaaccccagcctgaagtccagagtgaccatcagcgtggacaccagccggaaccagttctccctgaagctgtctagcgtgacagccgccgataccgccgtgtactactgcaccagagaggacagcagcaactggcggagtagaggccagggaacactggtcacagttagctctctcgagggacagcctaaggccaatcctaccgtgacactgttccctccaagcagcgaagaactccaggccaacaaggccacacttgtgtgcctgatctccgacttctaccctggggctgtgacagtggcttggaaggccgatggatctcctgtgaaagccggcgtggaaaccaccaagccatccaagcagagcaacaacaaatacgccgccagctcctacctgagcctgacacctgagcagtggaagtcccacagatcctacagctgccaagtgacccacgaaggcagcaccgtggaaaagacagtggcccctacagagtgcagcggcagagccgattgcggcatcaccagcgccagctaccaccagggcgtgctgagcgccaccatcctgtacgagatcctgctgggcaaggccaccctgtacgccgtgctggtgtctgccctggtgctgatggctatggtcaagcggaaggacagccggggaagggccaagcgatctggatctggagcaacaaacttctcactactcaaacaagcaggtgacgtggaggagaatcccgggcctactagtatggactggatttggcgcatccttttccttgtcggcgctgctaccggcgcgcattccttcgaagtgcagctggttgaatctggcggaggactggttcagcctggcggatctctgagactgtcttgtgccgccagcggcttcagcttcagcgacttttggatgagctgggtccgacaggcccctggcaaaggacttgaatgggtcgccacaatcagccaggccggcagcgagaaggactacgtggactctgtgaagggcagattcaccatcagccgggacaacgccaagaagtccctgtacctccagatgaacagcctgagagccgaggacaccgccgtgtactattgtgcctctggcgtgtacagcttcgactacagaggccagggcaccctggtcacagtctcttctacgcgtgcctctacaaagggaccctccgtgtttcctctggctcccagcagcaagtctacaagcggaggaacagccgctctgggctgcctggtcaaggattactttcccgagcctgtgaccgtgtcctggaatagcggagcactgacaagcggcgtgcacacctttccagccgtgctgcaaagcagcggcctgtactctctgagcagcgtggtcacagtgcctagctctagcctgggcacccagacctacatctgcaatgtgaaccacaagcctagcaacaccaaggtggacaagagagtggaacccaagagctgtatccccgaggacacattcttcccaagcagcgacgtgccctgcgacgtgaagctggtggaaaagagcttcgagacagacaccaacctgaacttccagaacctgagcgtgatcggcttcagaatcctgctgctgaaagtggccggctttaacctgctgatgaccctgcggctgtggtccagc

SEQ ID NO: 6640 - DNA, 1890 bp, Artificial Sequence
  Synthetic Polynucloetide
atggccttaccagtgaccgccttgctcctgccgctggccttgctgctccacgccgccaggccgcagctccagctgcaagagtctggacctggcctggtcaagcctagcgagacactgagcctgacctgtaccgtgtccggcgatagcatcagcagcggcgattactactggggctggatcagacagcctcctggcaaaggactggaatggatcggccacatctactacagcggcgtgacctactacaaccccagcctgaagtccagagtgaccatcagcgtggacaccagccggaaccagttctccctgaagctgtctagcgtgacagccgccgataccgccgtgtactactgcaccagagaggacagcagcaactggcggagtagaggccagggaacactggtcacagttagctctctcgagggacagcctaaggccaatcctaccgtgacactgttccctccaagcagcgaagaactccaggccaacaaggccacacttgtgtgcctgatctccgacttctaccctggggctgtgacagtggcttggaaggccgatggatctcctgtgaaagccggcgtggaaaccaccaagccatccaagcagagcaacaacaaatacgccgccagctcctacctgagcctgacacctgagcagtggaagtcccacagatcctacagctgccaagtgacccacgaaggcagcaccgtggaaaagacagtggcccctacagagtgcagcggcagagccgattgcggctttaccagcgagagctaccagcagggcgtgctgagcgccaccatcctgtacgagatcctgctgggcaaggccaccctgtacgccgtgctggtgtctgccctggtgctgatggctatggtcaagcggaaggacagccggggaagggccaagcgatctggatctggagcaacaaacttctcactactcaaacaagcaggtgacgtggaggagaatcccgggcctactagtatggactggatttggcgcatccttttccttgtcggcgctgctaccggcgcgcattccttcgaagtgcagctggttgaatctggcggaggactggttcagcctggcggatctctgagactgtcttgtgccgccagcggcttcagcttcagcgacttttggatgagctgggtccgacaggcccctggcaaaggacttgaatgggtcgccacaatcagccaggccggcagcgagaaggactacgtggactctgtgaagggcagattcaccatcagccgggacaacgccaagaagtccctgtacctccagatgaacagcctgagagccgaggacaccgccgtgtactattgtgcctctggcgtgtacagcttcgactacagaggccagggcaccctggtcacagtctcttctacgcgtgcctctacaaagggaccctccgtgtttcctctggctcccagcagcaagtctacaagcggaggaacagccgctctgggctgcctggtcaaggattactttcccgagcctgtgaccgtgtcctggaatagcggagcactgacaagcggcgtgcacacctttccagccgtgctgcaaagcagcggcctgtactctctgagcagcgtggtcacagtgcctagctctagcctgggcacccagacctacatctgcaatgtgaaccacaagcctagcaacaccaaggtggacaagagagtggaacccaagagctgtatccccgaggacacattcttcccaagccccgagagcagctgcgacgtgaagctggtggaaaagagcttcgagacagacaccaacctgaacttccagaacctgagcgtgatcggcttcagaatcctgctgctgaaagtggccggctttaacctgctgatgaccctgcggctgtggtccagc

SEQ ID NO: 6641 - DNA, 1353 bp, Artificial Sequence
  Synthetic Polynucloetide
atggccttaccagtgaccgccttgctcctgccgctggccttgctgctccacgccgccaggccgcagctccagctgcaagagtctggacctggcctggtcaagcctagcgagacactgagcctgacctgtaccgtgtccggcgatagcatcagcagcggcgattactactggggctggatcagacagcctcctggcaaaggactggaatggatcggccacatctactacagcggcgtgacctactacaaccccagcctgaagtccagagtgaccatcagcgtggacaccagccggaaccagttctccctgaagctgtctagcgtgacagccgccgataccgccgtgtactactgcaccagagaggacagcagcaactggcggagtagaggccagggaacactggtcacagttagctctctcgagagcggcggaggcggatctttcgaagtgcagctggttgaatctggcggaggactggttcagcctggcggatctctgagactgtcttgtgccgccagcggcttcagcttcagcgacttttggatgagctgggtccgacaggcccctggcaaaggacttgaatgggtcgccacaatcagccaggccggcagcgagaaggactacgtggactctgtgaagggcagattcaccatcagccgggacaacgccaagaagtccctgtacctccagatgaacagcctgagagccgaggacaccgccgtgtactattgtgcctctggcgtgtacagcttcgactacagaggccagggcaccctggtcacagtctcttctacgcgtgacggtaacgaggagatgggaggaatcactcaaaccccttacaaagtctcaatttcaggaacaactgttatccttacatgtccccagtatcctggcagcgagatcctttggcagcataacgacaagaatatagggggagatgaagacgataagaatatcggatctgacgaggatcacttgagcctgaaagagttctccgagcttgaacaaagcggatattatgtgtgctatccgcgcgggtcaaagccggaagacgctaacttttacctttatctccgagccagagtgtgcgaaaattgcatggaaatggacgttatgtccgttgctacaatagttatcgtagatatatgcatcacgggtggactgcttctgctggtttattattggtccaagaatagaaaggccaaagctaaacccgtgaccagaggcgctggcgcaggcggaaggcaaaggggacaaaacaaagaacggccaccaccagtgccaaatccagattatgagcctattcggaaaggacagagggacctgtactctggcctgaatcagagaagaatc

SEQ ID NO: 6642 - DNA, 1248 bp, Artificial Sequence
  Synthetic Polynucloetide
atggccttaccagtgaccgccttgctcctgccgctggccttgctgctccacgccgccaggccgcagctccagctgcaagagtctggacctggcctggtcaagcctagcgagacactgagcctgacctgtaccgtgtccggcgatagcatcagcagcggcgattactactggggctggatcagacagcctcctggcaaaggactggaatggatcggccacatctactacagcggcgtgacctactacaaccccagcctgaagtccagagtgaccatcagcgtggacaccagccggaaccagttctccctgaagctgtctagcgtgacagccgccgataccgccgtgtactactgcaccagagaggacagcagcaactggcggagtagaggccagggaacactggtcacagttagctctctcgagagcggcggaggcggatctttcgaagtgcagctggttgaatctggcggaggactggttcagcctggcggatctctgagactgtcttgtgccgccagcggcttcagcttcagcgacttttggatgagctgggtccgacaggcccctggcaaaggacttgaatgggtcgccacaatcagccaggccggcagcgagaaggactacgtggactctgtgaagggcagattcaccatcagccgggacaacgccaagaagtccctgtacctccagatgaacagcctgagagccgaggacaccgccgtgtactattgtgcctctggcgtgtacagcttcgactacagaggccagggcaccctggtcacagtctcttctacgcgtttcaagatccccatcgaggaactggaagatcgggtgttcgtgaactgcaacacctctatcacctgggtggaaggcaccgtgggaacactgctgagcgacatcaccagactggacctcggcaagcggattctggaccctcggggcatctacagatgcaacggcaccgacatctacaaggacaaagaaagcaccgtgcaggtccactacagaatgtgccagtcctgcgtggaactggaccctgctacagtggccggcatcatcgtgaccgatgtgatcgctactctgctgctggctctgggagtgttctgcttcgccggacacgaaacaggcagactgtctggcgctgccgatacacaggccctgctgagaaacgaccaagtgtatcagcccctgcgcgacagagatgatgcccagtattctcacctcggcggcaactgggctagaaacaag

SEQ ID NO: 6643 - DNA, 1278 bp, Artificial Sequence
  Synthetic Polynucloetide
atggccttaccagtgaccgccttgctcctgccgctggccttgctgctccacgccgccaggccgcagctccagctgcaagagtctggacctggcctggtcaagcctagcgagacactgagcctgacctgtaccgtgtccggcgatagcatcagcagcggcgattactactggggctggatcagacagcctcctggcaaaggactggaatggatcggccacatctactacagcggcgtgacctactacaaccccagcctgaagtccagagtgaccatcagcgtggacaccagccggaaccagttctccctgaagctgtctagcgtgacagccgccgataccgccgtgtactactgcaccagagaggacagcagcaactggcggagtagaggccagggaacactggtcacagttagctctctcgagagcggcggaggcggatctttcgaagtgcagctggttgaatctggcggaggactggttcagcctggcggatctctgagactgtcttgtgccgccagcggcttcagcttcagcgacttttggatgagctgggtccgacaggcccctggcaaaggacttgaatgggtcgccacaatcagccaggccggcagcgagaaggactacgtggactctgtgaagggcagattcaccatcagccgggacaacgccaagaagtccctgtacctccagatgaacagcctgagagccgaggacaccgccgtgtactattgtgcctctggcgtgtacagcttcgactacagaggccagggcaccctggtcacagtctcttctacgcgtcagagcatcaagggcaaccacctggtcaaggtgtacgactaccaagaggacggcagcgtgctgctgacatgtgatgccgaggccaagaacatcacctggtttaaggacggcaagatgatcggcttcctgaccgaggacaagaagaagtggaacctgggcagcaacgctaaggaccccagaggcatgtatcagtgcaagggcagccagaacaagagcaagcccctccaggtgtactaccggatgtgccagaactgcatcgagctgaacgccgctaccatcagcggctttctgttcgccgagatcgtgtccatcttcgtgctggccgtgggcgtgtactttatcgctggacaggatggcgtgcggcagagcagagcttccgataagcaaaccctgctgcctaacgaccagctgtaccagcctctgaaggacagagaggacgaccagtacagccacctccagggcaatcagctgagaagaaac

SEQ ID NO: 6644 - DNA, 1227 bp, Artificial Sequence
  Synthetic Polynucloetide
atggccttaccagtgaccgccttgctcctgccgctggccttgctgctccacgccgccaggccgcagctccagctgcaagagtctggacctggcctggtcaagcctagcgagacactgagcctgacctgtaccgtgtccggcgatagcatcagcagcggcgattactactggggctggatcagacagcctcctggcaaaggactggaatggatcggccacatctactacagcggcgtgacctactacaaccccagcctgaagtccagagtgaccatcagcgtggacaccagccggaaccagttctccctgaagctgtctagcgtgacagccgccgataccgccgtgtactactgcaccagagaggacagcagcaactggcggagtagaggccagggaacactggtcacagttagctctctcgagagcggcggaggcggatctttcgaagtgcagctggttgaatctggcggaggactggttcagcctggcggatctctgagactgtcttgtgccgccagcggcttcagcttcagcgacttttggatgagctgggtccgacaggcccctggcaaaggacttgaatgggtcgccacaatcagccaggccggcagcgagaaggactacgtggactctgtgaagggcagattcaccatcagccgggacaacgccaagaagtccctgtacctccagatgaacagcctgagagccgaggacaccgccgtgtactattgtgcctctggcgtgtacagcttcgactacagaggccagggcaccctggtcacagtctcttctacgcgtcagagttttgggttgttggaccctaaattgtgctatctgttggacggaatcctgttcatttacggagtgatcctgaccgcattgttcctgcgggttaagttttccagatccgcagacgcacccgcttaccaacaagggcagaaccaactctacaatgaacttaatttggggcggagggaagagtacgacgttctggacaaaaggaggggacgagatcccgagatgggcggaaagcctcagcgaaggaagaatccgcaagaggggctttataacgaactccagaaagataaaatggcagaagcctatagtgagattgggatgaagggagaaaggaggaggggtaaaggtcacgatgggttgtaccaaggattgagcacagccactaaagatacctatgatgcgctccacatgcaggccctgccgccaaga

SEQ ID NO: 6645 - DNA, 1356 bp, Artificial Sequence
  Synthetic Polynucloetide
atggccttaccagtgaccgccttgctcctgccgctggccttgctgctccacgccgccaggccggaagtgcagctggttgaatctggcggaggactggttcagcctggcggatctctgagactgtcttgtgccgccagcggcttcagcttcagcgacttttggatgagctgggtccgacaggcccctggcaaaggacttgaatgggtcgccacaatcagccaggccggcagcgagaaggactacgtggactctgtgaagggcagattcaccatcagccgggacaacgccaagaagtccctgtacctccagatgaacagcctgagagccgaggacaccgccgtgtactattgtgcctctggcgtgtacagcttcgactacagaggccagggcaccctggtcacagtctcttctctcgagagcggcggaggcggatctttcgaacagctccagctgcaagagtctggacctggcctggtcaagcctagcgagacactgagcctgacctgtaccgtgtccggcgatagcatcagcagcggcgattactactggggctggatcagacagcctcctggcaaaggactggaatggatcggccacatctactacagcggcgtgacctactacaaccccagcctgaagtccagagtgaccatcagcgtggacaccagccggaaccagttctccctgaagctgtctagcgtgacagccgccgataccgccgtgtactactgcaccagagaggacagcagcaactggcggagtagaggccagggaacactggtcacagttagctctacgcgtgacggtaacgaggagatgggaggaatcactcaaaccccttacaaagtctcaatttcaggaacaactgttatccttacatgtccccagtatcctggcagcgagatcctttggcagcataacgacaagaatatagggggagatgaagacgataagaatatcggatctgacgaggatcacttgagcctgaaagagttctccgagcttgaacaaagcggatattatgtgtgctatccgcgcgggtcaaagccggaagacgctaacttttacctttatctccgagccagagtgtgcgaaaattgcatggaaatggacgttatgtccgttgctacaatagttatcgtagatatatgcatcacgggtggactgcttctgctggtttattattggtccaagaatagaaaggccaaagctaaacccgtgaccagaggcgctggcgcaggcggaaggcaaaggggacaaaacaaagaacggccaccaccagtgccaaatccagattatgagcctattcggaaaggacagagggacctgtactctggcctgaatcagagaagaatc

SEQ ID NO: 6646 - DNA, 1251 bp, Artificial Sequence
  Synthetic Polynucloetide
atggccttaccagtgaccgccttgctcctgccgctggccttgctgctccacgccgccaggccggaagtgcagctggttgaatctggcggaggactggttcagcctggcggatctctgagactgtcttgtgccgccagcggcttcagcttcagcgacttttggatgagctgggtccgacaggcccctggcaaaggacttgaatgggtcgccacaatcagccaggccggcagcgagaaggactacgtggactctgtgaagggcagattcaccatcagccgggacaacgccaagaagtccctgtacctccagatgaacagcctgagagccgaggacaccgccgtgtactattgtgcctctggcgtgtacagcttcgactacagaggccagggcaccctggtcacagtctcttctctcgagagcggcggaggcggatctttcgaacagctccagctgcaagagtctggacctggcctggtcaagcctagcgagacactgagcctgacctgtaccgtgtccggcgatagcatcagcagcggcgattactactggggctggatcagacagcctcctggcaaaggactggaatggatcggccacatctactacagcggcgtgacctactacaaccccagcctgaagtccagagtgaccatcagcgtggacaccagccggaaccagttctccctgaagctgtctagcgtgacagccgccgataccgccgtgtactactgcaccagagaggacagcagcaactggcggagtagaggccagggaacactggtcacagttagctctacgcgtttcaagatccccatcgaggaactggaagatcgggtgttcgtgaactgcaacacctctatcacctgggtggaaggcaccgtgggaacactgctgagcgacatcaccagactggacctcggcaagcggattctggaccctcggggcatctacagatgcaacggcaccgacatctacaaggacaaagaaagcaccgtgcaggtccactacagaatgtgccagtcctgcgtggaactggaccctgctacagtggccggcatcatcgtgaccgatgtgatcgctactctgctgctggctctgggagtgttctgcttcgccggacacgaaacaggcagactgtctggcgctgccgatacacaggccctgctgagaaacgaccaagtgtatcagcccctgcgcgacagagatgatgcccagtattctcacctcggcggcaactgggctagaaacaag

SEQ ID NO: 6647 - DNA, 1281 bp, Artificial Sequence
  Synthetic Polynucloetide
atggccttaccagtgaccgccttgctcctgccgctggccttgctgctccacgccgccaggccggaagtgcagctggttgaatctggcggaggactggttcagcctggcggatctctgagactgtcttgtgccgccagcggcttcagcttcagcgacttttggatgagctgggtccgacaggcccctggcaaaggacttgaatgggtcgccacaatcagccaggccggcagcgagaaggactacgtggactctgtgaagggcagattcaccatcagccgggacaacgccaagaagtccctgtacctccagatgaacagcctgagagccgaggacaccgccgtgtactattgtgcctctggcgtgtacagcttcgactacagaggccagggcaccctggtcacagtctcttctctcgagagcggcggaggcggatctttcgaacagctccagctgcaagagtctggacctggcctggtcaagcctagcgagacactgagcctgacctgtaccgtgtccggcgatagcatcagcagcggcgattactactggggctggatcagacagcctcctggcaaaggactggaatggatcggccacatctactacagcggcgtgacctactacaaccccagcctgaagtccagagtgaccatcagcgtggacaccagccggaaccagttctccctgaagctgtctagcgtgacagccgccgataccgccgtgtactactgcaccagagaggacagcagcaactggcggagtagaggccagggaacactggtcacagttagctctacgcgtcagagcatcaagggcaaccacctggtcaaggtgtacgactaccaagaggacggcagcgtgctgctgacatgtgatgccgaggccaagaacatcacctggtttaaggacggcaagatgatcggcttcctgaccgaggacaagaagaagtggaacctgggcagcaacgctaaggaccccagaggcatgtatcagtgcaagggcagccagaacaagagcaagcccctccaggtgtactaccggatgtgccagaactgcatcgagctgaacgccgctaccatcagcggctttctgttcgccgagatcgtgtccatcttcgtgctggccgtgggcgtgtactttatcgctggacaggatggcgtgcggcagagcagagcttccgataagcaaaccctgctgcctaacgaccagctgtaccagcctctgaaggacagagaggacgaccagtacagccacctccagggcaatcagctgagaagaaac

SEQ ID NO: 6648 - DNA, 1230 bp, Artificial Sequence
  Synthetic Polynucloetide
atggccttaccagtgaccgccttgctcctgccgctggccttgctgctccacgccgccaggccggaagtgcagctggttgaatctggcggaggactggttcagcctggcggatctctgagactgtcttgtgccgccagcggcttcagcttcagcgacttttggatgagctgggtccgacaggcccctggcaaaggacttgaatgggtcgccacaatcagccaggccggcagcgagaaggactacgtggactctgtgaagggcagattcaccatcagccgggacaacgccaagaagtccctgtacctccagatgaacagcctgagagccgaggacaccgccgtgtactattgtgcctctggcgtgtacagcttcgactacagaggccagggcaccctggtcacagtctcttctctcgagagcggcggaggcggatctttcgaacagctccagctgcaagagtctggacctggcctggtcaagcctagcgagacactgagcctgacctgtaccgtgtccggcgatagcatcagcagcggcgattactactggggctggatcagacagcctcctggcaaaggactggaatggatcggccacatctactacagcggcgtgacctactacaaccccagcctgaagtccagagtgaccatcagcgtggacaccagccggaaccagttctccctgaagctgtctagcgtgacagccgccgataccgccgtgtactactgcaccagagaggacagcagcaactggcggagtagaggccagggaacactggtcacagttagctctacgcgtcagagttttgggttgttggaccctaaattgtgctatctgttggacggaatcctgttcatttacggagtgatcctgaccgcattgttcctgcgggttaagttttccagatccgcagacgcacccgcttaccaacaagggcagaaccaactctacaatgaacttaatttggggcggagggaagagtacgacgttctggacaaaaggaggggacgagatcccgagatgggcggaaagcctcagcgaaggaagaatccgcaagaggggctttataacgaactccagaaagataaaatggcagaagcctatagtgagattgggatgaagggagaaaggaggaggggtaaaggtcacgatgggttgtaccaaggattgagcacagccactaaagatacctatgatgcgctccacatgcaggccctgccgccaaga

SEQ ID NO: 6649 - DNA, 1929 bp, Artificial Sequence
  Synthetic Polynucloetide
atggccttaccagtgaccgccttgctcctgccgctggccttgctgctccacgccgccaggccgcagctccagctgcaagagtctggacctggcctggtcaagcctagcgagacactgagcctgacctgtaccgtgtccggcgatagcatcagcagcggcgattactactggggctggatcagacagcctcctggcaaaggactggaatggatcggccacatctactacagcggcgtgacctactacaaccccagcctgaagtccagagtgaccatcagcgtggacaccagccggaaccagttctccctgaagctgtctagcgtgacagccgccgataccgccgtgtactactgcaccagagaggacagcagcaactggcggagtagaggccagggaacactggtcacagttagctctctcgagagcggcggaggcggatctttcgaagtgcagctggttgaatctggcggaggactggttcagcctggcggatctctgagactgtcttgtgccgccagcggcttcagcttcagcgacttttggatgagctgggtccgacaggcccctggcaaaggacttgaatgggtcgccacaatcagccaggccggcagcgagaaggactacgtggactctgtgaagggcagattcaccatcagccgggacaacgccaagaagtccctgtacctccagatgaacagcctgagagccgaggacaccgccgtgtactattgtgcctctggcgtgtacagcttcgactacagaggccagggcaccctggtcacagtctcttctacgcgtgggagcggcatccagaaccctgatcctgccgtgtaccagctgcgggatagcaagagcagcgacaagagcgtgtgtctgttcaccgacttcgacagccagaccaacgtgtcccagagcaaggactccgacgtgtacatcaccgataagaccgtgctggacatgcggagcatggacttcaagagcaactccgccgtggcctggtccaacaagtccgatttcgcctgcgccaacgccttcaacaacagcattatccccgaggacacattcttcccaagccccgagagcagctgcgacgtgaagctggtggaaaagagcttcgagacagacaccaacctgaacttccagaacctgagcgtgatcggcttcagaatcctgctgctgaaagtggccggctttaacctgctgatgaccctgcggctgtggtccagccgcgccaagagaagcggatctggcgtgaagcagaccctgaatttcgacctgctgaagctggctggcgacgtggaatccaacccaggcccttctagaggccatatgaccgagtacaagcccacggtgcgcctcgccacccgcgacgacgtccccagggccgtacgcaccctcgccgccgcgttcgccgactaccccgccacgcgccacaccgtcgatccggaccgccacatcgagcgggtcaccgagctgcaagaactcttcctcacgcgcgtcgggctcgacatcggcaaggtgtgggtcgcggacgacggcgccgcggtggcggtctggaccacgccggagagcgtcgaagcgggggcggtgttcgccgagatcggcccgcgcatggccgagttgagcggttcccggctggccgcgcagcaacagatggaaggcctcctggcgccgcaccggcccaaggagcccgcgtggttcctggccaccgtcggcgtctcgcccgaccaccagggcaagggtctgggcagcgccgtcgtgctccccggagtggaggcggccgagcgcgccggggtgcccgccttcctggagacctccgcgccccgcaacctccccttctacgagcggctcggcttcaccgtcaccgccgacgtcgaggtgcccgaaggaccgcgcacctggtgcatgacccgcaagcccggtgcctga

SEQ ID NO: 6650 - DNA, 2025 bp, Artificial Sequence
  Synthetic Polynucloetide
atggccttaccagtgaccgccttgctcctgccgctggccttgctgctccacgccgccaggccgcagctccagctgcaagagtctggacctggcctggtcaagcctagcgagacactgagcctgacctgtaccgtgtccggcgatagcatcagcagcggcgattactactggggctggatcagacagcctcctggcaaaggactggaatggatcggccacatctactacagcggcgtgacctactacaaccccagcctgaagtccagagtgaccatcagcgtggacaccagccggaaccagttctccctgaagctgtctagcgtgacagccgccgataccgccgtgtactactgcaccagagaggacagcagcaactggcggagtagaggccagggaacactggtcacagttagctctctcgagagcggcggaggcggatctttcgaagtgcagctggttgaatctggcggaggactggttcagcctggcggatctctgagactgtcttgtgccgccagcggcttcagcttcagcgacttttggatgagctgggtccgacaggcccctggcaaaggacttgaatgggtcgccacaatcagccaggccggcagcgagaaggactacgtggactctgtgaagggcagattcaccatcagccgggacaacgccaagaagtccctgtacctccagatgaacagcctgagagccgaggacaccgccgtgtactattgtgcctctggcgtgtacagcttcgactacagaggccagggcaccctggtcacagtctcttctctcgaggacctgaagaacgtgttcccacctgaggtggccgtgttcgagcctagcgaggccgagatcagccacacccagaaagccaccctcgtgtgcctggctaccggcttctaccccgaccatgtggaactgtcttggtgggtcaacggcaaagaggtgcacagcggcgtgtctaccgacccccagccactgaaagaacagcccgccctgaacgacagccggtactgcctgagcagcagactgagagtgtccgccaccttctggcagaacccccggaaccacttcagatgccaggtgcagttctacggcctgagcgagaacgacgagtggacccaggacagagccaagcccgtgacccagatcgtgtctgccgaagcctggggcagagccgattgcggctttaccagcgagagctaccagcagggcgtgctgagcgccaccatcctgtacgagatcctgctgggcaaggccaccctgtacgccgtgctggtgtctgccctggtgctgatggctatggtcaagcggaaggacagccggggaagggccaagcgatctggatctggagcaacaaacttctcactactcaaacaagcaggtgacgtggaggagaatcccgggcctactagaggccatatgaccgagtacaagcccacggtgcgcctcgccacccgcgacgacgtccccagggccgtacgcaccctcgccgccgcgttcgccgactaccccgccacgcgccacaccgtcgatccggaccgccacatcgagcgggtcaccgagctgcaagaactcttcctcacgcgcgtcgggctcgacatcggcaaggtgtgggtcgcggacgacggcgccgcggtggcggtctggaccacgccggagagcgtcgaagcgggggcggtgttcgccgagatcggcccgcgcatggccgagttgagcggttcccggctggccgcgcagcaacagatggaaggcctcctggcgccgcaccggcccaaggagcccgcgtggttcctggccaccgtcggcgtctcgcccgaccaccagggcaagggtctgggcagcgccgtcgtgctccccggagtggaggcggccgagcgcgccggggtgcccgccttcctggagacctccgcgccccgcaacctccccttctacgagcggctcggcttcaccgtcaccgccgacgtcgaggtgcccgaaggaccgcgcacctggtgcatgacccgcaagcccggtgcctga

SEQ ID NO: 6651 - DNA, 2175 bp, Artificial Sequence
  Synthetic Polynucloetide
atggccttaccagtgaccgccttgctcctgccgctggccttgctgctccacgccgccaggccgcagctccagctgcaagagtctggacctggcctggtcaagcctagcgagacactgagcctgacctgtaccgtgtccggcgatagcatcagcagcggcgattactactggggctggatcagacagcctcctggcaaaggactggaatggatcggccacatctactacagcggcgtgacctactacaaccccagcctgaagtccagagtgaccatcagcgtggacaccagccggaaccagttctccctgaagctgtctagcgtgacagccgccgataccgccgtgtactactgcaccagagaggacagcagcaactggcggagtagaggccagggaacactggtcacagttagctctctcgagagcggcggaggcggatctttcgaagtgcagctggttgaatctggcggaggactggttcagcctggcggatctctgagactgtcttgtgccgccagcggcttcagcttcagcgacttttggatgagctgggtccgacaggcccctggcaaaggacttgaatgggtcgccacaatcagccaggccggcagcgagaaggactacgtggactctgtgaagggcagattcaccatcagccgggacaacgccaagaagtccctgtacctccagatgaacagcctgagagccgaggacaccgccgtgtactattgtgcctctggcgtgtacagcttcgactacagaggccagggcaccctggtcacagtctcttctacgcgtgagcagaaactgatctcggaagaggatctggggagcggcaccccattcccttctctggcccctcccatcatgctgctggtggacggcaagcagcagatggtggtcgtgtgcctggtgctggatgtggccccacctggactggacagccccatctggtttagcgccggcaatggctctgccctggacgcctttacctacggcccaagccctgccaccgatggcacctggacaaatctggcccacctgagcctgcccagcgaggaactggcttcttgggagcctctcgtgtgccacacaggacctggcgctgagggacacagcagatccacccagcctatgcacctgtctggcgaggccagcaccgccagaacctgtcctcaggaacctctgagaggcacccctggcggagcactgtggctgggagtgctgagactgctgctgttcaagctgctgctgtttgacctgctgctgacctgctcctgtctgtgcgatcctgccggccctctgccttctcctgccaccaccacaagactgagagccctgggcagccacagactgcaccctgccacagagacaggcggcagagaggccacaagcagccctagaccccagcccagagacagaagatggggcgataccccccctggcagaaagcctggatctccagtccgcgccaagagaagcggatctggcgtgaagcagaccctgaatttcgacctgctgaagctggctggcgacgtggaatccaacccaggcccttctagatctagaggccatatgaccgagtacaagcccacggtgcgcctcgccacccgcgacgacgtccccagggccgtacgcaccctcgccgccgcgttcgccgactaccccgccacgcgccacaccgtcgatccggaccgccacatcgagcgggtcaccgagctgcaagaactcttcctcacgcgcgtcgggctcgacatcggcaaggtgtgggtcgcggacgacggcgccgcggtggcggtctggaccacgccggagagcgtcgaagcgggggcggtgttcgccgagatcggcccgcgcatggccgagttgagcggttcccggctggccgcgcagcaacagatggaaggcctcctggcgccgcaccggcccaaggagcccgcgtggttcctggccaccgtcggcgtctcgcccgaccaccagggcaagggtctgggcagcgccgtcgtgctccccggagtggaggcggccgagcgcgccggggtgcccgccttcctggagacctccgcgccccgcaacctccccttctacgagcggctcggcttcaccgtcaccgccgacgtcgaggtgcccgaaggaccgcgcacctggtgcatgacccgcaagcccggtgcctga

SEQ ID NO: 6652 - DNA, 1650 bp, Artificial Sequence; identical to SEQ ID NO: 6506
  Synthetic Polynucloetide

SEQ ID NO: 6653 - DNA, 957 bp, Artificial Sequence; identical to SEQ ID NO: 6507
  Synthetic Polynucloetide

SEQ ID NO: 6654 - DNA, 1335 bp, Artificial Sequence
  Synthetic Polynucloetide
atggactggatttggcgcatccttttccttgtcggcgctgctaccggcgcgcattccttcgaagtgcagctggttgaatctggcggaggactggttcagcctggcggatctctgagactgtcttgtgccgccagcggcttcagcttcagcgacttttggatgagctgggtccgacaggcccctggcaaaggacttgaatgggtcgccacaatcagccaggccggcagcgagaaggactacgtggactctgtgaagggcagattcaccatcagccgggacaacgccaagaagtccctgtacctccagatgaacagcctgagagccgaggacaccgccgtgtactattgtgcctctggcgtgtacagcttcgactacagaggccagggcaccctggtcacagtctcttctacgcgtatccagaaccctgatcctgccgtgtaccagctgcgggatagcaagagcagcgacaagagcgtgtgtctgttcaccgacttcgacagccagaccaacgtgtcccagagcaaggactccgacgtgtacatcaccgataagaccgtgctggacatgcggagcatggacttcaagagcaactccgccgtggcctggtccaacaagtccgatttcgcctgcgccaacgccttcaacaacagcattatccccgaggacacattcttcccaagccccgagagcagctgcgacgtgaagctggtggaaaagagcttcgagacagacaccaacctgaacttccagaacctgagcgtgatcggcttcagaatcctgctgctgaaagtggccggctttaacctgctgatgaccctgcggctgtggtccagccgcgccaagagaagcggatctggcgtgaagcagaccctgaatttcgacctgctgaagctggctggcgacgtggaatccaacccaggcccttctagaggccatatggccaagcctttgtctcaagaagaatccaccctcattgaaagagcaacggctacaatcaacagcatccccatctctgaagactacagcgtcgccagcgcagctctctctagcgacggccgcatcttcactggtgtcaatgtatatcattttactgggggaccttgtgcagaactcgtggtgctgggcactgctgctgctgcggcagctggcaacctgacttgtatcgtcgcgatcggaaatgagaacaggggcatcttgagcccctgcggacggtgccgacaggtgcttctcgatctgcatcctgggatcaaagccatagtgaaggacagtgatggacagccgacggcagttgggattcgtgaattgctgccctctggttatgtgtgggagggctga

SEQ ID NO: 6655 - DNA, 834 bp, Artificial Sequence
  Synthetic Polynucloetide
atggactggatttggcgcatccttttccttgtcggcgctgctaccggcgcgcattccttcgaagtgcagctggttgaatctggcggaggactggttcagcctggcggatctctgagactgtcttgtgccgccagcggcttcagcttcagcgacttttggatgagctgggtccgacaggcccctggcaaaggacttgaatgggtcgccacaatcagccaggccggcagcgagaaggactacgtggactctgtgaagggcagattcaccatcagccgggacaacgccaagaagtccctgtacctccagatgaacagcctgagagccgaggacaccgccgtgtactattgtgcctctggcgtgtacagcttcgactacagaggccagggcaccctggtcacagtctcttctacgcgtatccagaaccctgatcctgccgtgtaccagctgcgggatagcaagagcagcgacaagagcgtgtgtctgttcaccgacttcgacagccagaccaacgtgtcccagagcaaggactccgacgtgtacatcaccgataagaccgtgctggacatgcggagcatggacttcaagagcaactccgccgtggcctggtccaacaagtccgatttcgcctgcgccaacgccttcaacaacagcattatccccgaggacacattcttcccaagccccgagagcagctgcgacgtgaagctggtggaaaagagcttcgagacagacaccaacctgaacttccagaacctgagcgtgatcggcttcagaatcctgctgctgaaagtggccggctttaacctgctgatgaccctgcggctgtggtccagc

SEQ ID NO: 6656 - DNA, 1704 bp, Artificial Sequence; identical to SEQ ID NO: 6510
  Synthetic Polynucloetide

SEQ ID NO: 6657 - DNA, 1014 bp, Artificial Sequence; identical to SEQ ID NO: 6511
  Synthetic Polynucloetide

SEQ ID NO: 6658 - DNA, 1371 bp, Artificial Sequence
  Synthetic Polynucloetide
atggactggatttggcgcatccttttccttgtcggcgctgctaccggcgcgcattccttcgaagtgcagctggttgaatctggcggaggactggttcagcctggcggatctctgagactgtcttgtgccgccagcggcttcagcttcagcgacttttggatgagctgggtccgacaggcccctggcaaaggacttgaatgggtcgccacaatcagccaggccggcagcgagaaggactacgtggactctgtgaagggcagattcaccatcagccgggacaacgccaagaagtccctgtacctccagatgaacagcctgagagccgaggacaccgccgtgtactattgtgcctctggcgtgtacagcttcgactacagaggccagggcaccctggtcacagtctcttctacgcgtgagcagaaactgatctcggaagaggatgggagcggcatccagaaccctgatcctgccgtgtaccagctgcgggatagcaagagcagcgacaagagcgtgtgtctgttcaccgacttcgacagccagaccaacgtgtcccagagcaaggactccgacgtgtacatcaccgataagtgcgtgctggacatgcggagcatggacttcaagagcaactccgccgtggcctggtccaacaagtccgatttcgcctgcgccaacgccttcaacaacagcattatccccgaggacacattcttcccaagccccgagagcagctgcgacgtgaagctggtggaaaagagcttcgagacagacaccaacctgaacttccagaacctgagcgtgatcggcttcagaatcctgctgctgaaagtggccggctttaacctgctgatgaccctgcggctgtggtccagccgcgccaagagaagcggatctggcgtgaagcagaccctgaatttcgacctgctgaagctggctggcgacgtggaatccaacccaggcccttctagaggccatatggccaagcctttgtctcaagaagaatccaccctcattgaaagagcaacggctacaatcaacagcatccccatctctgaagactacagcgtcgccagcgcagctctctctagcgacggccgcatcttcactggtgtcaatgtatatcattttactgggggaccttgtgcagaactcgtggtgctgggcactgctgctgctgcggcagctggcaacctgacttgtatcgtcgcgatcggaaatgagaacaggggcatcttgagcccctgcggacggtgccgacaggtgcttctcgatctgcatcctgggatcaaagccatagtgaaggacagtgatggacagccgacggcagttgggattcgtgaattgctgccctctggttatgtgtgggagggctga

SEQ ID NO: 6659 - DNA, 873 bp, Artificial Sequence
  Synthetic Polynucloetide
atggactggatttggcgcatccttttccttgtcggcgctgctaccggcgcgcattccttcgaagtgcagctggttgaatctggcggaggactggttcagcctggcggatctctgagactgtcttgtgccgccagcggcttcagcttcagcgacttttggatgagctgggtccgacaggcccctggcaaaggacttgaatgggtcgccacaatcagccaggccggcagcgagaaggactacgtggactctgtgaagggcagattcaccatcagccgggacaacgccaagaagtccctgtacctccagatgaacagcctgagagccgaggacaccgccgtgtactattgtgcctctggcgtgtacagcttcgactacagaggccagggcaccctggtcacagtctcttctacgcgtgagcagaaactgatctcggaagaggatgggagcggcatccagaaccctgatcctgccgtgtaccagctgcgggatagcaagagcagcgacaagagcgtgtgtctgttcaccgacttcgacagccagaccaacgtgtcccagagcaaggactccgacgtgtacatcaccgataagtgcgtgctggacatgcggagcatggacttcaagagcaactccgccgtggcctggtccaacaagtccgatttcgcctgcgccaacgccttcaacaacagcattatccccgaggacacattcttcccaagccccgagagcagctgcgacgtgaagctggtggaaaagagcttcgagacagacaccaacctgaacttccagaacctgagcgtgatcggcttcagaatcctgctgctgaaagtggccggctttaacctgctgatgaccctgcggctgtggtccagctga

SEQ ID NO: 6660 - DNA, 1929 bp, Artificial Sequence
  Synthetic Polynucloetide
atggccttaccagtgaccgccttgctcctgccgctggccttgctgctccacgccgccaggccgcagctccagctgcaagagtctggacctggcctggtcaagcctagcgagacactgagcctgacctgtaccgtgtccggcgatagcatcagcagcggcgattactactggggctggatcagacagcctcctggcaaaggactggaatggatcggccacatctactacagcggcgtgacctactacaaccccagcctgaagtccagagtgaccatcagcgtggacaccagccggaaccagttctccctgaagctgtctagcgtgacagccgccgataccgccgtgtactactgcaccagagaggacagcagcaactggcggagtagaggccagggaacactggtcacagttagctctctcgagagcggcggaggcggatctttcgaagtgcagctggttgaatctggcggaggactggttcagcctggcggatctctgagactgtcttgtgccgccagcggcttcagcttcagcgacttttggatgagctgggtccgacaggcccctggcaaaggacttgaatgggtcgccacaatcagccaggccggcagcgagaaggactacgtggactctgtgaagggcagattcaccatcagccgggacaacgccaagaagtccctgtacctccagatgaacagcctgagagccgaggacaccgccgtgtactattgtgcctctggcgtgtacagcttcgactacagaggccagggcaccctggtcacagtctcttctacgcgtgggagcggcatccagaaccctgatcctgccgtgtaccagctgcgggatagcaagagcagcgacaagagcgtgtgtctgttcaccgacttcgacagccagaccaacgtgtcccagagcaaggactccgacgtgtacatcaccgataagaccgtgctggacatgcggagcatggacttcaagagcaactccgccgtggcctggtccaacaagtccgatttcgcctgcgccaacgccttcaacaacagcattatccccgaggacacattcttcccaagcagcgacgtgccctgcgacgtgaagctggtggaaaagagcttcgagacagacaccaacctgaacttccagaacctgagcgtgatcggcttcagaatcctgctgctgaaagtggccggctttaacctgctgatgaccctgcggctgtggtccagccgcgccaagagaagcggatctggcgtgaagcagaccctgaatttcgacctgctgaagctggctggcgacgtggaatccaacccaggcccttctagaggccatatgaccgagtacaagcccacggtgcgcctcgccacccgcgacgacgtccccagggccgtacgcaccctcgccgccgcgttcgccgactaccccgccacgcgccacaccgtcgatccggaccgccacatcgagcgggtcaccgagctgcaagaactcttcctcacgcgcgtcgggctcgacatcggcaaggtgtgggtcgcggacgacggcgccgcggtggcggtctggaccacgccggagagcgtcgaagcgggggcggtgttcgccgagatcggcccgcgcatggccgagttgagcggttcccggctggccgcgcagcaacagatggaaggcctcctggcgccgcaccggcccaaggagcccgcgtggttcctggccaccgtcggcgtctcgcccgaccaccagggcaagggtctgggcagcgccgtcgtgctccccggagtggaggcggccgagcgcgccggggtgcccgccttcctggagacctccgcgccccgcaacctccccttctacgagcggctcggcttcaccgtcaccgccgacgtcgaggtgcccgaaggaccgcgcacctggtgcatgacccgcaagcccggtgcctga

SEQ ID NO: 6661 - DNA, 2025 bp, Artificial Sequence
  Synthetic Polynucloetide
atggccttaccagtgaccgccttgctcctgccgctggccttgctgctccacgccgccaggccgcagctccagctgcaagagtctggacctggcctggtcaagcctagcgagacactgagcctgacctgtaccgtgtccggcgatagcatcagcagcggcgattactactggggctggatcagacagcctcctggcaaaggactggaatggatcggccacatctactacagcggcgtgacctactacaaccccagcctgaagtccagagtgaccatcagcgtggacaccagccggaaccagttctccctgaagctgtctagcgtgacagccgccgataccgccgtgtactactgcaccagagaggacagcagcaactggcggagtagaggccagggaacactggtcacagttagctctctcgagagcggcggaggcggatctttcgaagtgcagctggttgaatctggcggaggactggttcagcctggcggatctctgagactgtcttgtgccgccagcggcttcagcttcagcgacttttggatgagctgggtccgacaggcccctggcaaaggacttgaatgggtcgccacaatcagccaggccggcagcgagaaggactacgtggactctgtgaagggcagattcaccatcagccgggacaacgccaagaagtccctgtacctccagatgaacagcctgagagccgaggacaccgccgtgtactattgtgcctctggcgtgtacagcttcgactacagaggccagggcaccctggtcacagtctcttctctcgaggacctgaagaacgtgttcccacctgaggtggccgtgttcgagcctagcaaggccgagatcgcccacacccagaaagccaccctcgtgtgcctggctaccggcttctaccccgaccatgtggaactgtcttggtgggtcaacggcaaagaggtgcacagcggcgtgtctaccgacccccagccactgaaagaacagcccgccctgaacgacagccggtactgcctgagcagcagactgagagtgtccgccaccttctggcagaacccccggaaccacttcagatgccaggtgcagttctacggcctgagcgagaacgacgagtggacccaggacagagccaagcccgtgacccagatcgtgtctgccgaagcctggggcagagccgattgcggcatcaccagcgccagctaccaccagggcgtgctgagcgccaccatcctgtacgagatcctgctgggcaaggccaccctgtacgccgtgctggtgtctgccctggtgctgatggctatggtcaagcggaaggacagccggggaagggccaagcgatctggatctggagcaacaaacttctcactactcaaacaagcaggtgacgtggaggagaatcccgggcctactagaggccatatgaccgagtacaagcccacggtgcgcctcgccacccgcgacgacgtccccagggccgtacgcaccctcgccgccgcgttcgccgactaccccgccacgcgccacaccgtcgatccggaccgccacatcgagcgggtcaccgagctgcaagaactcttcctcacgcgcgtcgggctcgacatcggcaaggtgtgggtcgcggacgacggcgccgcggtggcggtctggaccacgccggagagcgtcgaagcgggggcggtgttcgccgagatcggcccgcgcatggccgagttgagcggttcccggctggccgcgcagcaacagatggaaggcctcctggcgccgcaccggcccaaggagcccgcgtggttcctggccaccgtcggcgtctcgcccgaccaccagggcaagggtctgggcagcgccgtcgtgctccccggagtggaggcggccgagcgcgccggggtgcccgccttcctggagacctccgcgccccgcaacctccccttctacgagcggctcggcttcaccgtcaccgccgacgtcgaggtgcccgaaggaccgcgcacctggtgcatgacccgcaagcccggtgcctga

SEQ ID NO: 6662 - DNA, 2094 bp, Artificial Sequence
  Synthetic Polynucloetide
atggccttaccagtgaccgccttgctcctgccgctggccttgctgctccacgccgccaggccgcagctccagctgcaagagtctggacctggcctggtcaagcctagcgagacactgagcctgacctgtaccgtgtccggcgatagcatcagcagcggcgattactactggggctggatcagacagcctcctggcaaaggactggaatggatcggccacatctactacagcggcgtgacctactacaaccccagcctgaagtccagagtgaccatcagcgtggacaccagccggaaccagttctccctgaagctgtctagcgtgacagccgccgataccgccgtgtactactgcaccagagaggacagcagcaactggcggagtagaggccagggaacactggtcacagttagctctctcgagagcggcggaggcggatctttcgaagtgcagctggttgaatctggcggaggactggttcagcctggcggatctctgagactgtcttgtgccgccagcggcttcagcttcagcgacttttggatgagctgggtccgacaggcccctggcaaaggacttgaatgggtcgccacaatcagccaggccggcagcgagaaggactacgtggactctgtgaagggcagattcaccatcagccgggacaacgccaagaagtccctgtacctccagatgaacagcctgagagccgaggacaccgccgtgtactattgtgcctctggcgtgtacagcttcgactacagaggccagggcaccctggtcacagtctcttctacgcgtgggtctggaggcggaggcagcggcggaggcgggagcggcgacggtaacgaggagatgggaggaatcactcaaaccccttacaaagtctcaatttcaggaacaactgttatccttacatgtccccagtatcctggcagcgagatcctttggcagcataacgacaagaatatagggggagatgaagacgataagaatatcggatctgacgaggatcacttgagcctgaaagagttctccgagcttgaacaaagcggatattatgtgtgctatccgcgcgggtcaaagccggaagacgctaacttttacctttatctccgagccagagtgtgcgaaaattgcatggaaatggacgttatgtccgttgctacaatagttatcgtagatatatgcatcacgggtggactgcttctgctggtttattattggtccaagaatagaaaggccaaagctaaacccgtgaccagaggcgctggcgcaggcggaaggcaaaggggacaaaacaaagaacggccaccaccagtgccaaatccagattatgagcctattcggaaaggacagagggacctgtactctggcctgaatcagagaagaatccgcgccaagagaagcggatctggcgtgaagcagaccctgaatttcgacctgctgaagctggctggcgacgtggaatccaacccaggcccttctagaggccatatgaccgagtacaagcccacggtgcgcctcgccacccgcgacgacgtccccagggccgtacgcaccctcgccgccgcgttcgccgactaccccgccacgcgccacaccgtcgatccggaccgccacatcgagcgggtcaccgagctgcaagaactcttcctcacgcgcgtcgggctcgacatcggcaaggtgtgggtcgcggacgacggcgccgcggtggcggtctggaccacgccggagagcgtcgaagcgggggcggtgttcgccgagatcggcccgcgcatggccgagttgagcggttcccggctggccgcgcagcaacagatggaaggcctcctggcgccgcaccggcccaaggagcccgcgtggttcctggccaccgtcggcgtctcgcccgaccaccagggcaagggtctgggcagcgccgtcgtgctccccggagtggaggcggccgagcgcgccggggtgcccgccttcctggagacctccgcgccccgcaacctccccttctacgagcggctcggcttcaccgtcaccgccgacgtcgaggtgcccgaaggaccgcgcacctggtgcatgacccgcaagcccggtgcctga

SEQ ID NO: 6663 - DNA, 1989 bp, Artificial Sequence
  Synthetic Polynucloetide
atggccttaccagtgaccgccttgctcctgccgctggccttgctgctccacgccgccaggccgcagctccagctgcaagagtctggacctggcctggtcaagcctagcgagacactgagcctgacctgtaccgtgtccggcgatagcatcagcagcggcgattactactggggctggatcagacagcctcctggcaaaggactggaatggatcggccacatctactacagcggcgtgacctactacaaccccagcctgaagtccagagtgaccatcagcgtggacaccagccggaaccagttctccctgaagctgtctagcgtgacagccgccgataccgccgtgtactactgcaccagagaggacagcagcaactggcggagtagaggccagggaacactggtcacagttagctctctcgagagcggcggaggcggatctttcgaagtgcagctggttgaatctggcggaggactggttcagcctggcggatctctgagactgtcttgtgccgccagcggcttcagcttcagcgacttttggatgagctgggtccgacaggcccctggcaaaggacttgaatgggtcgccacaatcagccaggccggcagcgagaaggactacgtggactctgtgaagggcagattcaccatcagccgggacaacgccaagaagtccctgtacctccagatgaacagcctgagagccgaggacaccgccgtgtactattgtgcctctggcgtgtacagcttcgactacagaggccagggcaccctggtcacagtctcttctacgcgtgggtctggaggcggaggcagcggcggaggcgggagcggcttcaagatccccatcgaggaactggaagatcgggtgttcgtgaactgcaacacctctatcacctgggtggaaggcaccgtgggaacactgctgagcgacatcaccagactggacctcggcaagcggattctggaccctcggggcatctacagatgcaacggcaccgacatctacaaggacaaagaaagcaccgtgcaggtccactacagaatgtgccagtcctgcgtggaactggaccctgctacagtggccggcatcatcgtgaccgatgtgatcgctactctgctgctggctctgggagtgttctgcttcgccggacacgaaacaggcagactgtctggcgctgccgatacacaggccctgctgagaaacgaccaagtgtatcagcccctgcgcgacagagatgatgcccagtattctcacctcggcggcaactgggctagaaacaagcgcgccaagagaagcggatctggcgtgaagcagaccctgaatttcgacctgctgaagctggctggcgacgtggaatccaacccaggcccttctagaggccatatgaccgagtacaagcccacggtgcgcctcgccacccgcgacgacgtccccagggccgtacgcaccctcgccgccgcgttcgccgactaccccgccacgcgccacaccgtcgatccggaccgccacatcgagcgggtcaccgagctgcaagaactcttcctcacgcgcgtcgggctcgacatcggcaaggtgtgggtcgcggacgacggcgccgcggtggcggtctggaccacgccggagagcgtcgaagcgggggcggtgttcgccgagatcggcccgcgcatggccgagttgagcggttcccggctggccgcgcagcaacagatggaaggcctcctggcgccgcaccggcccaaggagcccgcgtggttcctggccaccgtcggcgtctcgcccgaccaccagggcaagggtctgggcagcgccgtcgtgctccccggagtggaggcggccgagcgcgccggggtgcccgccttcctggagacctccgcgccccgcaacctccccttctacgagcggctcggcttcaccgtcaccgccgacgtcgaggtgcccgaaggaccgcgcacctggtgcatgacccgcaagcccggtgcctga

SEQ ID NO: 6664 - DNA, 2019 bp, Artificial Sequence
  Synthetic Polynucloetide
atggccttaccagtgaccgccttgctcctgccgctggccttgctgctccacgccgccaggccgcagctccagctgcaagagtctggacctggcctggtcaagcctagcgagacactgagcctgacctgtaccgtgtccggcgatagcatcagcagcggcgattactactggggctggatcagacagcctcctggcaaaggactggaatggatcggccacatctactacagcggcgtgacctactacaaccccagcctgaagtccagagtgaccatcagcgtggacaccagccggaaccagttctccctgaagctgtctagcgtgacagccgccgataccgccgtgtactactgcaccagagaggacagcagcaactggcggagtagaggccagggaacactggtcacagttagctctctcgagagcggcggaggcggatctttcgaagtgcagctggttgaatctggcggaggactggttcagcctggcggatctctgagactgtcttgtgccgccagcggcttcagcttcagcgacttttggatgagctgggtccgacaggcccctggcaaaggacttgaatgggtcgccacaatcagccaggccggcagcgagaaggactacgtggactctgtgaagggcagattcaccatcagccgggacaacgccaagaagtccctgtacctccagatgaacagcctgagagccgaggacaccgccgtgtactattgtgcctctggcgtgtacagcttcgactacagaggccagggcaccctggtcacagtctcttctacgcgtgggtctggaggcggaggcagcggcggaggcgggagcggccagagcatcaagggcaaccacctggtcaaggtgtacgactaccaagaggacggcagcgtgctgctgacatgtgatgccgaggccaagaacatcacctggtttaaggacggcaagatgatcggcttcctgaccgaggacaagaagaagtggaacctgggcagcaacgctaaggaccccagaggcatgtatcagtgcaagggcagccagaacaagagcaagcccctccaggtgtactaccggatgtgccagaactgcatcgagctgaacgccgctaccatcagcggctttctgttcgccgagatcgtgtccatcttcgtgctggccgtgggcgtgtactttatcgctggacaggatggcgtgcggcagagcagagcttccgataagcaaaccctgctgcctaacgaccagctgtaccagcctctgaaggacagagaggacgaccagtacagccacctccagggcaatcagctgagaagaaaccgcgccaagagaagcggatctggcgtgaagcagaccctgaatttcgacctgctgaagctggctggcgacgtggaatccaacccaggcccttctagaggccatatgaccgagtacaagcccacggtgcgcctcgccacccgcgacgacgtccccagggccgtacgcaccctcgccgccgcgttcgccgactaccccgccacgcgccacaccgtcgatccggaccgccacatcgagcgggtcaccgagctgcaagaactcttcctcacgcgcgtcgggctcgacatcggcaaggtgtgggtcgcggacgacggcgccgcggtggcggtctggaccacgccggagagcgtcgaagcgggggcggtgttcgccgagatcggcccgcgcatggccgagttgagcggttcccggctggccgcgcagcaacagatggaaggcctcctggcgccgcaccggcccaaggagcccgcgtggttcctggccaccgtcggcgtctcgcccgaccaccagggcaagggtctgggcagcgccgtcgtgctccccggagtggaggcggccgagcgcgccggggtgcccgccttcctggagacctccgcgccccgcaacctccccttctacgagcggctcggcttcaccgtcaccgccgacgtcgaggtgcccgaaggaccgcgcacctggtgcatgacccgcaagcccggtgcctga

SEQ ID NO: 6665 - DNA, 1968 bp, Artificial Sequence
  Synthetic Polynucloetide
atggccttaccagtgaccgccttgctcctgccgctggccttgctgctccacgccgccaggccgcagctccagctgcaagagtctggacctggcctggtcaagcctagcgagacactgagcctgacctgtaccgtgtccggcgatagcatcagcagcggcgattactactggggctggatcagacagcctcctggcaaaggactggaatggatcggccacatctactacagcggcgtgacctactacaaccccagcctgaagtccagagtgaccatcagcgtggacaccagccggaaccagttctccctgaagctgtctagcgtgacagccgccgataccgccgtgtactactgcaccagagaggacagcagcaactggcggagtagaggccagggaacactggtcacagttagctctctcgagagcggcggaggcggatctttcgaagtgcagctggttgaatctggcggaggactggttcagcctggcggatctctgagactgtcttgtgccgccagcggcttcagcttcagcgacttttggatgagctgggtccgacaggcccctggcaaaggacttgaatgggtcgccacaatcagccaggccggcagcgagaaggactacgtggactctgtgaagggcagattcaccatcagccgggacaacgccaagaagtccctgtacctccagatgaacagcctgagagccgaggacaccgccgtgtactattgtgcctctggcgtgtacagcttcgactacagaggccagggcaccctggtcacagtctcttctacgcgtgggtctggaggcggaggcagcggcggaggcgggagcggccagagttttgggttgttggaccctaaattgtgctatctgttggacggaatcctgttcatttacggagtgatcctgaccgcattgttcctgcgggttaagttttccagatccgcagacgcacccgcttaccaacaagggcagaaccaactctacaatgaacttaatttggggcggagggaagagtacgacgttctggacaaaaggaggggacgagatcccgagatgggcggaaagcctcagcgaaggaagaatccgcaagaggggctttataacgaactccagaaagataaaatggcagaagcctatagtgagattgggatgaagggagaaaggaggaggggtaaaggtcacgatgggttgtaccaaggattgagcacagccactaaagatacctatgatgcgctccacatgcaggccctgccgccaagacgcgccaagagaagcggatctggcgtgaagcagaccctgaatttcgacctgctgaagctggctggcgacgtggaatccaacccaggcccttctagaggccatatgaccgagtacaagcccacggtgcgcctcgccacccgcgacgacgtccccagggccgtacgcaccctcgccgccgcgttcgccgactaccccgccacgcgccacaccgtcgatccggaccgccacatcgagcgggtcaccgagctgcaagaactcttcctcacgcgcgtcgggctcgacatcggcaaggtgtgggtcgcggacgacggcgccgcggtggcggtctggaccacgccggagagcgtcgaagcgggggcggtgttcgccgagatcggcccgcgcatggccgagttgagcggttcccggctggccgcgcagcaacagatggaaggcctcctggcgccgcaccggcccaaggagcccgcgtggttcctggccaccgtcggcgtctcgcccgaccaccagggcaagggtctgggcagcgccgtcgtgctccccggagtggaggcggccgagcgcgccggggtgcccgccttcctggagacctccgcgccccgcaacctccccttctacgagcggctcggcttcaccgtcaccgccgacgtcgaggtgcccgaaggaccgcgcacctggtgcatgacccgcaagcccggtgcctga

SEQ ID NO: 6666 - DNA, 2592 bp, Artificial Sequence
  Synthetic Polynucloetide
atggccttaccagtgaccgccttgctcctgccgctggccttgctgctccacgccgccaggccgcagctccagctgcaagagtctggacctggcctggtcaagcctagcgagacactgagcctgacctgtaccgtgtccggcgatagcatcagcagcggcgattactactggggctggatcagacagcctcctggcaaaggactggaatggatcggccacatctactacagcggcgtgacctactacaaccccagcctgaagtccagagtgaccatcagcgtggacaccagccggaaccagttctccctgaagctgtctagcgtgacagccgccgataccgccgtgtactactgcaccagagaggacagcagcaactggcggagtagaggccagggaacactggtcacagttagctctctcgagggacagcctaaggccaatcctaccgtgacactgttccctccaagcagcgaagaactccaggccaacaaggccacacttgtgtgcctgatctccgacttctaccctggggctgtgacagtggcttggaaggccgatggatctcctgtgaaagccggcgtggaaaccaccaagccatccaagcagagcaacaacaaatacgccgccagctcctacctgagcctgacacctgagcagtggaagtcccacagatcctacagctgccaagtgacccacgaaggcagcaccgtggaaaagacagtggcccctacagagtgcagcggcagagccgattgcggctttaccagcgagagctaccagcagggcgtgctgagcgccaccatcctgtacgagatcctgctgggcaaggccaccctgtacgccgtgctggtgtctgccctggtgctgatggctatggtcaagcggaaggacagccggggaagggccaagcgatctggatctggagcaacaaacttctcactactcaaacaagcaggtgacgtggaggagaatcccgggcctactagtatggactggatttggcgcatccttttccttgtcggcgctgctaccggcgcgcattccttcgaagtgcagctggttgaatctggcggaggactggttcagcctggcggatctctgagactgtcttgtgccgccagcggcttcagcttcagcgacttttggatgagctgggtccgacaggcccctggcaaaggacttgaatgggtcgccacaatcagccaggccggcagcgagaaggactacgtggactctgtgaagggcagattcaccatcagccgggacaacgccaagaagtccctgtacctccagatgaacagcctgagagccgaggacaccgccgtgtactattgtgcctctggcgtgtacagcttcgactacagaggccagggcaccctggtcacagtctcttctacgcgtgcctctacaaagggaccctccgtgtttcctctggctcccagcagcaagtctacaagcggaggaacagccgctctgggctgcctggtcaaggattactttcccgagcctgtgaccgtgtcctggaatagcggagcactgacaagcggcgtgcacacctttccagccgtgctgcaaagcagcggcctgtactctctgagcagcgtggtcacagtgcctagctctagcctgggcacccagacctacatctgcaatgtgaaccacaagcctagcaacaccaaggtggacaagagagtggaacccaagagctgtatccccgaggacacattcttcccaagccccgagagcagctgcgacgtgaagctggtggaaaagagcttcgagacagacaccaacctgaacttccagaacctgagcgtgatcggcttcagaatcctgctgctgaaagtggccggctttaacctgctgatgaccctgcggctgtggtccagccgcgccaagagaagcggatctggcgtgaagcagaccctgaatttcgacctgctgaagctggctggcgacgtggaatccaacccaggcccttctagaggccatatgaccgagtacaagcccacggtgcgcctcgccacccgcgacgacgtccccagggccgtacgcaccctcgccgccgcgttcgccgactaccccgccacgcgccacaccgtcgatccggaccgccacatcgagcgggtcaccgagctgcaagaactcttcctcacgcgcgtcgggctcgacatcggcaaggtgtgggtcgcggacgacggcgccgcggtggcggtctggaccacgccggagagcgtcgaagcgggggcggtgttcgccgagatcggcccgcgcatggccgagttgagcggttcccggctggccgcgcagcaacagatggaaggcctcctggcgccgcaccggcccaaggagcccgcgtggttcctggccaccgtcggcgtctcgcccgaccaccagggcaagggtctgggcagcgccgtcgtgctccccggagtggaggcggccgagcgcgccggggtgcccgccttcctggagacctccgcgccccgcaacctccccttctacgagcggctcggcttcaccgtcaccgccgacgtcgaggtgcccgaaggaccgcgcacctggtgcatgacccgcaagcccggtgcctga

SEQ ID NO: 6667 - DNA, 1890 bp, Artificial Sequence; identical to SEQ ID NO: 6640
  Synthetic Polynucloetide

SEQ ID NO: 6668 - DNA, 1977 bp, Artificial Sequence
  Synthetic Polynucloetide
atggccttaccagtgaccgccttgctcctgccgctggccttgctgctccacgccgccaggccgcagctccagctgcaagagtctggacctggcctggtcaagcctagcgagacactgagcctgacctgtaccgtgtccggcgatagcatcagcagcggcgattactactggggctggatcagacagcctcctggcaaaggactggaatggatcggccacatctactacagcggcgtgacctactacaaccccagcctgaagtccagagtgaccatcagcgtggacaccagccggaaccagttctccctgaagctgtctagcgtgacagccgccgataccgccgtgtactactgcaccagagaggacagcagcaactggcggagtagaggccagggaacactggtcacagttagctctctcgagggatctggcagagccgattgcggctttaccagcgagagctaccagcagggcgtgctgagcgccaccatcctgtacgagatcctgctgggcaaggccaccctgtacgccgtgctggtgtctgccctggtgctgatggctatggtcaagcggaaggacagccggggaagggccaagcgatctggatctggagcaacaaacttctcactactcaaacaagcaggtgacgtggaggagaatcccgggcctactagtatggactggatttggcgcatccttttccttgtcggcgctgctaccggcgcgcattccttcgaagtgcagctggttgaatctggcggaggactggttcagcctggcggatctctgagactgtcttgtgccgccagcggcttcagcttcagcgacttttggatgagctgggtccgacaggcccctggcaaaggacttgaatgggtcgccacaatcagccaggccggcagcgagaaggactacgtggactctgtgaagggcagattcaccatcagccgggacaacgccaagaagtccctgtacctccagatgaacagcctgagagccgaggacaccgccgtgtactattgtgcctctggcgtgtacagcttcgactacagaggccagggcaccctggtcacagtctcttctacgcgtggcagcatccccgaggacacattcttcccaagccccgagagcagctgcgacgtgaagctggtggaaaagagcttcgagacagacaccaacctgaacttccagaacctgagcgtgatcggcttcagaatcctgctgctgaaagtggccggctttaacctgctgatgaccctgcggctgtggtccagccgcgccaagagaagcggatctggcgtgaagcagaccctgaatttcgacctgctgaagctggctggcgacgtggaatccaacccaggcccttctagaggccatatgaccgagtacaagcccacggtgcgcctcgccacccgcgacgacgtccccagggccgtacgcaccctcgccgccgcgttcgccgactaccccgccacgcgccacaccgtcgatccggaccgccacatcgagcgggtcaccgagctgcaagaactcttcctcacgcgcgtcgggctcgacatcggcaaggtgtgggtcgcggacgacggcgccgcggtggcggtctggaccacgccggagagcgtcgaagcgggggcggtgttcgccgagatcggcccgcgcatggccgagttgagcggttcccggctggccgcgcagcaacagatggaaggcctcctggcgccgcaccggcccaaggagcccgcgtggttcctggccaccgtcggcgtctcgcccgaccaccagggcaagggtctgggcagcgccgtcgtgctccccggagtggaggcggccgagcgcgccggggtgcccgccttcctggagacctccgcgccccgcaacctccccttctacgagcggctcggcttcaccgtcaccgccgacgtcgaggtgcccgaaggaccgcgcacctggtgcatgacccgcaagcccggtgcctga

SEQ ID NO: 6669 - DNA, 1275 bp, Artificial Sequence
  Synthetic Polynucloetide
atggccttaccagtgaccgccttgctcctgccgctggccttgctgctccacgccgccaggccgcagctccagctgcaagagtctggacctggcctggtcaagcctagcgagacactgagcctgacctgtaccgtgtccggcgatagcatcagcagcggcgattactactggggctggatcagacagcctcctggcaaaggactggaatggatcggccacatctactacagcggcgtgacctactacaaccccagcctgaagtccagagtgaccatcagcgtggacaccagccggaaccagttctccctgaagctgtctagcgtgacagccgccgataccgccgtgtactactgcaccagagaggacagcagcaactggcggagtagaggccagggaacactggtcacagttagctctctcgagggatctggcagagccgattgcggctttaccagcgagagctaccagcagggcgtgctgagcgccaccatcctgtacgagatcctgctgggcaaggccaccctgtacgccgtgctggtgtctgccctggtgctgatggctatggtcaagcggaaggacagccggggaagggccaagcgatctggatctggagcaacaaacttctcactactcaaacaagcaggtgacgtggaggagaatcccgggcctactagtatggactggatttggcgcatccttttccttgtcggcgctgctaccggcgcgcattccttcgaagtgcagctggttgaatctggcggaggactggttcagcctggcggatctctgagactgtcttgtgccgccagcggcttcagcttcagcgacttttggatgagctgggtccgacaggcccctggcaaaggacttgaatgggtcgccacaatcagccaggccggcagcgagaaggactacgtggactctgtgaagggcagattcaccatcagccgggacaacgccaagaagtccctgtacctccagatgaacagcctgagagccgaggacaccgccgtgtactattgtgcctctggcgtgtacagcttcgactacagaggccagggcaccctggtcacagtctcttctacgcgtggcagcatccccgaggacacattcttcccaagccccgagagcagctgcgacgtgaagctggtggaaaagagcttcgagacagacaccaacctgaacttccagaacctgagcgtgatcggcttcagaatcctgctgctgaaagtggccggctttaacctgctgatgaccctgcggctgtggtccagc

SEQ ID NO: 6670 - DNA, 2004 bp, Artificial Sequence
  Synthetic Polynucloetide
atggccttaccagtgaccgccttgctcctgccgctggccttgctgctccacgccgccaggccgcagctccagctgcaagagtctggacctggcctggtcaagcctagcgagacactgagcctgacctgtaccgtgtccggcgatagcatcagcagcggcgattactactggggctggatcagacagcctcctggcaaaggactggaatggatcggccacatctactacagcggcgtgacctactacaaccccagcctgaagtccagagtgaccatcagcgtggacaccagccggaaccagttctccctgaagctgtctagcgtgacagccgccgataccgccgtgtactactgcaccagagaggacagcagcaactggcggagtagaggccagggaacactggtcacagttagctctctcgaggacaaaactcacacatgcccaccgtgcccagcaggcagagccgattgcggctttaccagcgagagctaccagcagggcgtgctgagcgccaccatcctgtacgagatcctgctgggcaaggccaccctgtacgccgtgctggtgtctgccctggtgctgatggctatggtcaagcggaaggacagccggggaagggccaagcgatctggatctggagcaacaaacttctcactactcaaacaagcaggtgacgtggaggagaatcccgggcctactagtatggactggatttggcgcatccttttccttgtcggcgctgctaccggcgcgcattccttcgaagtgcagctggttgaatctggcggaggactggttcagcctggcggatctctgagactgtcttgtgccgccagcggcttcagcttcagcgacttttggatgagctgggtccgacaggcccctggcaaaggacttgaatgggtcgccacaatcagccaggccggcagcgagaaggactacgtggactctgtgaagggcagattcaccatcagccgggacaacgccaagaagtccctgtacctccagatgaacagcctgagagccgaggacaccgccgtgtactattgtgcctctggcgtgtacagcttcgactacagaggccagggcaccctggtcacagtctcttctacgcgtggcagcatccccgaggacacattcttcccaagccccgagagcagctgcgacgtgaagctggtggaaaagagcttcgagacagacaccaacctgaacttccagaacctgagcgtgatcggcttcagaatcctgctgctgaaagtggccggctttaacctgctgatgaccctgcggctgtggtccagccgcgccaagagaagcggatctggcgtgaagcagaccctgaatttcgacctgctgaagctggctggcgacgtggaatccaacccaggcccttctagaggccatatgaccgagtacaagcccacggtgcgcctcgccacccgcgacgacgtccccagggccgtacgcaccctcgccgccgcgttcgccgactaccccgccacgcgccacaccgtcgatccggaccgccacatcgagcgggtcaccgagctgcaagaactcttcctcacgcgcgtcgggctcgacatcggcaaggtgtgggtcgcggacgacggcgccgcggtggcggtctggaccacgccggagagcgtcgaagcgggggcggtgttcgccgagatcggcccgcgcatggccgagttgagcggttcccggctggccgcgcagcaacagatggaaggcctcctggcgccgcaccggcccaaggagcccgcgtggttcctggccaccgtcggcgtctcgcccgaccaccagggcaagggtctgggcagcgccgtcgtgctccccggagtggaggcggccgagcgcgccggggtgcccgccttcctggagacctccgcgccccgcaacctccccttctacgagcggctcggcttcaccgtcaccgccgacgtcgaggtgcccgaaggaccgcgcacctggtgcatgacccgcaagcccggtgcctga

SEQ ID NO: 6671 - DNA, 2004 bp, Artificial Sequence
  Synthetic Polynucloetide
atggccttaccagtgaccgccttgctcctgccgctggccttgctgctccacgccgccaggccgcagctccagctgcaagagtctggacctggcctggtcaagcctagcgagacactgagcctgacctgtaccgtgtccggcgatagcatcagcagcggcgattactactggggctggatcagacagcctcctggcaaaggactggaatggatcggccacatctactacagcggcgtgacctactacaaccccagcctgaagtccagagtgaccatcagcgtggacaccagccggaaccagttctccctgaagctgtctagcgtgacagccgccgataccgccgtgtactactgcaccagagaggacagcagcaactggcggagtagaggccagggaacactggtcacagttagctctctcgagggatctggcagagccgattgcggctttaccagcgagagctaccagcagggcgtgctgagcgccaccatcctgtacgagatcctgctgggcaaggccaccctgtacgccgtgctggtgtctgccctggtgctgatggctatggtcaagcggaaggacagccggggaagggccaagcgatctggatctggagcaacaaacttctcactactcaaacaagcaggtgacgtggaggagaatcccgggcctactagtatggactggatttggcgcatccttttccttgtcggcgctgctaccggcgcgcattccttcgaagtgcagctggttgaatctggcggaggactggttcagcctggcggatctctgagactgtcttgtgccgccagcggcttcagcttcagcgacttttggatgagctgggtccgacaggcccctggcaaaggacttgaatgggtcgccacaatcagccaggccggcagcgagaaggactacgtggactctgtgaagggcagattcaccatcagccgggacaacgccaagaagtccctgtacctccagatgaacagcctgagagccgaggacaccgccgtgtactattgtgcctctggcgtgtacagcttcgactacagaggccagggcaccctggtcacagtctcttctacgcgtgataaaactcatacctgtccgccatgcccggcaatccccgaggacacattcttcccaagccccgagagcagctgcgacgtgaagctggtggaaaagagcttcgagacagacaccaacctgaacttccagaacctgagcgtgatcggcttcagaatcctgctgctgaaagtggccggctttaacctgctgatgaccctgcggctgtggtccagccgcgccaagagaagcggatctggcgtgaagcagaccctgaatttcgacctgctgaagctggctggcgacgtggaatccaacccaggcccttctagaggccatatgaccgagtacaagcccacggtgcgcctcgccacccgcgacgacgtccccagggccgtacgcaccctcgccgccgcgttcgccgactaccccgccacgcgccacaccgtcgatccggaccgccacatcgagcgggtcaccgagctgcaagaactcttcctcacgcgcgtcgggctcgacatcggcaaggtgtgggtcgcggacgacggcgccgcggtggcggtctggaccacgccggagagcgtcgaagcgggggcggtgttcgccgagatcggcccgcgcatggccgagttgagcggttcccggctggccgcgcagcaacagatggaaggcctcctggcgccgcaccggcccaaggagcccgcgtggttcctggccaccgtcggcgtctcgcccgaccaccagggcaagggtctgggcagcgccgtcgtgctccccggagtggaggcggccgagcgcgccggggtgcccgccttcctggagacctccgcgccccgcaacctccccttctacgagcggctcggcttcaccgtcaccgccgacgtcgaggtgcccgaaggaccgcgcacctggtgcatgacccgcaagcccggtgcctga

SEQ ID NO: 6672 - DNA, 2031 bp, Artificial Sequence
  Synthetic Polynucloetide
atggccttaccagtgaccgccttgctcctgccgctggccttgctgctccacgccgccaggccgcagctccagctgcaagagtctggacctggcctggtcaagcctagcgagacactgagcctgacctgtaccgtgtccggcgatagcatcagcagcggcgattactactggggctggatcagacagcctcctggcaaaggactggaatggatcggccacatctactacagcggcgtgacctactacaaccccagcctgaagtccagagtgaccatcagcgtggacaccagccggaaccagttctccctgaagctgtctagcgtgacagccgccgataccgccgtgtactactgcaccagagaggacagcagcaactggcggagtagaggccagggaacactggtcacagttagctctctcgaggacaaaactcacacatgcccaccgtgcccagcaggcagagccgattgcggctttaccagcgagagctaccagcagggcgtgctgagcgccaccatcctgtacgagatcctgctgggcaaggccaccctgtacgccgtgctggtgtctgccctggtgctgatggctatggtcaagcggaaggacagccggggaagggccaagcgatctggatctggagcaacaaacttctcactactcaaacaagcaggtgacgtggaggagaatcccgggcctactagtatggactggatttggcgcatccttttccttgtcggcgctgctaccggcgcgcattccttcgaagtgcagctggttgaatctggcggaggactggttcagcctggcggatctctgagactgtcttgtgccgccagcggcttcagcttcagcgacttttggatgagctgggtccgacaggcccctggcaaaggacttgaatgggtcgccacaatcagccaggccggcagcgagaaggactacgtggactctgtgaagggcagattcaccatcagccgggacaacgccaagaagtccctgtacctccagatgaacagcctgagagccgaggacaccgccgtgtactattgtgcctctggcgtgtacagcttcgactacagaggccagggcaccctggtcacagtctcttctacgcgtgataaaactcatacctgtccgccatgcccggcaatccccgaggacacattcttcccaagccccgagagcagctgcgacgtgaagctggtggaaaagagcttcgagacagacaccaacctgaacttccagaacctgagcgtgatcggcttcagaatcctgctgctgaaagtggccggctttaacctgctgatgaccctgcggctgtggtccagccgcgccaagagaagcggatctggcgtgaagcagaccctgaatttcgacctgctgaagctggctggcgacgtggaatccaacccaggcccttctagaggccatatgaccgagtacaagcccacggtgcgcctcgccacccgcgacgacgtccccagggccgtacgcaccctcgccgccgcgttcgccgactaccccgccacgcgccacaccgtcgatccggaccgccacatcgagcgggtcaccgagctgcaagaactcttcctcacgcgcgtcgggctcgacatcggcaaggtgtgggtcgcggacgacggcgccgcggtggcggtctggaccacgccggagagcgtcgaagcgggggcggtgttcgccgagatcggcccgcgcatggccgagttgagcggttcccggctggccgcgcagcaacagatggaaggcctcctggcgccgcaccggcccaaggagcccgcgtggttcctggccaccgtcggcgtctcgcccgaccaccagggcaagggtctgggcagcgccgtcgtgctccccggagtggaggcggccgagcgcgccggggtgcccgccttcctggagacctccgcgccccgcaacctccccttctacgagcggctcggcttcaccgtcaccgccgacgtcgaggtgcccgaaggaccgcgcacctggtgcatgacccgcaagcccggtgcctga

SEQ ID NO: 6673 - DNA, 1329 bp, Artificial Sequence
  Synthetic Polynucloetide
atggccttaccagtgaccgccttgctcctgccgctggccttgctgctccacgccgccaggccgcagctccagctgcaagagtctggacctggcctggtcaagcctagcgagacactgagcctgacctgtaccgtgtccggcgatagcatcagcagcggcgattactactggggctggatcagacagcctcctggcaaaggactggaatggatcggccacatctactacagcggcgtgacctactacaaccccagcctgaagtccagagtgaccatcagcgtggacaccagccggaaccagttctccctgaagctgtctagcgtgacagccgccgataccgccgtgtactactgcaccagagaggacagcagcaactggcggagtagaggccagggaacactggtcacagttagctctctcgaggacaaaactcacacatgcccaccgtgcccagcaggcagagccgattgcggctttaccagcgagagctaccagcagggcgtgctgagcgccaccatcctgtacgagatcctgctgggcaaggccaccctgtacgccgtgctggtgtctgccctggtgctgatggctatggtcaagcggaaggacagccggggaagggccaagcgatctggatctggagcaacaaacttctcactactcaaacaagcaggtgacgtggaggagaatcccgggcctactagtatggactggatttggcgcatccttttccttgtcggcgctgctaccggcgcgcattccttcgaagtgcagctggttgaatctggcggaggactggttcagcctggcggatctctgagactgtcttgtgccgccagcggcttcagcttcagcgacttttggatgagctgggtccgacaggcccctggcaaaggacttgaatgggtcgccacaatcagccaggccggcagcgagaaggactacgtggactctgtgaagggcagattcaccatcagccgggacaacgccaagaagtccctgtacctccagatgaacagcctgagagccgaggacaccgccgtgtactattgtgcctctggcgtgtacagcttcgactacagaggccagggcaccctggtcacagtctcttctacgcgtgataaaactcatacctgtccgccatgcccggcaatccccgaggacacattcttcccaagccccgagagcagctgcgacgtgaagctggtggaaaagagcttcgagacagacaccaacctgaacttccagaacctgagcgtgatcggcttcagaatcctgctgctgaaagtggccggctttaacctgctgatgaccctgcggctgtggtccagc

SEQ ID NO: 6674 - DNA, 1302 bp, Artificial Sequence
  Synthetic Polynucloetide
atggccttaccagtgaccgccttgctcctgccgctggccttgctgctccacgccgccaggccgcagctccagctgcaagagtctggacctggcctggtcaagcctagcgagacactgagcctgacctgtaccgtgtccggcgatagcatcagcagcggcgattactactggggctggatcagacagcctcctggcaaaggactggaatggatcggccacatctactacagcggcgtgacctactacaaccccagcctgaagtccagagtgaccatcagcgtggacaccagccggaaccagttctccctgaagctgtctagcgtgacagccgccgataccgccgtgtactactgcaccagagaggacagcagcaactggcggagtagaggccagggaacactggtcacagttagctctctcgagggatctggcagagccgattgcggctttaccagcgagagctaccagcagggcgtgctgagcgccaccatcctgtacgagatcctgctgggcaaggccaccctgtacgccgtgctggtgtctgccctggtgctgatggctatggtcaagcggaaggacagccggggaagggccaagcgatctggatctggagcaacaaacttctcactactcaaacaagcaggtgacgtggaggagaatcccgggcctactagtatggactggatttggcgcatccttttccttgtcggcgctgctaccggcgcgcattccttcgaagtgcagctggttgaatctggcggaggactggttcagcctggcggatctctgagactgtcttgtgccgccagcggcttcagcttcagcgacttttggatgagctgggtccgacaggcccctggcaaaggacttgaatgggtcgccacaatcagccaggccggcagcgagaaggactacgtggactctgtgaagggcagattcaccatcagccgggacaacgccaagaagtccctgtacctccagatgaacagcctgagagccgaggacaccgccgtgtactattgtgcctctggcgtgtacagcttcgactacagaggccagggcaccctggtcacagtctcttctacgcgtgataaaactcatacctgtccgccatgcccggcaatccccgaggacacattcttcccaagccccgagagcagctgcgacgtgaagctggtggaaaagagcttcgagacagacaccaacctgaacttccagaacctgagcgtgatcggcttcagaatcctgctgctgaaagtggccggctttaacctgctgatgaccctgcggctgtggtccagc

SEQ ID NO: 6675 - DNA, 2658 bp, Artificial Sequence
  Synthetic Polynucloetide
atggccttaccagtgaccgccttgctcctgccgctggccttgctgctccacgccgccaggccgcagctccagctgcaagagtctggacctggcctggtcaagcctagcgagacactgagcctgacctgtaccgtgtccggcgatagcatcagcagcggcgattactactggggctggatcagacagcctcctggcaaaggactggaatggatcggccacatctactacagcggcgtgacctactacaaccccagcctgaagtccagagtgaccatcagcgtggacaccagccggaaccagttctccctgaagctgtctagcgtgacagccgccgataccgccgtgtactactgcaccagagaggacagcagcaactggcggagtagaggccagggaacactggtcacagttagctctctcgagggacagcctaaggccaatcctaccgtgacactgttccctccaagcagcgaagaactccaggccaacaaggccacacttgtgtgcctgatctccgacttctaccctggggctgtgacagtggcttggaaggccgatggatctcctgtgaaagccggcgtggaaaccaccaagccatccaagcagagcaacaacaaatacgccgccagctcctacctgagcctgacacctgagcagtggaagtcccacagatcctacagctgccaagtgacccacgaaggcagcaccgtggaaaagacagtggcccctacagagtgcagccccatcaagaccgatgtgattacaatggaccccaaggacaactgctccaaggacgccaacgataccctgctgctccagctgaccaacaccagcgcctactacatgtacttgttgctgctgctgaagtccgtggtgtacttcgccatcatcacatgctgcctgctgcggagaaccgccttctgctgcaacggcgagaagtctagggccaagcgatctggatctggagcaacaaacttctcactactcaaacaagcaggtgacgtggaggagaatcccgggcctactagtatggactggatttggcgcatccttttccttgtcggcgctgctaccggcgcgcattccttcgaagtgcagctggttgaatctggcggaggactggttcagcctggcggatctctgagactgtcttgtgccgccagcggcttcagcttcagcgacttttggatgagctgggtccgacaggcccctggcaaaggacttgaatgggtcgccacaatcagccaggccggcagcgagaaggactacgtggactctgtgaagggcagattcaccatcagccgggacaacgccaagaagtccctgtacctccagatgaacagcctgagagccgaggacaccgccgtgtactattgtgcctctggcgtgtacagcttcgactacagaggccagggcaccctggtcacagtctcttctacgcgtgcctctacaaagggaccctccgtgtttcctctggctcccagcagcaagtctacaagcggaggaacagccgctctgggctgcctggtcaaggattactttcccgagcctgtgaccgtgtcctggaatagcggagcactgacaagcggcgtgcacacctttccagccgtgctgcaaagcagcggcctgtactctctgagcagcgtggtcacagtgcctagctctagcctgggcacccagacctacatctgcaatgtgaaccacaagcctagcaacaccaaggtggacaagagagtggaacccaagagctgtgaagtgaaaaccgactccaccgaccacgtgaagcccaaagagacagagaacaccaagcagcccagcaagagctgccacaagcccaaggccatcgtgcacaccgagaaagtgaacatgatgagcctgaccgtgctgggcctgcggatgctgttcgccaaaaccgtggccgtgaacttcctgctgaccgccaagctgttcttcctccgcgccaagagaagcggatctggcgtgaagcagaccctgaatttcgacctgctgaagctggctggcgacgtggaatccaacccaggcccttctagaggccatatgaccgagtacaagcccacggtgcgcctcgccacccgcgacgacgtccccagggccgtacgcaccctcgccgccgcgttcgccgactaccccgccacgcgccacaccgtcgatccggaccgccacatcgagcgggtcaccgagctgcaagaactcttcctcacgcgcgtcgggctcgacatcggcaaggtgtgggtcgcggacgacggcgccgcggtggcggtctggaccacgccggagagcgtcgaagcgggggcggtgttcgccgagatcggcccgcgcatggccgagttgagcggttcccggctggccgcgcagcaacagatggaaggcctcctggcgccgcaccggcccaaggagcccgcgtggttcctggccaccgtcggcgtctcgcccgaccaccagggcaagggtctgggcagcgccgtcgtgctccccggagtggaggcggccgagcgcgccggggtgcccgccttcctggagacctccgcgccccgcaacctccccttctacgagcggctcggcttcaccgtcaccgccgacgtcgaggtgcccgaaggaccgcgcacctggtgcatgacccgcaagcccggtgcctga

SEQ ID NO: 6676 - DNA, 1956 bp, Artificial Sequence; identical to SEQ ID NO: 6638
  Synthetic Polynucloetide

SEQ ID NO: 6677 - DNA, 2043 bp, Artificial Sequence
  Synthetic Polynucloetide
atggccttaccagtgaccgccttgctcctgccgctggccttgctgctccacgccgccaggccgcagctccagctgcaagagtctggacctggcctggtcaagcctagcgagacactgagcctgacctgtaccgtgtccggcgatagcatcagcagcggcgattactactggggctggatcagacagcctcctggcaaaggactggaatggatcggccacatctactacagcggcgtgacctactacaaccccagcctgaagtccagagtgaccatcagcgtggacaccagccggaaccagttctccctgaagctgtctagcgtgacagccgccgataccgccgtgtactactgcaccagagaggacagcagcaactggcggagtagaggccagggaacactggtcacagttagctctctcgagggatctcccatcaagaccgatgtgattacaatggaccccaaggacaactgctccaaggacgccaacgataccctgctgctccagctgaccaacaccagcgcctactacatgtacttgttgctgctgctgaagtccgtggtgtacttcgccatcatcacatgctgcctgctgcggagaaccgccttctgctgcaacggcgagaagtctagggccaagcgatctggatctggagcaacaaacttctcactactcaaacaagcaggtgacgtggaggagaatcccgggcctactagtatggactggatttggcgcatccttttccttgtcggcgctgctaccggcgcgcattccttcgaagtgcagctggttgaatctggcggaggactggttcagcctggcggatctctgagactgtcttgtgccgccagcggcttcagcttcagcgacttttggatgagctgggtccgacaggcccctggcaaaggacttgaatgggtcgccacaatcagccaggccggcagcgagaaggactacgtggactctgtgaagggcagattcaccatcagccgggacaacgccaagaagtccctgtacctccagatgaacagcctgagagccgaggacaccgccgtgtactattgtgcctctggcgtgtacagcttcgactacagaggccagggcaccctggtcacagtctcttctacgcgtggcagcgaagtgaaaaccgactccaccgaccacgtgaagcccaaagagacagagaacaccaagcagcccagcaagagctgccacaagcccaaggccatcgtgcacaccgagaaagtgaacatgatgagcctgaccgtgctgggcctgcggatgctgttcgccaaaaccgtggccgtgaacttcctgctgaccgccaagctgttcttcctccgcgccaagagaagcggatctggcgtgaagcagaccctgaatttcgacctgctgaagctggctggcgacgtggaatccaacccaggcccttctagaggccatatgaccgagtacaagcccacggtgcgcctcgccacccgcgacgacgtccccagggccgtacgcaccctcgccgccgcgttcgccgactaccccgccacgcgccacaccgtcgatccggaccgccacatcgagcgggtcaccgagctgcaagaactcttcctcacgcgcgtcgggctcgacatcggcaaggtgtgggtcgcggacgacggcgccgcggtggcggtctggaccacgccggagagcgtcgaagcgggggcggtgttcgccgagatcggcccgcgcatggccgagttgagcggttcccggctggccgcgcagcaacagatggaaggcctcctggcgccgcaccggcccaaggagcccgcgtggttcctggccaccgtcggcgtctcgcccgaccaccagggcaagggtctgggcagcgccgtcgtgctccccggagtggaggcggccgagcgcgccggggtgcccgccttcctggagacctccgcgccccgcaacctccccttctacgagcggctcggcttcaccgtcaccgccgacgtcgaggtgcccgaaggaccgcgcacctggtgcatgacccgcaagcccggtgcctga

SEQ ID NO: 6678 - DNA, 1341 bp, Artificial Sequence
  Synthetic Polynucloetide
atggccttaccagtgaccgccttgctcctgccgctggccttgctgctccacgccgccaggccgcagctccagctgcaagagtctggacctggcctggtcaagcctagcgagacactgagcctgacctgtaccgtgtccggcgatagcatcagcagcggcgattactactggggctggatcagacagcctcctggcaaaggactggaatggatcggccacatctactacagcggcgtgacctactacaaccccagcctgaagtccagagtgaccatcagcgtggacaccagccggaaccagttctccctgaagctgtctagcgtgacagccgccgataccgccgtgtactactgcaccagagaggacagcagcaactggcggagtagaggccagggaacactggtcacagttagctctctcgagggatctcccatcaagaccgatgtgattacaatggaccccaaggacaactgctccaaggacgccaacgataccctgctgctccagctgaccaacaccagcgcctactacatgtacttgttgctgctgctgaagtccgtggtgtacttcgccatcatcacatgctgcctgctgcggagaaccgccttctgctgcaacggcgagaagtctagggccaagcgatctggatctggagcaacaaacttctcactactcaaacaagcaggtgacgtggaggagaatcccgggcctactagtatggactggatttggcgcatccttttccttgtcggcgctgctaccggcgcgcattccttcgaagtgcagctggttgaatctggcggaggactggttcagcctggcggatctctgagactgtcttgtgccgccagcggcttcagcttcagcgacttttggatgagctgggtccgacaggcccctggcaaaggacttgaatgggtcgccacaatcagccaggccggcagcgagaaggactacgtggactctgtgaagggcagattcaccatcagccgggacaacgccaagaagtccctgtacctccagatgaacagcctgagagccgaggacaccgccgtgtactattgtgcctctggcgtgtacagcttcgactacagaggccagggcaccctggtcacagtctcttctacgcgtggcagcgaagtgaaaaccgactccaccgaccacgtgaagcccaaagagacagagaacaccaagcagcccagcaagagctgccacaagcccaaggccatcgtgcacaccgagaaagtgaacatgatgagcctgaccgtgctgggcctgcggatgctgttcgccaaaaccgtggccgtgaacttcctgctgaccgccaagctgttcttcctc

SEQ ID NO: 6679 - DNA, 2070 bp, Artificial Sequence
  Synthetic Polynucloetide
atggccttaccagtgaccgccttgctcctgccgctggccttgctgctccacgccgccaggccgcagctccagctgcaagagtctggacctggcctggtcaagcctagcgagacactgagcctgacctgtaccgtgtccggcgatagcatcagcagcggcgattactactggggctggatcagacagcctcctggcaaaggactggaatggatcggccacatctactacagcggcgtgacctactacaaccccagcctgaagtccagagtgaccatcagcgtggacaccagccggaaccagttctccctgaagctgtctagcgtgacagccgccgataccgccgtgtactactgcaccagagaggacagcagcaactggcggagtagaggccagggaacactggtcacagttagctctctcgaggacaaaactcacacatgcccaccgtgcccagcacccatcaagaccgatgtgattacaatggaccccaaggacaactgctccaaggacgccaacgataccctgctgctccagctgaccaacaccagcgcctactacatgtacttgttgctgctgctgaagtccgtggtgtacttcgccatcatcacatgctgcctgctgcggagaaccgccttctgctgcaacggcgagaagtctagggccaagcgatctggatctggagcaacaaacttctcactactcaaacaagcaggtgacgtggaggagaatcccgggcctactagtatggactggatttggcgcatccttttccttgtcggcgctgctaccggcgcgcattccttcgaagtgcagctggttgaatctggcggaggactggttcagcctggcggatctctgagactgtcttgtgccgccagcggcttcagcttcagcgacttttggatgagctgggtccgacaggcccctggcaaaggacttgaatgggtcgccacaatcagccaggccggcagcgagaaggactacgtggactctgtgaagggcagattcaccatcagccgggacaacgccaagaagtccctgtacctccagatgaacagcctgagagccgaggacaccgccgtgtactattgtgcctctggcgtgtacagcttcgactacagaggccagggcaccctggtcacagtctcttctacgcgtggcagcgaagtgaaaaccgactccaccgaccacgtgaagcccaaagagacagagaacaccaagcagcccagcaagagctgccacaagcccaaggccatcgtgcacaccgagaaagtgaacatgatgagcctgaccgtgctgggcctgcggatgctgttcgccaaaaccgtggccgtgaacttcctgctgaccgccaagctgttcttcctccgcgccaagagaagcggatctggcgtgaagcagaccctgaatttcgacctgctgaagctggctggcgacgtggaatccaacccaggcccttctagaggccatatgaccgagtacaagcccacggtgcgcctcgccacccgcgacgacgtccccagggccgtacgcaccctcgccgccgcgttcgccgactaccccgccacgcgccacaccgtcgatccggaccgccacatcgagcgggtcaccgagctgcaagaactcttcctcacgcgcgtcgggctcgacatcggcaaggtgtgggtcgcggacgacggcgccgcggtggcggtctggaccacgccggagagcgtcgaagcgggggcggtgttcgccgagatcggcccgcgcatggccgagttgagcggttcccggctggccgcgcagcaacagatggaaggcctcctggcgccgcaccggcccaaggagcccgcgtggttcctggccaccgtcggcgtctcgcccgaccaccagggcaagggtctgggcagcgccgtcgtgctccccggagtggaggcggccgagcgcgccggggtgcccgccttcctggagacctccgcgccccgcaacctccccttctacgagcggctcggcttcaccgtcaccgccgacgtcgaggtgcccgaaggaccgcgcacctggtgcatgacccgcaagcccggtgcctga

SEQ ID NO: 6680 - DNA, 2070 bp, Artificial Sequence
  Synthetic Polynucloetide
atggccttaccagtgaccgccttgctcctgccgctggccttgctgctccacgccgccaggccgcagctccagctgcaagagtctggacctggcctggtcaagcctagcgagacactgagcctgacctgtaccgtgtccggcgatagcatcagcagcggcgattactactggggctggatcagacagcctcctggcaaaggactggaatggatcggccacatctactacagcggcgtgacctactacaaccccagcctgaagtccagagtgaccatcagcgtggacaccagccggaaccagttctccctgaagctgtctagcgtgacagccgccgataccgccgtgtactactgcaccagagaggacagcagcaactggcggagtagaggccagggaacactggtcacagttagctctctcgagggatctcccatcaagaccgatgtgattacaatggaccccaaggacaactgctccaaggacgccaacgataccctgctgctccagctgaccaacaccagcgcctactacatgtacttgttgctgctgctgaagtccgtggtgtacttcgccatcatcacatgctgcctgctgcggagaaccgccttctgctgcaacggcgagaagtctagggccaagcgatctggatctggagcaacaaacttctcactactcaaacaagcaggtgacgtggaggagaatcccgggcctactagtatggactggatttggcgcatccttttccttgtcggcgctgctaccggcgcgcattccttcgaagtgcagctggttgaatctggcggaggactggttcagcctggcggatctctgagactgtcttgtgccgccagcggcttcagcttcagcgacttttggatgagctgggtccgacaggcccctggcaaaggacttgaatgggtcgccacaatcagccaggccggcagcgagaaggactacgtggactctgtgaagggcagattcaccatcagccgggacaacgccaagaagtccctgtacctccagatgaacagcctgagagccgaggacaccgccgtgtactattgtgcctctggcgtgtacagcttcgactacagaggccagggcaccctggtcacagtctcttctacgcgtgataaaactcatacctgtccgccatgcccggcagaagtgaaaaccgactccaccgaccacgtgaagcccaaagagacagagaacaccaagcagcccagcaagagctgccacaagcccaaggccatcgtgcacaccgagaaagtgaacatgatgagcctgaccgtgctgggcctgcggatgctgttcgccaaaaccgtggccgtgaacttcctgctgaccgccaagctgttcttcctccgcgccaagagaagcggatctggcgtgaagcagaccctgaatttcgacctgctgaagctggctggcgacgtggaatccaacccaggcccttctagaggccatatgaccgagtacaagcccacggtgcgcctcgccacccgcgacgacgtccccagggccgtacgcaccctcgccgccgcgttcgccgactaccccgccacgcgccacaccgtcgatccggaccgccacatcgagcgggtcaccgagctgcaagaactcttcctcacgcgcgtcgggctcgacatcggcaaggtgtgggtcgcggacgacggcgccgcggtggcggtctggaccacgccggagagcgtcgaagcgggggcggtgttcgccgagatcggcccgcgcatggccgagttgagcggttcccggctggccgcgcagcaacagatggaaggcctcctggcgccgcaccggcccaaggagcccgcgtggttcctggccaccgtcggcgtctcgcccgaccaccagggcaagggtctgggcagcgccgtcgtgctccccggagtggaggcggccgagcgcgccggggtgcccgccttcctggagacctccgcgccccgcaacctccccttctacgagcggctcggcttcaccgtcaccgccgacgtcgaggtgcccgaaggaccgcgcacctggtgcatgacccgcaagcccggtgcctga

SEQ ID NO: 6681 - DNA, 2097 bp, Artificial Sequence
  Synthetic Polynucloetide
atggccttaccagtgaccgccttgctcctgccgctggccttgctgctccacgccgccaggccgcagctccagctgcaagagtctggacctggcctggtcaagcctagcgagacactgagcctgacctgtaccgtgtccggcgatagcatcagcagcggcgattactactggggctggatcagacagcctcctggcaaaggactggaatggatcggccacatctactacagcggcgtgacctactacaaccccagcctgaagtccagagtgaccatcagcgtggacaccagccggaaccagttctccctgaagctgtctagcgtgacagccgccgataccgccgtgtactactgcaccagagaggacagcagcaactggcggagtagaggccagggaacactggtcacagttagctctctcgaggacaaaactcacacatgcccaccgtgcccagcacccatcaagaccgatgtgattacaatggaccccaaggacaactgctccaaggacgccaacgataccctgctgctccagctgaccaacaccagcgcctactacatgtacttgttgctgctgctgaagtccgtggtgtacttcgccatcatcacatgctgcctgctgcggagaaccgccttctgctgcaacggcgagaagtctagggccaagcgatctggatctggagcaacaaacttctcactactcaaacaagcaggtgacgtggaggagaatcccgggcctactagtatggactggatttggcgcatccttttccttgtcggcgctgctaccggcgcgcattccttcgaagtgcagctggttgaatctggcggaggactggttcagcctggcggatctctgagactgtcttgtgccgccagcggcttcagcttcagcgacttttggatgagctgggtccgacaggcccctggcaaaggacttgaatgggtcgccacaatcagccaggccggcagcgagaaggactacgtggactctgtgaagggcagattcaccatcagccgggacaacgccaagaagtccctgtacctccagatgaacagcctgagagccgaggacaccgccgtgtactattgtgcctctggcgtgtacagcttcgactacagaggccagggcaccctggtcacagtctcttctacgcgtgataaaactcatacctgtccgccatgcccggcagaagtgaaaaccgactccaccgaccacgtgaagcccaaagagacagagaacaccaagcagcccagcaagagctgccacaagcccaaggccatcgtgcacaccgagaaagtgaacatgatgagcctgaccgtgctgggcctgcggatgctgttcgccaaaaccgtggccgtgaacttcctgctgaccgccaagctgttcttcctccgcgccaagagaagcggatctggcgtgaagcagaccctgaatttcgacctgctgaagctggctggcgacgtggaatccaacccaggcccttctagaggccatatgaccgagtacaagcccacggtgcgcctcgccacccgcgacgacgtccccagggccgtacgcaccctcgccgccgcgttcgccgactaccccgccacgcgccacaccgtcgatccggaccgccacatcgagcgggtcaccgagctgcaagaactcttcctcacgcgcgtcgggctcgacatcggcaaggtgtgggtcgcggacgacggcgccgcggtggcggtctggaccacgccggagagcgtcgaagcgggggcggtgttcgccgagatcggcccgcgcatggccgagttgagcggttcccggctggccgcgcagcaacagatggaaggcctcctggcgccgcaccggcccaaggagcccgcgtggttcctggccaccgtcggcgtctcgcccgaccaccagggcaagggtctgggcagcgccgtcgtgctccccggagtggaggcggccgagcgcgccggggtgcccgccttcctggagacctccgcgccccgcaacctccccttctacgagcggctcggcttcaccgtcaccgccgacgtcgaggtgcccgaaggaccgcgcacctggtgcatgacccgcaagcccggtgcctga

SEQ ID NO: 6682 - DNA, 1395 bp, Artificial Sequence
  Synthetic Polynucloetide
atggccttaccagtgaccgccttgctcctgccgctggccttgctgctccacgccgccaggccgcagctccagctgcaagagtctggacctggcctggtcaagcctagcgagacactgagcctgacctgtaccgtgtccggcgatagcatcagcagcggcgattactactggggctggatcagacagcctcctggcaaaggactggaatggatcggccacatctactacagcggcgtgacctactacaaccccagcctgaagtccagagtgaccatcagcgtggacaccagccggaaccagttctccctgaagctgtctagcgtgacagccgccgataccgccgtgtactactgcaccagagaggacagcagcaactggcggagtagaggccagggaacactggtcacagttagctctctcgaggacaaaactcacacatgcccaccgtgcccagcacccatcaagaccgatgtgattacaatggaccccaaggacaactgctccaaggacgccaacgataccctgctgctccagctgaccaacaccagcgcctactacatgtacttgttgctgctgctgaagtccgtggtgtacttcgccatcatcacatgctgcctgctgcggagaaccgccttctgctgcaacggcgagaagtctagggccaagcgatctggatctggagcaacaaacttctcactactcaaacaagcaggtgacgtggaggagaatcccgggcctactagtatggactggatttggcgcatccttttccttgtcggcgctgctaccggcgcgcattccttcgaagtgcagctggttgaatctggcggaggactggttcagcctggcggatctctgagactgtcttgtgccgccagcggcttcagcttcagcgacttttggatgagctgggtccgacaggcccctggcaaaggacttgaatgggtcgccacaatcagccaggccggcagcgagaaggactacgtggactctgtgaagggcagattcaccatcagccgggacaacgccaagaagtccctgtacctccagatgaacagcctgagagccgaggacaccgccgtgtactattgtgcctctggcgtgtacagcttcgactacagaggccagggcaccctggtcacagtctcttctacgcgtgataaaactcatacctgtccgccatgcccggcagaagtgaaaaccgactccaccgaccacgtgaagcccaaagagacagagaacaccaagcagcccagcaagagctgccacaagcccaaggccatcgtgcacaccgagaaagtgaacatgatgagcctgaccgtgctgggcctgcggatgctgttcgccaaaaccgtggccgtgaacttcctgctgaccgccaagctgttcttcctc

SEQ ID NO: 6683 - DNA, 2184 bp, Artificial Sequence
  Synthetic Polynucloetide
atggccttaccagtgaccgccttgctcctgccgctggccttgctgctccacgccgccaggccgcagctccagctgcaagagtctggacctggcctggtcaagcctagcgagacactgagcctgacctgtaccgtgtccggcgatagcatcagcagcggcgattactactggggctggatcagacagcctcctggcaaaggactggaatggatcggccacatctactacagcggcgtgacctactacaaccccagcctgaagtccagagtgaccatcagcgtggacaccagccggaaccagttctccctgaagctgtctagcgtgacagccgccgataccgccgtgtactactgcaccagagaggacagcagcaactggcggagtagaggccagggaacactggtcacagttagctctctcgagagcggcggaggcggatctttccaggtgcagctggttgaatctggcggaggactggttcagcctggcggatctctgagactgtcttgtgccgccagcggcttcaccttcaccaatcacgccatgagctgggtccgacaggcccctggaaaaggactggaactggtgtctagcatcagcggcaacggcagaaccacctactacgccgatagcgtgaagggcagattcaccatcagccgggacatcagcaagaacaccctggacctccagatgaacagcctgagagccgaggataccgccgtgtactactgtgccaaggatggcggagagacactggtggatagcagaggccagggcacactggtcacagtgtcatctacgcgtgagcagaaactgatctcggaagaggatctggcgaagcccaccacgacgccagcgccgcgaccaccaacaccggcgcccaccatcgcgtcgcagcccctgtccctgcgcccagaggcgtgccggccagcggcggggggcgcagtgcacacgagggggctggacttcgcctgtgacatctacatctgggcgcccttggccgggacttgtggggtccttctcctgtcactggttatcaccctttactgcaaacggggcagaaagaaactcctgtatatattcaaacaaccatttatgagaccagtacaaactactcaagaggaagatggctgtagctgccgatttccagaagaagaagaaggaggatgtgaactgagagtgaagttcagcaggagcgcagacgcccccgcgtaccagcagggccagaaccagctctataacgagctgaatctaggacgaagagaggagtacgatgttttggacaagagacgtggccgggaccctgagatggggggaaagccgagaaggaagaaccctcaggaaggcctgtacaatgaactgcagaaagataagatggcggaggcctacagtgagattgggatgaaaggcgagcgccggaggggcaaggggcacgatggcctttaccagggtctcagtacagccaccaaggacacctacgacgcccttcacatgcaggccctgccccctcgctctagtggctccggcgagggcagaggaagtctactaacctgcggagatgtggaagaaaatcctggcccacatatgaccgagtacaagcccacggtgcgcctcgccacccgcgacgacgtccccagggccgtacgcaccctcgccgccgcgttcgccgactaccccgccacgcgccacaccgtcgatccggaccgccacatcgagcgggtcaccgagctgcaagaactcttcctcacgcgcgtcgggctcgacatcggcaaggtgtgggtcgcggacgacggcgccgcggtggcggtctggaccacgccggagagcgtcgaagcgggggcggtgttcgccgagatcggcccgcgcatggccgagttgagcggttcccggctggccgcgcagcaacagatggaaggcctcctggcgccgcaccggcccaaggagcccgcgtggttcctggccaccgtcggcgtctcgcccgaccaccagggcaagggtctgggcagcgccgtcgtgctccccggagtggaggcggccgagcgcgccggggtgcccgccttcctggagacctccgcgccccgcaacctccccttctacgagcggctcggcttcaccgtcaccgccgacgtcgaggtgcccgaaggaccgcgcacctggtgcatgacccgcaagcccggtgcctga

SEQ ID NO: 6684 - DNA, 2166 bp, Artificial Sequence
  Synthetic Polynucloetide
atggccttaccagtgaccgccttgctcctgccgctggccttgctgctccacgccgccaggccgcagctccagctgcaagagtctggacctggcctggtcaagcctagcgagacactgagcctgacctgtaccgtgtccggcgatagcatcagcagcggcgattactactggggctggatcagacagcctcctggcaaaggactggaatggatcggccacatctactacagcggcgtgacctactacaaccccagcctgaagtccagagtgaccatcagcgtggacaccagccggaaccagttctccctgaagctgtctagcgtgacagccgccgataccgccgtgtactactgcaccagagaggacagcagcaactggcggagtagaggccagggaacactggtcacagttagctctctcgagagcggcggaggcggatctttccaggtgcagctggttgaatctggcggaggactggttcagcctggcggatctctgagactgtcttgtgccgccagcggcttcaccttcaccaatcacgccatgagctgggtccgacaggcccctggaaaaggactggaactggtgtctagcatcagcggcaacggcagaaccacctactacgccgatagcgtgaagggcagattcaccatcagccgggacatcagcaagaacaccctggacctccagatgaacagcctgagagccgaggataccgccgtgtactactgtgccaaggatggcggagagacactggtggatagcagaggccagggcacactggtcacagtgtcatctacgcgtgagcagaaactgatctcggaagaggatctgaaaattgaagttatgtatcctcctccttacctagacaatgagaagagcaatggaaccattatccatgtgaaagggaaacacctttgtccaagtcccctatttcccggaccttctaagcccttttgggtgctggtggtggttgggggagtcctggcttgctatagcttgctagtaacagtggcctttattattttctgggtgaggagtaagaggagcaggctcctgcacagtgactacatgaacatgactccacgccgccccggacccacccgcaagcattaccagccctatgccccaccacgcgacttcgcagcctatcgctccagagtgaagttcagcaggagcgcagacgcccccgcgtaccagcagggccagaaccagctctataacgagctcaatctaggacgaagagaggagtacgatgttttggacaagagacgtggccgggaccctgagatggggggaaagccgagaaggaagaaccctcaggaaggcctgtacaatgaactgcagaaagataagatggcggaggcctacagtgagattgggatgaaaggcgagcgccggaggggcaaggggcacgatggcctttaccagggtctcagtacagccaccaaggacacctacgacgcccttcacatgcaggccctgccccctcgctctagtggctccggcgagggcagaggaagtctactaacctgcggagatgtggaagaaaatcctggcccacatatgaccgagtacaagcccacggtgcgcctcgccacccgcgacgacgtccccagggccgtacgcaccctcgccgccgcgttcgccgactaccccgccacgcgccacaccgtcgatccggaccgccacatcgagcgggtcaccgagctgcaagaactcttcctcacgcgcgtcgggctcgacatcggcaaggtgtgggtcgcggacgacggcgccgcggtggcggtctggaccacgccggagagcgtcgaagcgggggcggtgttcgccgagatcggcccgcgcatggccgagttgagcggttcccggctggccgcgcagcaacagatggaaggcctcctggcgccgcaccggcccaaggagcccgcgtggttcctggccaccgtcggcgtctcgcccgaccaccagggcaagggtctgggcagcgccgtcgtgctccccggagtggaggcggccgagcgcgccggggtgcccgccttcctggagacctccgcgccccgcaacctccccttctacgagcggctcggcttcaccgtcaccgccgacgtcgaggtgcccgaaggaccgcgcacctggtgcatgacccgcaagcccggtgcctga

SEQ ID NO: 6685 - DNA, 1494 bp, Artificial Sequence
  Synthetic Polynucloetide
atggccttaccagtgaccgccttgctcctgccgctggccttgctgctccacgccgccaggccgcagctccagctgcaagagtctggacctggcctggtcaagcctagcgagacactgagcctgacctgtaccgtgtccggcgatagcatcagcagcggcgattactactggggctggatcagacagcctcctggcaaaggactggaatggatcggccacatctactacagcggcgtgacctactacaaccccagcctgaagtccagagtgaccatcagcgtggacaccagccggaaccagttctccctgaagctgtctagcgtgacagccgccgataccgccgtgtactactgcaccagagaggacagcagcaactggcggagtagaggccagggaacactggtcacagttagctctctcgagagcggcggaggcggatctttccaggtgcagctggttgaatctggcggaggactggttcagcctggcggatctctgagactgtcttgtgccgccagcggcttcaccttcaccaatcacgccatgagctgggtccgacaggcccctggaaaaggactggaactggtgtctagcatcagcggcaacggcagaaccacctactacgccgatagcgtgaagggcagattcaccatcagccgggacatcagcaagaacaccctggacctccagatgaacagcctgagagccgaggataccgccgtgtactactgtgccaaggatggcggagagacactggtggatagcagaggccagggcacactggtcacagtgtcatctacgcgtgagcagaaactgatctcggaagaggatctgaaaattgaagttatgtatcctcctccttacctagacaatgagaagagcaatggaaccattatccatgtgaaagggaaacacctttgtccaagtcccctatttcccggaccttctaagcccttttgggtgctggtggtggttgggggagtcctggcttgctatagcttgctagtaacagtggcctttattattttctgggtgaggagtaagaggagcaggctcctgcacagtgactacatgaacatgactccacgccgccccggacccacccgcaagcattaccagccctatgccccaccacgcgacttcgcagcctatcgctccagagtgaagttcagcaggagcgcagacgcccccgcgtaccagcagggccagaaccagctctataacgagctcaatctaggacgaagagaggagtacgatgttttggacaagagacgtggccgggaccctgagatggggggaaagccgagaaggaagaaccctcaggaaggcctgtacaatgaactgcagaaagataagatggcggaggcctacagtgagattgggatgaaaggcgagcgccggaggggcaaggggcacgatggcctttaccagggtctcagtacagccaccaaggacacctacgacgcccttcacatgcaggccctgccccctcgc

SEQ ID NO: 6686 - DNA, 1515 bp, Artificial Sequence
  Synthetic Polynucloetide
atggccttaccagtgaccgccttgctcctgccgctggccttgctgctccacgccgccaggccgcagctccagctgcaagagtctggacctggcctggtcaagcctagcgagacactgagcctgacctgtaccgtgtccggcgatagcatcagcagcggcgattactactggggctggatcagacagcctcctggcaaaggactggaatggatcggccacatctactacagcggcgtgacctactacaaccccagcctgaagtccagagtgaccatcagcgtggacaccagccggaaccagttctccctgaagctgtctagcgtgacagccgccgataccgccgtgtactactgcaccagagaggacagcagcaactggcggagtagaggccagggaacactggtcacagttagctctctcgagagcggcggaggcggatctttccaggtgcagctggttgaatctggcggaggactggttcagcctggcggatctctgagactgtcttgtgccgccagcggcttcaccttcaccaatcacgccatgagctgggtccgacaggcccctggaaaaggactggaactggtgtctagcatcagcggcaacggcagaaccacctactacgccgatagcgtgaagggcagattcaccatcagccgggacatcagcaagaacaccctggacctccagatgaacagcctgagagccgaggataccgccgtgtactactgtgccaaggatggcggagagacactggtggatagcagaggccagggcacactggtcacagtgtcatctacgcgtgagcagaaactgatctcggaagaggatctggcgaagcccaccacgacgccagcgccgcgaccaccaacaccggcgcccaccatcgcgtcgcagcccctgtccctgcgcccagaggcgtgccggccagcggcggggggcgcagtgcacacgagggggctggacttcgcctgtgacatctacatctgggcgcccttggccgggacttgtggggtccttctcctgtcactggttatcaccctttactgcaaacggggcagaaagaaactcctgtatatattcaaacaaccatttatgagaccagtacaaactactcaagaggaagatggctgtagctgccgatttccagaagaagaagaaggaggatgtgaactgagagtgaagttcagcaggagcgcagacgcccccgcgtaccagcagggccagaaccagctctataacgagctgaatctaggacgaagagaggagtacgatgttttggacaagagacgtggccgggaccctgagatggggggaaagccgagaaggaagaaccctcaggaaggcctgtacaatgaactgcagaaagataagatggcggaggcctacagtgagattgggatgaaaggcgagcgccggaggggcaaggggcacgatggcctttaccagggtctcagtacagccaccaaggacacctacgacgcccttcacatgcaggccctgccccctcgctga

SEQ ID NO: 6687 - DNA, 1518 bp, Artificial Sequence
  Synthetic Polynucloetide
atggccttaccagtgaccgccttgctcctgccgctggccttgctgctccacgccgccaggccgcaggtgcagctggttgaatctggcggaggactggttcagcctggcggatctctgagactgtcttgtgccgccagcggcttcaccttcaccaatcacgccatgagctgggtccgacaggcccctggaaaaggactggaactggtgtctagcatcagcggcaacggcagaaccacctactacgccgatagcgtgaagggcagattcaccatcagccgggacatcagcaagaacaccctggacctccagatgaacagcctgagagccgaggataccgccgtgtactactgtgccaaggatggcggagagacactggtggatagcagaggccagggcacactggtcacagtgtcatctctcgagagcggcggaggcggatctttcgaacagctccagctgcaagagtctggacctggcctggtcaagcctagcgagacactgagcctgacctgtaccgtgtccggcgatagcatcagcagcggcgattactactggggctggatcagacagcctcctggcaaaggactggaatggatcggccacatctactacagcggcgtgacctactacaaccccagcctgaagtccagagtgaccatcagcgtggacaccagccggaaccagttctccctgaagctgtctagcgtgacagccgccgataccgccgtgtactactgcaccagagaggacagcagcaactggcggagtagaggccagggaacactggtcacagttagctctacgcgtgagcagaaactgatctcggaagaggatctggcgaagcccaccacgacgccagcgccgcgaccaccaacaccggcgcccaccatcgcgtcgcagcccctgtccctgcgcccagaggcgtgccggccagcggcggggggcgcagtgcacacgagggggctggacttcgcctgtgacatctacatctgggcgcccttggccgggacttgtggggtccttctcctgtcactggttatcaccctttactgcaaacggggcagaaagaaactcctgtatatattcaaacaaccatttatgagaccagtacaaactactcaagaggaagatggctgtagctgccgatttccagaagaagaagaaggaggatgtgaactgagagtgaagttcagcaggagcgcagacgcccccgcgtaccagcagggccagaaccagctctataacgagctgaatctaggacgaagagaggagtacgatgttttggacaagagacgtggccgggaccctgagatggggggaaagccgagaaggaagaaccctcaggaaggcctgtacaatgaactgcagaaagataagatggcggaggcctacagtgagattgggatgaaaggcgagcgccggaggggcaaggggcacgatggcctttaccagggtctcagtacagccaccaaggacacctacgacgcccttcacatgcaggccctgccccctcgctga

SEQ ID NO: 6688 - DNA, 2754 bp, Artificial Sequence
  Synthetic Polynucloetide
atggccttaccagtgaccgccttgctcctgccgctggccttgctgctccacgccgccaggccgcagctccagctgcaagagtctggacctggcctggtcaagcctagcgagacactgagcctgacctgtaccgtgtccggcgatagcatcagcagcggcgattactactggggctggatcagacagcctcctggcaaaggactggaatggatcggccacatctactacagcggcgtgacctactacaaccccagcctgaagtccagagtgaccatcagcgtggacaccagccggaaccagttctccctgaagctgtctagcgtgacagccgccgataccgccgtgtactactgcaccagagaggacagcagcaactggcggagtagaggccagggaacactggtcacagttagctctctcgagagcggcggaggcggatctttccaggtgcagctggttgaatctggcggaggactggttcagcctggcggatctctgagactgtcttgtgccgccagcggcttcaccttcaccaatcacgccatgagctgggtccgacaggcccctggaaaaggactggaactggtgtctagcatcagcggcaacggcagaaccacctactacgccgatagcgtgaagggcagattcaccatcagccgggacatcagcaagaacaccctggacctccagatgaacagcctgagagccgaggataccgccgtgtactactgtgccaaggatggcggagagacactggtggatagcagaggccagggcacactggtcacagtgtcatctacgcgtgagcagaaactgatctcggaagaggatctggcgaagcccaccacgacgccagcgccgcgaccaccaacaccggcgcccaccatcgcgtcgcagcccctgtccctgcgcccagaggcgtgccggccagcggcggggggcgcagtgcacacgagggggctggacttcgcctgtgacatctacatctgggcgcccttggccgggacttgtggggtccttctcctgtcactggttatcaccctttactgcgggcgcgccagagtgaagttcagcaggagcgcagacgcccccgcgtaccagcagggccagaaccagctctataacgagctgaatctaggacgaagagaggagtacgatgttttggacaagagacgtggccgggaccctgagatggggggaaagccgagaaggaagaaccctcaggaaggcctgtacaatgaactgcagaaagataagatggcggaggcctacagtgagattgggatgaaaggcgagcgccggaggggcaaggggcacgatggcctttaccagggtctcagtacagccaccaaggacacctacgacgcccttcacatgcaggccctgccccctcgctctagaggatctggagcaacaaacttctcactactcaaacaagcaggtgacgtggaggagaatcccgggcctgggatccacatggccacttacgaggttctctgtgaggtggcgcggaaactgggcacggatgacagggaagtggtattgttcctcctaaacgtgttcatacctcaacccacactggcccaattaattggagctcttagagctttaaaggaggagggcaggttaacgtttcccctgttagcggaatgtctgtttcgtgcaggtcgcagagacctcttgcgcgacctgcttcacttagacccgcgttttttagagcgccacctagcgggcacaatgagttatttcagcccttatcagctcactgttctccacgtagacggggagctgtgtgcgagggatattaggtctttgatatttttaagcaaggacactatagggtctcgcagcacaccacagacattcttacactgggtgtactgtatggaaaacttagacctactgggtcccactgacgtggatgccctaatgtcaatgcttagatctttgtcaagagtagacctacagcgccaagtgcaaaccctaatgggccttcacctttccggcccatcacactcccaacactatcgccatacaccactcgagaccgatttctacgactacaaggacgacgatgacaagactagtggctccggcgagggcagaggaagtctactaacctgcggagatgtggaagaaaatcctggcccacatatgaccgagtacaagcccacggtgcgcctcgccacccgcgacgacgtccccagggccgtacgcaccctcgccgccgcgttcgccgactaccccgccacgcgccacaccgtcgatccggaccgccacatcgagcgggtcaccgagctgcaagaactcttcctcacgcgcgtcgggctcgacatcggcaaggtgtgggtcgcggacgacggcgccgcggtggcggtctggaccacgccggagagcgtcgaagcgggggcggtgttcgccgagatcggcccgcgcatggccgagttgagcggttcccggctggccgcgcagcaacagatggaaggcctcctggcgccgcaccggcccaaggagcccgcgtggttcctggccaccgtcggcgtctcgcccgaccaccagggcaagggtctgggcagcgccgtcgtgctccccggagtggaggcggccgagcgcgccggggtgcccgccttcctggagacctccgcgccccgcaacctccccttctacgagcggctcggcttcaccgtcaccgccgacgtcgaggtgcccgaaggaccgcgcacctggtgcatgacccgcaagcccggtgcctga

SEQ ID NO: 6689 - DNA, 2589 bp, Artificial Sequence
  Synthetic Polynucloetide
atggccttaccagtgaccgccttgctcctgccgctggccttgctgctccacgccgccaggccgcagctccagctgcaagagtctggacctggcctggtcaagcctagcgagacactgagcctgacctgtaccgtgtccggcgatagcatcagcagcggcgattactactggggctggatcagacagcctcctggcaaaggactggaatggatcggccacatctactacagcggcgtgacctactacaaccccagcctgaagtccagagtgaccatcagcgtggacaccagccggaaccagttctccctgaagctgtctagcgtgacagccgccgataccgccgtgtactactgcaccagagaggacagcagcaactggcggagtagaggccagggaacactggtcacagttagctctctcgagatccagaaccctgatcctgccgtgtaccagctgcgggatagcaagagcagcgacaagagcgtgtgtctgttcaccgacttcgacagccagaccaacgtgtcccagagcaaggactccgacgtgtacatcaccgataagtgcgtgctggacatgcggagcatggacttcaagagcaactccgccgtggcctggtccaacaagtccgatttcgcctgcgccaacgccttcaacaacagcattatccccgaggacacattcttcccaagcagcgacgtgccctgcgacgtgaagctggtggaaaagagcttcgagacagacaccaacctgaacttccagaacctgagcgtgatcggcttcagaatcctgctgctgaaagtggccggctttaacctgctgatgaccctgcggctgtggtccagccgcgccaagagaagcggatctggcgtgaagcagaccctgaatttcgacctgctgaagctggctggcgacgtggaatccaacccaggccctactagtatggactggatttggcgcatccttttccttgtcggcgctgctaccggcgcgcattccttccaggtgcagctggttgaatctggcggaggactggttcagcctggcggatctctgagactgtcttgtgccgccagcggcttcaccttcaccaatcacgccatgagctgggtccgacaggcccctggaaaaggactggaactggtgtctagcatcagcggcaacggcagaaccacctactacgccgatagcgtgaagggcagattcaccatcagccgggacatcagcaagaacaccctggacctccagatgaacagcctgagagccgaggataccgccgtgtactactgtgccaaggatggcggagagacactggtggatagcagaggccagggcacactggtcacagtgtcatctacgcgtgaggacctgaagaacgtgttcccacctgaggtggccgtgttcgagcctagcaaggccgagatcgcccacacccagaaagccaccctcgtgtgcctggctaccggcttctaccccgaccatgtggaactgtcttggtgggtcaacggcaaagaggtgcacagcggcgtgtgtaccgacccccagccactgaaagaacagcccgccctgaacgacagccggtactgcctgagcagcagactgagagtgtccgccaccttctggcagaacccccggaaccacttcagatgccaggtgcagttctacggcctgagcgagaacgacgagtggacccaggacagagccaagcccgtgacccagatcgtgtctgccgaagcctggggcagagccgattgcggcatcaccagcgccagctaccaccagggcgtgctgagcgccaccatcctgtacgagatcctgctgggcaaggccaccctgtacgccgtgctggtgtctgccctggtgctgatggctatggtcaagcggaaggacagccggggaagggccaagcgatctggatctggagcaacaaacttctcactactcaaacaagcaggtgacgtggaggagaatcccgggccttctagaggccatatgaccgagtacaagcccacggtgcgcctcgccacccgcgacgacgtccccagggccgtacgcaccctcgccgccgcgttcgccgactaccccgccacgcgccacaccgtcgatccggaccgccacatcgagcgggtcaccgagctgcaagaactcttcctcacgcgcgtcgggctcgacatcggcaaggtgtgggtcgcggacgacggcgccgcggtggcggtctggaccacgccggagagcgtcgaagcgggggcggtgttcgccgagatcggcccgcgcatggccgagttgagcggttcccggctggccgcgcagcaacagatggaaggcctcctggcgccgcaccggcccaaggagcccgcgtggttcctggccaccgtcggcgtctcgcccgaccaccagggcaagggtctgggcagcgccgtcgtgctccccggagtggaggcggccgagcgcgccggggtgcccgccttcctggagacctccgcgccccgcaacctccccttctacgagcggctcggcttcaccgtcaccgccgacgtcgaggtgcccgaaggaccgcgcacctggtgcatgacccgcaagcccggtgcctga

SEQ ID NO: 6690 - DNA, 2586 bp, Artificial Sequence
  Synthetic Polynucloetide
atggccttaccagtgaccgccttgctcctgccgctggccttgctgctccacgccgccaggccgcagctccagctgcaagagtctggacctggcctggtcaagcctagcgagacactgagcctgacctgtaccgtgtccggcgatagcatcagcagcggcgattactactggggctggatcagacagcctcctggcaaaggactggaatggatcggccacatctactacagcggcgtgacctactacaaccccagcctgaagtccagagtgaccatcagcgtggacaccagccggaaccagttctccctgaagctgtctagcgtgacagccgccgataccgccgtgtactactgcaccagagaggacagcagcaactggcggagtagaggccagggaacactggtcacagttagctctctcgaggacctgaagaacgtgttcccacctgaggtggccgtgttcgagcctagcaaggccgagatcgcccacacccagaaagccaccctcgtgtgcctggctaccggcttctaccccgaccatgtggaactgtcttggtgggtcaacggcaaagaggtgcacagcggcgtgtgtaccgacccccagccactgaaagaacagcccgccctgaacgacagccggtactgcctgagcagcagactgagagtgtccgccaccttctggcagaacccccggaaccacttcagatgccaggtgcagttctacggcctgagcgagaacgacgagtggacccaggacagagccaagcccgtgacccagatcgtgtctgccgaagcctggggcagagccgattgcggcatcaccagcgccagctaccaccagggcgtgctgagcgccaccatcctgtacgagatcctgctgggcaaggccaccctgtacgccgtgctggtgtctgccctggtgctgatggctatggtcaagcggaaggacagccggggaagggccaagcgatctggatctggagcaacaaacttctcactactcaaacaagcaggtgacgtggaggagaatcccgggcctactagtatggactggatttggcgcatccttttccttgtcggcgctgctaccggcgcgcattccttccaggtgcagctggttgaatctggcggaggactggttcagcctggcggatctctgagactgtcttgtgccgccagcggcttcaccttcaccaatcacgccatgagctgggtccgacaggcccctggaaaaggactggaactggtgtctagcatcagcggcaacggcagaaccacctactacgccgatagcgtgaagggcagattcaccatcagccgggacatcagcaagaacaccctggacctccagatgaacagcctgagagccgaggataccgccgtgtactactgtgccaaggatggcggagagacactggtggatagcagaggccagggcacactggtcacagtgtcatctacgcgtatccagaaccctgatcctgccgtgtaccagctgcgggatagcaagagcagcgacaagagcgtgtgtctgttcaccgacttcgacagccagaccaacgtgtcccagagcaaggactccgacgtgtacatcaccgataagtgcgtgctggacatgcggagcatggacttcaagagcaactccgccgtggcctggtccaacaagtccgatttcgcctgcgccaacgccttcaacaacagcattatccccgaggacacattcttcccaagcagcgacgtgccctgcgacgtgaagctggtggaaaagagcttcgagacagacaccaacctgaacttccagaacctgagcgtgatcggcttcagaatcctgctgctgaaagtggccggctttaacctgctgatgaccctgcggctgtggtccagccgcgccaagagaagcggatctggcgtgaagcagaccctgaatttcgacctgctgaagctggctggcgacgtggaatccaacccaggcccttctagaggccatatgaccgagtacaagcccacggtgcgcctcgccacccgcgacgacgtccccagggccgtacgcaccctcgccgccgcgttcgccgactaccccgccacgcgccacaccgtcgatccggaccgccacatcgagcgggtcaccgagctgcaagaactcttcctcacgcgcgtcgggctcgacatcggcaaggtgtgggtcgcggacgacggcgccgcggtggcggtctggaccacgccggagagcgtcgaagcgggggcggtgttcgccgagatcggcccgcgcatggccgagttgagcggttcccggctggccgcgcagcaacagatggaaggcctcctggcgccgcaccggcccaaggagcccgcgtggttcctggccaccgtcggcgtctcgcccgaccaccagggcaagggtctgggcagcgccgtcgtgctccccggagtggaggcggccgagcgcgccggggtgcccgccttcctggagacctccgcgccccgcaacctccccttctacgagcggctcggcttcaccgtcaccgccgacgtcgaggtgcccgaaggaccgcgcacctggtgcatgacccgcaagcccggtgcctga

SEQ ID NO: 6691 - DNA, 1884 bp, Artificial Sequence
  Synthetic Polynucloetide
atggccttaccagtgaccgccttgctcctgccgctggccttgctgctccacgccgccaggccgcagctccagctgcaagagtctggacctggcctggtcaagcctagcgagacactgagcctgacctgtaccgtgtccggcgatagcatcagcagcggcgattactactggggctggatcagacagcctcctggcaaaggactggaatggatcggccacatctactacagcggcgtgacctactacaaccccagcctgaagtccagagtgaccatcagcgtggacaccagccggaaccagttctccctgaagctgtctagcgtgacagccgccgataccgccgtgtactactgcaccagagaggacagcagcaactggcggagtagaggccagggaacactggtcacagttagctctctcgaggacctgaagaacgtgttcccacctgaggtggccgtgttcgagcctagcgaggccgagatcagccacacccagaaagccaccctcgtgtgcctggctaccggcttctaccccgaccatgtggaactgtcttggtgggtcaacggcaaagaggtgcacagcggcgtgtgtaccgacccccagccactgaaagaacagcccgccctgaacgacagccggtactgcctgagcagcagactgagagtgtccgccaccttctggcagaacccccggaaccacttcagatgccaggtgcagttctacggcctgagcgagaacgacgagtggacccaggacagagccaagcccgtgacccagatcgtgtctgccgaagcctggggcagagccgattgcggctttaccagcgagagctaccagcagggcgtgctgagcgccaccatcctgtacgagatcctgctgggcaaggccaccctgtacgccgtgctggtgtctgccctggtgctgatggctatggtcaagcggaaggacagccggggaagggccaagcgatctggatctggagcaacaaacttctcactactcaaacaagcaggtgacgtggaggagaatcccgggcctactagtatggactggatttggcgcatccttttccttgtcggcgctgctaccggcgcgcattccttccaggtgcagctggttgaatctggcggaggactggttcagcctggcggatctctgagactgtcttgtgccgccagcggcttcaccttcaccaatcacgccatgagctgggtccgacaggcccctggaaaaggactggaactggtgtctagcatcagcggcaacggcagaaccacctactacgccgatagcgtgaagggcagattcaccatcagccgggacatcagcaagaacaccctggacctccagatgaacagcctgagagccgaggataccgccgtgtactactgtgccaaggatggcggagagacactggtggatagcagaggccagggcacactggtcacagtgtcatctacgcgtatccagaaccctgatcctgccgtgtaccagctgcgggatagcaagagcagcgacaagagcgtgtgtctgttcaccgacttcgacagccagaccaacgtgtcccagagcaaggactccgacgtgtacatcaccgataagtgcgtgctggacatgcggagcatggacttcaagagcaactccgccgtggcctggtccaacaagtccgatttcgcctgcgccaacgccttcaacaacagcattatccccgaggacacattcttcccaagccccgagagcagctgcgacgtgaagctggtggaaaagagcttcgagacagacaccaacctgaacttccagaacctgagcgtgatcggcttcagaatcctgctgctgaaagtggccggctttaacctgctgatgaccctgcggctgtggtccagc

SEQ ID NO: 6692 - DNA, 2559 bp, Artificial Sequence
  Synthetic Polynucloetide
atggccttaccagtgaccgccttgctcctgccgctggccttgctgctccacgccgccaggccgcagctccagctgcaagagtctggacctggcctggtcaagcctagcgagacactgagcctgacctgtaccgtgtccggcgatagcatcagcagcggcgattactactggggctggatcagacagcctcctggcaaaggactggaatggatcggccacatctactacagcggcgtgacctactacaaccccagcctgaagtccagagtgaccatcagcgtggacaccagccggaaccagttctccctgaagctgtctagcgtgacagccgccgataccgccgtgtactactgcaccagagaggacagcagcaactggcggagtagaggccagggaacactggtcacagttagctctctcgaggacctgaagaacgtgttcccacctgaggtggccgtgttcgagcctagcgaggccgagatcagccacacccagaaagccaccctcgtgtgcctggctaccggcttctaccccgaccatgtggaactgtcttggtgggtcaacggcaaagaggtgcacagcggcgtgtgtaccgacccccagccactgaaagaacagcccgccctgaacgacagccggtactgcctgagcagcagactgagagtgtccgccaccttctggcagaacccccggaaccacttcagatgccaggtgcagttctacggcctgagcgagaacgacgagtggacccaggacagagccaagcccgtgacccagatcgtgtctgccgaagcctggggcagagccgattgcggctttaccagcgagagctaccagcagggcgtgctgagcgccaccatcctgtacgagatcctgctgggcaaggccaccctgtacgccgtgctggtgtctgccctggtgctgatggctatggtcaagcggaaggacagccggggaagggccaagcgatctggatctggagcaacaaacttctcactactcaaacaagcaggtgacgtggaggagaatcccgggcctactagtatggactggatttggcgcatccttttccttgtcggcgctgctaccggcgcgcattccttccaggtgcagctggttgaatctggcggaggactggttcagcctggcggatctctgagactgtcttgtgccgccagcggcttcaccttcaccaatcacgccatgagctgggtccgacaggcccctggaaaaggactggaactggtgtctagcatcagcggcaacggcagaaccacctactacgccgatagcgtgaagggcagattcaccatcagccgggacatcagcaagaacaccctggacctccagatgaacagcctgagagccgaggataccgccgtgtactactgtgccaaggatggcggagagacactggtggatagcagaggccagggcacactggtcacagtgtcatctacgcgtatccagaaccctgatcctgccgtgtaccagctgcgggatagcaagagcagcgacaagagcgtgtgtctgttcaccgacttcgacagccagaccaacgtgtcccagagcaaggactccgacgtgtacatcaccgataagtgcgtgctggacatgcggagcatggacttcaagagcaactccgccgtggcctggtccaacaagtccgatttcgcctgcgccaacgccttcaacaacagcattatccccgaggacacattcttcccaagccccgagagcagctgcgacgtgaagctggtggaaaagagcttcgagacagacaccaacctgaacttccagaacctgagcgtgatcggcttcagaatcctgctgctgaaagtggccggctttaacctgctgatgaccctgcggctgtggtccagccgcgccaagagaagcggatctggcgtgaagcagaccctgaatttcgacctgctgaagctggctggcgacgtggaatccaacccaggcccttctagaggcgggatccacaccatggctacctacgaggtgctgtgcgaggtggcaagaaagctgggcaccgacgacagagaagtggtgctgttcctgctgaacgtgttcatccctcagcctacactggcccagctgatcggtgcactgagagccctgaaagaggaaggccggctgacctttcctctgctggccgaatgcctgttcagagccggaagaagggatctgctgcgggacctgctgcatctggaccccagatttctggaaagacacctggccggcaccatgagctacttcagcccttaccagctgaccgtgctgcacgttgacggcgaactgtgcgccagagatattcggagcctgatcttcctgagcaaggacaccatcggcagccggtctacccctcagacatttctgcactgggtgtactgcatggaaaacctggacctgctcggccccacagatgtggatgccctgatgtccatgctgagaagcctgagcagagtggacctccagagacaggtgcagacactgatgggactgcacctgagcggacctagccacagccagcactacagacacacccct

SEQ ID NO: 6693 - DNA, 1896 bp, Artificial Sequence
  Synthetic Polynucloetide
atggccttaccagtgaccgccttgctcctgccgctggccttgctgctccacgccgccaggccgcagctccagctgcaagagtctggacctggcctggtcaagcctagcgagacactgagcctgacctgtaccgtgtccggcgatagcatcagcagcggcgattactactggggctggatcagacagcctcctggcaaaggactggaatggatcggccacatctactacagcggcgtgacctactacaaccccagcctgaagtccagagtgaccatcagcgtggacaccagccggaaccagttctccctgaagctgtctagcgtgacagccgccgataccgccgtgtactactgcaccagagaggacagcagcaactggcggagtagaggccagggaacactggtcacagttagctctctcgagatccagaaccctgatcctgccgtgtaccagctgcgggatagcaagagcagcgacaagagcgtgtgtctgttcaccgacttcgacagccagaccaacgtgtcccagagcaaggactccgacgtgtacatcaccgataagtgcgtgctggacatgcggagcatggacttcaagagcaactccgccgtggcctggtccaacaagtccgatttcgcctgcgccaacgccttcaacaacagcattatccccgaggacacattcttcccaagccccgagagcagctgcgacgtgaagctggtggaaaagagcttcgagacagacaccaacctgaacttccagaacctgagcgtgatcggcttcagaatcctgctgctgaaagtggccggctttaacctgctgatgaccctgcggctgtggtccagccgcgccaagagaagcggatctggcgtgaagcagaccctgaatttcgacctgctgaagctggctggcgacgtggaatccaacccaggccctactagtatggactggatttggcgcatccttttccttgtcggcgctgctaccggcgcgcattccttccaggtgcagctggttgaatctggcggaggactggttcagcctggcggatctctgagactgtcttgtgccgccagcggcttcaccttcaccaatcacgccatgagctgggtccgacaggcccctggaaaaggactggaactggtgtctagcatcagcggcaacggcagaaccacctactacgccgatagcgtgaagggcagattcaccatcagccgggacatcagcaagaacaccctggacctccagatgaacagcctgagagccgaggataccgccgtgtactactgtgccaaggatggcggagagacactggtggatagcagaggccagggcacactggtcacagtgtcatctacgcgtgaggacctgaagaacgtgttcccacctgaggtggccgtgttcgagcctagcgaggccgagatcagccacacccagaaagccaccctcgtgtgcctggctaccggcttctaccccgaccatgtggaactgtcttggtgggtcaacggcaaagaggtgcacagcggcgtgtgtaccgacccccagccactgaaagaacagcccgccctgaacgacagccggtactgcctgagcagcagactgagagtgtccgccaccttctggcagaacccccggaaccacttcagatgccaggtgcagttctacggcctgagcgagaacgacgagtggacccaggacagagccaagcccgtgacccagatcgtgtctgccgaagcctggggcagagccgattgcggctttaccagcgagagctaccagcagggcgtgctgagcgccaccatcctgtacgagatcctgctgggcaaggccaccctgtacgccgtgctggtgtctgccctggtgctgatggctatggtcaagcggaaggacagccgggga

SEQ ID NO: 6694 - DNA, 2562 bp, Artificial Sequence
  Synthetic Polynucloetide
atggccttaccagtgaccgccttgctcctgccgctggccttgctgctccacgccgccaggccgcagctccagctgcaagagtctggacctggcctggtcaagcctagcgagacactgagcctgacctgtaccgtgtccggcgatagcatcagcagcggcgattactactggggctggatcagacagcctcctggcaaaggactggaatggatcggccacatctactacagcggcgtgacctactacaaccccagcctgaagtccagagtgaccatcagcgtggacaccagccggaaccagttctccctgaagctgtctagcgtgacagccgccgataccgccgtgtactactgcaccagagaggacagcagcaactggcggagtagaggccagggaacactggtcacagttagctctctcgagatccagaaccctgatcctgccgtgtaccagctgcgggatagcaagagcagcgacaagagcgtgtgtctgttcaccgacttcgacagccagaccaacgtgtcccagagcaaggactccgacgtgtacatcaccgataagtgcgtgctggacatgcggagcatggacttcaagagcaactccgccgtggcctggtccaacaagtccgatttcgcctgcgccaacgccttcaacaacagcattatccccgaggacacattcttcccaagccccgagagcagctgcgacgtgaagctggtggaaaagagcttcgagacagacaccaacctgaacttccagaacctgagcgtgatcggcttcagaatcctgctgctgaaagtggccggctttaacctgctgatgaccctgcggctgtggtccagccgcgccaagagaagcggatctggcgtgaagcagaccctgaatttcgacctgctgaagctggctggcgacgtggaatccaacccaggccctactagtatggactggatttggcgcatccttttccttgtcggcgctgctaccggcgcgcattccttccaggtgcagctggttgaatctggcggaggactggttcagcctggcggatctctgagactgtcttgtgccgccagcggcttcaccttcaccaatcacgccatgagctgggtccgacaggcccctggaaaaggactggaactggtgtctagcatcagcggcaacggcagaaccacctactacgccgatagcgtgaagggcagattcaccatcagccgggacatcagcaagaacaccctggacctccagatgaacagcctgagagccgaggataccgccgtgtactactgtgccaaggatggcggagagacactggtggatagcagaggccagggcacactggtcacagtgtcatctacgcgtgaggacctgaagaacgtgttcccacctgaggtggccgtgttcgagcctagcgaggccgagatcagccacacccagaaagccaccctcgtgtgcctggctaccggcttctaccccgaccatgtggaactgtcttggtgggtcaacggcaaagaggtgcacagcggcgtgtgtaccgacccccagccactgaaagaacagcccgccctgaacgacagccggtactgcctgagcagcagactgagagtgtccgccaccttctggcagaacccccggaaccacttcagatgccaggtgcagttctacggcctgagcgagaacgacgagtggacccaggacagagccaagcccgtgacccagatcgtgtctgccgaagcctggggcagagccgattgcggctttaccagcgagagctaccagcagggcgtgctgagcgccaccatcctgtacgagatcctgctgggcaaggccaccctgtacgccgtgctggtgtctgccctggtgctgatggctatggtcaagcggaaggacagccggggaagggccaagcgatctggatctggagcaacaaacttctcactactcaaacaagcaggtgacgtggaggagaatcccgggccttctagaggcgggatccacaccatggctacctacgaggtgctgtgcgaggtggcaagaaagctgggcaccgacgacagagaagtggtgctgttcctgctgaacgtgttcatccctcagcctacactggcccagctgatcggtgcactgagagccctgaaagaggaaggccggctgacctttcctctgctggccgaatgcctgttcagagccggaagaagggatctgctgcgggacctgctgcatctggaccccagatttctggaaagacacctggccggcaccatgagctacttcagcccttaccagctgaccgtgctgcacgttgacggcgaactgtgcgccagagatattcggagcctgatcttcctgagcaaggacaccatcggcagccggtctacccctcagacatttctgcactgggtgtactgcatggaaaacctggacctgctcggccccacagatgtggatgccctgatgtccatgctgagaagcctgagcagagtggacctccagagacaggtgcagacactgatgggactgcacctgagcggacctagccacagccagcactacagacacacccct

SEQ ID NO: 6695 - DNA, 2706 bp, Artificial Sequence
  Synthetic Polynucloetide
atggccttaccagtgaccgccttgctcctgccgctggccttgctgctccacgccgccaggccgctcgaggggaaaccaattcccaaccctcttctgggactggattcaaccggcagcggcgaggacctgaagaacgtgttcccacctgaggtggccgtgttcgagcctagcaaggccgagatcgcccacacccagaaagccaccctcgtgtgcctggctaccggcttctaccccgaccatgtggaactgtcttggtgggtcaacggcaaagaggtgcacagcggcgtgtgtaccgacccccagccactgaaagaacagcccgccctgaacgacagccggtactgcctgagcagcagactgagagtgtccgccaccttctggcagaacccccggaaccacttcagatgccaggtgcagttctacggcctgagcgagaacgacgagtggacccaggacagagccaagcccgtgacccagatcgtgtctgccgaagcctggggcagagccgattgcggcatcaccagcgccagctaccaccagggcgtgctgagcgccaccatcctgtacgagatcctgctgggcaaggccaccctgtacgccgtgctggtgtctgccctggtgctgatggctatggtcaagcggaaggacagccggggaagggccaagcgatctggatctggagcaacaaacttctcactactcaaacaagcaggtgacgtggaggagaatcccgggcctactagcatggccttaccagtgaccgccttgctcctgccgctggccttgctgctccacgccgccaggccgcagctccagctgcaagagtctggacctggcctggtcaagcctagcgagacactgagcctgacctgtaccgtgtccggcgatagcatcagcagcggcgattactactggggctggatcagacagcctcctggcaaaggactggaatggatcggccacatctactacagcggcgtgacctactacaaccccagcctgaagtccagagtgaccatcagcgtggacaccagccggaaccagttctccctgaagctgtctagcgtgacagccgccgataccgccgtgtactactgcaccagagaggacagcagcaactggcggagtagaggccagggaacactggtcacagttagctctctcgagagcggcggaggcggatctttccaggtgcagctggttgaatctggcggaggactggttcagcctggcggatctctgagactgtcttgtgccgccagcggcttcaccttcaccaatcacgccatgagctgggtccgacaggcccctggaaaaggactggaactggtgtctagcatcagcggcaacggcagaaccacctactacgccgatagcgtgaagggcagattcaccatcagccgggacatcagcaagaacaccctggacctccagatgaacagcctgagagccgaggataccgccgtgtactactgtgccaaggatggcggagagacactggtggatagcagaggccagggcacactggtcacagtgtcatctacgcgtgagcagaaactgatctcggaagaggatgggagcggcatccagaaccctgatcctgccgtgtaccagctgcgggatagcaagagcagcgacaagagcgtgtgtctgttcaccgacttcgacagccagaccaacgtgtcccagagcaaggactccgacgtgtacatcaccgataagtgcgtgctggacatgcggagcatggacttcaagagcaactccgccgtggcctggtccaacaagtccgatttcgcctgcgccaacgccttcaacaacagcattatccccgaggacacattcttcccaagcagcgacgtgccctgcgacgtgaagctggtggaaaagagcttcgagacagacaccaacctgaacttccagaacctgagcgtgatcggcttcagaatcctgctgctgaaagtggccggctttaacctgctgatgaccctgcggctgtggtccagccgcgccaagagaagcggatctggcgtgaagcagaccctgaatttcgacctgctgaagctggctggcgacgtggaatccaacccaggcccttctagaggccatatgaccgagtacaagcccacggtgcgcctcgccacccgcgacgacgtccccagggccgtacgcaccctcgccgccgcgttcgccgactaccccgccacgcgccacaccgtcgatccggaccgccacatcgagcgggtcaccgagctgcaagaactcttcctcacgcgcgtcgggctcgacatcggcaaggtgtgggtcgcggacgacggcgccgcggtggcggtctggaccacgccggagagcgtcgaagcgggggcggtgttcgccgagatcggcccgcgcatggccgagttgagcggttcccggctggccgcgcagcaacagatggaaggcctcctggcgccgcaccggcccaaggagcccgcgtggttcctggccaccgtcggcgtctcgcccgaccaccagggcaagggtctgggcagcgccgtcgtgctccccggagtggaggcggccgagcgcgccggggtgcccgccttcctggagacctccgcgccccgcaacctccccttctacgagcggctcggcttcaccgtcaccgccgacgtcgaggtgcccgaaggaccgcgcacctggtgcatgacccgcaagcccggtgcctga

SEQ ID NO: 6696 - DNA, 2709 bp, Artificial Sequence
  Synthetic Polynucloetide
atggccttaccagtgaccgccttgctcctgccgctggccttgctgctccacgccgccaggccgctcgagcagaaactgatctcggaagaggatctgggctccggcgatcgccctgatcctgccgtgtaccagctgcgggatagcaagagcagcgacaagagcgtgtgtctgttcaccgacttcgacagccagaccaacgtgtcccagagcaaggactccgacgtgtacatcaccgataagtgcgtgctggacatgcggagcatggacttcaagagcaactccgccgtggcctggtccaacaagtccgatttcgcctgcgccaacgccttcaacaacagcattatccccgaggacacattcttcccaagccccgagagcagctgcgacgtgaagctggtggaaaagagcttcgagacagacaccaacctgaacttccagaacctgagcgtgatcggcttcagaatcctgctgctgaaagtggccggctttaacctgctgatgaccctgcggctgtggtccagctctagtcgcgccaagagaagcggatctggcgtgaagcagaccctgaatttcgacctgctgaagctggctggcgacgtggaatccaacccaggccccactagcatggccttaccagtgaccgccttgctcctgccgctggccttgctgctccacgccgccaggccgcagctccagctgcaagagtctggacctggcctggtcaagcctagcgagacactgagcctgacctgtaccgtgtccggcgatagcatcagcagcggcgattactactggggctggatcagacagcctcctggcaaaggactggaatggatcggccacatctactacagcggcgtgacctactacaaccccagcctgaagtccagagtgaccatcagcgtggacaccagccggaaccagttctccctgaagctgtctagcgtgacagccgccgataccgccgtgtactactgcaccagagaggacagcagcaactggcggagtagaggccagggaacactggtcacagttagctctctcgagagcggcggaggcggatctttccaggtgcagctggttgaatctggcggaggactggttcagcctggcggatctctgagactgtcttgtgccgccagcggcttcaccttcaccaatcacgccatgagctgggtccgacaggcccctggaaaaggactggaactggtgtctagcatcagcggcaacggcagaaccacctactacgccgatagcgtgaagggcagattcaccatcagccgggacatcagcaagaacaccctggacctccagatgaacagcctgagagccgaggataccgccgtgtactactgtgccaaggatggcggagagacactggtggatagcagaggccagggcacactggtcacagtgtcatctacgcgtgggaaaccaattcccaaccctcttctgggactggattcaaccggcagcggcgaggacctgaagaacgtgttcccacctgaggtggccgtgttcgagcctagcgaggccgagatcagccacacccagaaagccaccctcgtgtgcctggctaccggcttctaccccgaccatgtggaactgtcttggtgggtcaacggcaaagaggtgcacagcggcgtgtgtaccgacccccagccactgaaagaacagcccgccctgaacgacagccggtactgcctgagcagcagactgagagtgtccgccaccttctggcagaacccccggaaccacttcagatgccaggtgcagttctacggcctgagcgagaacgacgagtggacccaggacagagccaagcccgtgacccagatcgtgtctgccgaagcctggggcagagccgattgcggctttaccagcgagagctaccagcagggcgtgctgagcgccaccatcctgtacgagatcctgctgggcaaggccaccctgtacgccgtgctggtgtctgccctggtgctgatggctatggtcaagcggaaggacagccggggaagggccaagcgatctggatctggagcaacaaacttctcactactcaaacaagcaggtgacgtggaggagaatcccgggccttctagaggccatatgaccgagtacaagcccacggtgcgcctcgccacccgcgacgacgtccccagggccgtacgcaccctcgccgccgcgttcgccgactaccccgccacgcgccacaccgtcgatccggaccgccacatcgagcgggtcaccgagctgcaagaactcttcctcacgcgcgtcgggctcgacatcggcaaggtgtgggtcgcggacgacggcgccgcggtggcggtctggaccacgccggagagcgtcgaagcgggggcggtgttcgccgagatcggcccgcgcatggccgagttgagcggttcccggctggccgcgcagcaacagatggaaggcctcctggcgccgcaccggcccaaggagcccgcgtggttcctggccaccgtcggcgtctcgcccgaccaccagggcaagggtctgggcagcgccgtcgtgctccccggagtggaggcggccgagcgcgccggggtgcccgccttcctggagacctccgcgccccgcaacctccccttctacgagcggctcggcttcaccgtcaccgccgacgtcgaggtgcccgaaggaccgcgcacctggtgcatgacccgcaagcccggtgcctga

SEQ ID NO: 6697 - DNA, 2586 bp, Artificial Sequence
  Synthetic Polynucloetide
atggccttaccagtgaccgccttgctcctgccgctggccttgctgctccacgccgccaggccgcagctccagctgcaagagtctggacctggcctggtcaagcctagcgagacactgagcctgacctgtaccgtgtccggcgatagcatcagcagcggcgattactactggggctggatcagacagcctcctggcaaaggactggaatggatcggccacatctactacagcggcgtgacctactacaaccccagcctgaagtccagagtgaccatcagcgtggacaccagccggaaccagttctccctgaagctgtctagcgtgacagccgccgataccgccgtgtactactgcaccagagaggacagcagcaactggcggagtagaggccagggaacactggtcacagttagctctctcgaggacctgaagaacgtgttcccacctgaggtggccgtgttcgagcctagcgaggccgagatcagccacacccagaaagccaccctcgtgtgcctggctaccggcttctaccccgaccatgtggaactgtcttggtgggtcaacggcaaagaggtgcacagcggcgtgtctaccgacccccagccactgaaagaacagcccgccctgaacgacagccggtactgcctgagcagcagactgagagtgtccgccaccttctggcagaacccccggaaccacttcagatgccaggtgcagttctacggcctgagcgagaacgacgagtggacccaggacagagccaagcccgtgacccagatcgtgtctgccgaagcctggggcagagccgattgcggctttaccagcgagagctaccagcagggcgtgctgagcgccaccatcctgtacgagatcctgctgggcaaggccaccctgtacgccgtgctggtgtctgccctggtgctgatggctatggtcaagcggaaggacagccggggaagggccaagcgatctggatctggagcaacaaacttctcactactcaaacaagcaggtgacgtggaggagaatcccgggcctactagtatggactggatttggcgcatccttttccttgtcggcgctgctaccggcgcgcattccttccaggtgcagctggttgaatctggcggaggactggttcagcctggcggatctctgagactgtcttgtgccgccagcggcttcaccttcaccaatcacgccatgagctgggtccgacaggcccctggaaaaggactggaactggtgtctagcatcagcggcaacggcagaaccacctactacgccgatagcgtgaagggcagattcaccatcagccgggacatcagcaagaacaccctggacctccagatgaacagcctgagagccgaggataccgccgtgtactactgtgccaaggatggcggagagacactggtggatagcagaggccagggcacactggtcacagtgtcatctacgcgtatccagaaccctgatcctgccgtgtaccagctgcgggatagcaagagcagcgacaagagcgtgtgtctgttcaccgacttcgacagccagaccaacgtgtcccagagcaaggactccgacgtgtacatcaccgataagaccgtgctggacatgcggagcatggacttcaagagcaactccgccgtggcctggtccaacaagtccgatttcgcctgcgccaacgccttcaacaacagcattatccccgaggacacattcttcccaagccccgagagcagctgcgacgtgaagctggtggaaaagagcttcgagacagacaccaacctgaacttccagaacctgagcgtgatcggcttcagaatcctgctgctgaaagtggccggctttaacctgctgatgaccctgcggctgtggtccagccgcgccaagagaagcggatctggcgtgaagcagaccctgaatttcgacctgctgaagctggctggcgacgtggaatccaacccaggcccttctagaggccatatgaccgagtacaagcccacggtgcgcctcgccacccgcgacgacgtccccagggccgtacgcaccctcgccgccgcgttcgccgactaccccgccacgcgccacaccgtcgatccggaccgccacatcgagcgggtcaccgagctgcaagaactcttcctcacgcgcgtcgggctcgacatcggcaaggtgtgggtcgcggacgacggcgccgcggtggcggtctggaccacgccggagagcgtcgaagcgggggcggtgttcgccgagatcggcccgcgcatggccgagttgagcggttcccggctggccgcgcagcaacagatggaaggcctcctggcgccgcaccggcccaaggagcccgcgtggttcctggccaccgtcggcgtctcgcccgaccaccagggcaagggtctgggcagcgccgtcgtgctccccggagtggaggcggccgagcgcgccggggtgcccgccttcctggagacctccgcgccccgcaacctccccttctacgagcggctcggcttcaccgtcaccgccgacgtcgaggtgcccgaaggaccgcgcacctggtgcatgacccgcaagcccggtgcctga

SEQ ID NO: 6698 - DNA, 2832 bp, Artificial Sequence
  Synthetic Polynucloetide
atggccttaccagtgaccgccttgctcctgccgctggccttgctgctccacgccgccaggccgcagctccagctgcaagagtctggacctggcctggtcaagcctagcgagacactgagcctgacctgtaccgtgtccggcgatagcatcagcagcggcgattactactggggctggatcagacagcctcctggcaaaggactggaatggatcggccacatctactacagcggcgtgacctactacaaccccagcctgaagtccagagtgaccatcagcgtggacaccagccggaaccagttctccctgaagctgtctagcgtgacagccgccgataccgccgtgtactactgcaccagagaggacagcagcaactggcggagtagaggccagggaacactggtcacagttagctctctcgaggacctgaagaacgtgttcccacctgaggtggccgtgttcgagcctagcgaggccgagatcagccacacccagaaagccaccctcgtgtgcctggctaccggcttctaccccgaccatgtggaactgtcttggtgggtcaacggcaaagaggtgcacagcggcgtgtctaccgacccccagccactgaaagaacagcccgccctgaacgacagccggtactgcctgagcagcagactgagagtgtccgccaccttctggcagaacccccggaaccacttcagatgccaggtgcagttctacggcctgagcgagaacgacgagtggacccaggacagagccaagcccgtgacccagatcgtgtctgccgaagcctggggcagagccgattgcggctttaccagcgagagctaccagcagggcgtgctgagcgccaccatcctgtacgagatcctgctgggcaaggccaccctgtacgccgtgctggtgtctgccctggtgctgatggctatggtcaagcggaaggacagccggggaagggccaagcgatctggatctggagcaacaaacttctcactactcaaacaagcaggtgacgtggaggagaatcccgggcctactagtatggactggatttggcgcatccttttccttgtcggcgctgctaccggcgcgcattccttccaggtgcagctggttgaatctggcggaggactggttcagcctggcggatctctgagactgtcttgtgccgccagcggcttcaccttcaccaatcacgccatgagctgggtccgacaggcccctggaaaaggactggaactggtgtctagcatcagcggcaacggcagaaccacctactacgccgatagcgtgaagggcagattcaccatcagccgggacatcagcaagaacaccctggacctccagatgaacagcctgagagccgaggataccgccgtgtactactgtgccaaggatggcggagagacactggtggatagcagaggccagggcacactggtcacagtgtcatctacgcgtgagcagaaactgatctcggaagaggatgggagcggcaccccattcccttctctggcccctcccatcatgctgctggtggacggcaagcagcagatggtggtcgtgtgcctggtgctggatgtggccccacctggactggacagccccatctggtttagcgccggcaatggctctgccctggacgcctttacctacggcccaagccctgccaccgatggcacctggacaaatctggcccacctgagcctgcccagcgaggaactggcttcttgggagcctctcgtgtgccacacaggacctggcgctgagggacacagcagatccacccagcctatgcacctgtctggcgaggccagcaccgccagaacctgtcctcaggaacctctgagaggcacccctggcggagcactgtggctgggagtgctgagactgctgctgttcaagctgctgctgtttgacctgctgctgacctgctcctgtctgtgcgatcctgccggccctctgccttctcctgccaccaccacaagactgagagccctgggcagccacagactgcaccctgccacagagacaggcggcagagaggccacaagcagccctagaccccagcccagagacagaagatggggcgataccccccctggcagaaagcctggatctccagtccgcgccaagagaagcggatctggcgtgaagcagaccctgaatttcgacctgctgaagctggctggcgacgtggaatccaacccaggcccttctagaggccatatgaccgagtacaagcccacggtgcgcctcgccacccgcgacgacgtccccagggccgtacgcaccctcgccgccgcgttcgccgactaccccgccacgcgccacaccgtcgatccggaccgccacatcgagcgggtcaccgagctgcaagaactcttcctcacgcgcgtcgggctcgacatcggcaaggtgtgggtcgcggacgacggcgccgcggtggcggtctggaccacgccggagagcgtcgaagcgggggcggtgttcgccgagatcggcccgcgcatggccgagttgagcggttcccggctggccgcgcagcaacagatggaaggcctcctggcgccgcaccggcccaaggagcccgcgtggttcctggccaccgtcggcgtctcgcccgaccaccagggcaagggtctgggcagcgccgtcgtgctccccggagtggaggcggccgagcgcgccggggtgcccgccttcctggagacctccgcgccccgcaacctccccttctacgagcggctcggcttcaccgtcaccgccgacgtcgaggtgcccgaaggaccgcgcacctggtgcatgacccgcaagcccggtgcctga

SEQ ID NO: 6699 - DNA, 2871 bp, Artificial Sequence
  Synthetic Polynucloetide
atggccttaccagtgaccgccttgctcctgccgctggccttgctgctccacgccgccaggccgctcgaggacctgaagaacgtgttcccacctgaggtggccgtgttcgagcctagcgaggccgagatcagccacacccagaaagccaccctcgtgtgcctggctaccggcttctaccccgaccatgtggaactgtcttggtgggtcaacggcaaagaggtgcacagcggcgtgtctaccgacccccagccactgaaagaacagcccgccctgaacgacagccggtactgcctgagcagcagactgagagtgtccgccaccttctggcagaacccccggaaccacttcagatgccaggtgcagttctacggcctgagcgagaacgacgagtggacccaggacagagccaagcccgtgacccagatcgtgtctgccgaagcctggggcagagccgattgcggctttaccagcgagagctaccagcagggcgtgctgagcgccaccatcctgtacgagatcctgctgggcaaggccaccctgtacgccgtgctggtgtctgccctggtgctgatggctatggtcaagcggaaggacagccggggaagggccaagcgatctggatctggagcaacaaacttctcactactcaaacaagcaggtgacgtggaggagaatcccgggcctactagcatggccttaccagtgaccgccttgctcctgccgctggccttgctgctccacgccgccaggccgcagctccagctgcaagagtctggacctggcctggtcaagcctagcgagacactgagcctgacctgtaccgtgtccggcgatagcatcagcagcggcgattactactggggctggatcagacagcctcctggcaaaggactggaatggatcggccacatctactacagcggcgtgacctactacaaccccagcctgaagtccagagtgaccatcagcgtggacaccagccggaaccagttctccctgaagctgtctagcgtgacagccgccgataccgccgtgtactactgcaccagagaggacagcagcaactggcggagtagaggccagggaacactggtcacagttagctctctcgagagcggcggaggcggatctttccaggtgcagctggttgaatctggcggaggactggttcagcctggcggatctctgagactgtcttgtgccgccagcggcttcaccttcaccaatcacgccatgagctgggtccgacaggcccctggaaaaggactggaactggtgtctagcatcagcggcaacggcagaaccacctactacgccgatagcgtgaagggcagattcaccatcagccgggacatcagcaagaacaccctggacctccagatgaacagcctgagagccgaggataccgccgtgtactactgtgccaaggatggcggagagacactggtggatagcagaggccagggcacactggtcacagtgtcatctacgcgtgagcagaaactgatctcggaagaggatctggggagcggcaccccattcccttctctggcccctcccatcatgctgctggtggacggcaagcagcagatggtggtcgtgtgcctggtgctggatgtggccccacctggactggacagccccatctggtttagcgccggcaatggctctgccctggacgcctttacctacggcccaagccctgccaccgatggcacctggacaaatctggcccacctgagcctgcccagcgaggaactggcttcttgggagcctctcgtgtgccacacaggacctggcgctgagggacacagcagatccacccagcctatgcacctgtctggcgaggccagcaccgccagaacctgtcctcaggaacctctgagaggcacccctggcggagcactgtggctgggagtgctgagactgctgctgttcaagctgctgctgtttgacctgctgctgacctgctcctgtctgtgcgatcctgccggccctctgccttctcctgccaccaccacaagactgagagccctgggcagccacagactgcaccctgccacagagacaggcggcagagaggccacaagcagccctagaccccagcccagagacagaagatggggcgataccccccctggcagaaagcctggatctccagtccgcgccaagagaagcggatctggcgtgaagcagaccctgaatttcgacctgctgaagctggctggcgacgtggaatccaacccaggcccttctagatctagaggccatatgaccgagtacaagcccacggtgcgcctcgccacccgcgacgacgtccccagggccgtacgcaccctcgccgccgcgttcgccgactaccccgccacgcgccacaccgtcgatccggaccgccacatcgagcgggtcaccgagctgcaagaactcttcctcacgcgcgtcgggctcgacatcggcaaggtgtgggtcgcggacgacggcgccgcggtggcggtctggaccacgccggagagcgtcgaagcgggggcggtgttcgccgagatcggcccgcgcatggccgagttgagcggttcccggctggccgcgcagcaacagatggaaggcctcctggcgccgcaccggcccaaggagcccgcgtggttcctggccaccgtcggcgtctcgcccgaccaccagggcaagggtctgggcagcgccgtcgtgctccccggagtggaggcggccgagcgcgccggggtgcccgccttcctggagacctccgcgccccgcaacctccccttctacgagcggctcggcttcaccgtcaccgccgacgtcgaggtgcccgaaggaccgcgcacctggtgcatgacccgcaagcccggtgcctga

SEQ ID NO: 6700 - DNA, 2697 bp, Artificial Sequence
  Synthetic Polynucloetide
atggccttaccagtgaccgccttgctcctgccgctggccttgctgctccacgccgccaggccgcagctccagctgcaagagtctggacctggcctggtcaagcctagcgagacactgagcctgacctgtaccgtgtccggcgatagcatcagcagcggcgattactactggggctggatcagacagcctcctggcaaaggactggaatggatcggccacatctactacagcggcgtgacctactacaaccccagcctgaagtccagagtgaccatcagcgtggacaccagccggaaccagttctccctgaagctgtctagcgtgacagccgccgataccgccgtgtactactgcaccagagaggacagcagcaactggcggagtagaggccagggaacactggtcacagttagctctctcgaggggaaaccaattcccaaccctcttctgggactggattcaaccggcagcggcgacaagcagctggacgccgacgtgtcccccaagcctaccatcttcctgccctctatcgccgagacaaagctccagaaggccggcacctacctgtgcctgctggaaaagttcttcccagatgtgattaagatccactggcaggaaaagaagtccaacaccatcctgggcagccaggaaggcaacaccatgaagaccaacgacacctacatgaagttcagctggctgaccgtgcccgagaagtccctggacaaagaacacagatgcatcgtgcggcacgaaaacaacaagaacggcgtggaccaggaaatcatcttcccacccatcaagaccgatgtgattacaatggaccccaaggacaactgctccaaggacgccaacgataccctgctgctccagctgaccaacaccagcgcctactacatgtacttgttgctgctgctgaagtccgtggtgtacttcgccatcatcacatgctgcctgctgcggagaaccgccttctgctgcaacggcgagaagtctagggccaagcgatctggatctggagcaacaaacttctcactactcaaacaagcaggtgacgtggaggagaatcccgggcctactagtatggactggatttggcgcatccttttccttgtcggcgctgctaccggcgcgcattccttccaggtgcagctggttgaatctggcggaggactggttcagcctggcggatctctgagactgtcttgtgccgccagcggcttcaccttcaccaatcacgccatgagctgggtccgacaggcccctggaaaaggactggaactggtgtctagcatcagcggcaacggcagaaccacctactacgccgatagcgtgaagggcagattcaccatcagccgggacatcagcaagaacaccctggacctccagatgaacagcctgagagccgaggataccgccgtgtactactgtgccaaggatggcggagagacactggtggatagcagaggccagggcacactggtcacagtgtcatctacgcgtgagcagaaactgatctcggaagaggatgggagcggcagccagcctcacaccaagcccagcgtgttcgtgatgaagaacggcaccaacgtggcctgcctcgtgaaagagttctaccccaaggacatcaggatcaacctggtgtccagcaagaagatcaccgagttcgaccccgccatcgtgatctcccccagcggcaagtacaacgccgtgaagctggggaagtacgaggacagcaacagcgtgacctgctccgtgcagcacgacaacaagaccgtgcacagcaccgactttgaagtgaaaaccgactccaccgaccacgtgaagcccaaagagacagagaacaccaagcagcccagcaagagctgccacaagcccaaggccatcgtgcacaccgagaaagtgaacatgatgagcctgaccgtgctgggcctgcggatgctgttcgccaaaaccgtggccgtgaacttcctgctgaccgccaagctgttcttcctccgcgccaagagaagcggatctggcgtgaagcagaccctgaatttcgacctgctgaagctggctggcgacgtggaatccaacccaggcccttctagaggccatatgaccgagtacaagcccacggtgcgcctcgccacccgcgacgacgtccccagggccgtacgcaccctcgccgccgcgttcgccgactaccccgccacgcgccacaccgtcgatccggaccgccacatcgagcgggtcaccgagctgcaagaactcttcctcacgcgcgtcgggctcgacatcggcaaggtgtgggtcgcggacgacggcgccgcggtggcggtctggaccacgccggagagcgtcgaagcgggggcggtgttcgccgagatcggcccgcgcatggccgagttgagcggttcccggctggccgcgcagcaacagatggaaggcctcctggcgccgcaccggcccaaggagcccgcgtggttcctggccaccgtcggcgtctcgcccgaccaccagggcaagggtctgggcagcgccgtcgtgctccccggagtggaggcggccgagcgcgccggggtgcccgccttcctggagacctccgcgccccgcaacctccccttctacgagcggctcggcttcaccgtcaccgccgacgtcgaggtgcccgaaggaccgcgcacctggtgcatgacccgcaagcccggtgcctga

SEQ ID NO: 6701 - DNA, 1908 bp, Artificial Sequence
  Synthetic Polynucloetide
atggccttaccagtgaccgccttgctcctgccgctggccttgctgctccacgccgccaggccgcagctccagctgcaagagtctggacctggcctggtcaagcctagcgagacactgagcctgacctgtaccgtgtccggcgatagcatcagcagcggcgattactactggggctggatcagacagcctcctggcaaaggactggaatggatcggccacatctactacagcggcgtgacctactacaaccccagcctgaagtccagagtgaccatcagcgtggacaccagccggaaccagttctccctgaagctgtctagcgtgacagccgccgataccgccgtgtactactgcaccagagaggacagcagcaactggcggagtagaggccagggaacactggtcacagttagctctctcgagagccagcctcacaccaagcccagcgtgttcgtgatgaagaacggcaccaacgtggcctgcctcgtgaaagagttctaccccaaggacatcaggatcaacctggtgtccagcaagaagatcaccgagttcgaccccgccatcgtgatctcccccagcggcaagtacaacgccgtgaagctggggaagtacgaggacagcaacagcgtgacctgctccgtgcagcacgacaacaagaccgtgcacagcaccgactttgaagtgaaaaccgactccaccgaccacgtgaagcccaaagagacagagaacaccaagcagcccagcaagagctgccacaagcccaaggccatcgtgcacaccgagaaagtgaacatgatgagcctgaccgtgctgggcctgcggatgctgttcgccaaaaccgtggccgtgaacttcctgctgaccgccaagctgttcttcctcagggccaagcgatctggatctggagcaacaaacttctcactactcaaacaagcaggtgacgtggaggagaatcccgggcctactagtatggactggatttggcgcatccttttccttgtcggcgctgctaccggcgcgcattccttccaggtgcagctggttgaatctggcggaggactggttcagcctggcggatctctgagactgtcttgtgccgccagcggcttcaccttcaccaatcacgccatgagctgggtccgacaggcccctggaaaaggactggaactggtgtctagcatcagcggcaacggcagaaccacctactacgccgatagcgtgaagggcagattcaccatcagccgggacatcagcaagaacaccctggacctccagatgaacagcctgagagccgaggataccgccgtgtactactgtgccaaggatggcggagagacactggtggatagcagaggccagggcacactggtcacagtgtcatctacgcgtgacaagcagctggacgccgacgtgtcccccaagcctaccatcttcctgccctctatcgccgagacaaagctccagaaggccggcacctacctgtgcctgctggaaaagttcttcccagatgtgattaagatccactggcaggaaaagaagtccaacaccatcctgggcagccaggaaggcaacaccatgaagaccaacgacacctacatgaagttcagctggctgaccgtgcccgagaagtccctggacaaagaacacagatgcatcgtgcggcacgaaaacaacaagaacggcgtggaccaggaaatcatcttcccacccatcaagaccgatgtgattacaatggaccccaaggacaactgctccaaggacgccaacgataccctgctgctccagctgaccaacaccagcgcctactacatgtacttgttgctgctgctgaagtccgtggtgtacttcgccatcatcacatgctgcctgctgcggagaaccgccttctgctgcaacggcgagaagtct

SEQ ID NO: 6702 - DNA, 2727 bp, Artificial Sequence
  Synthetic Polynucloetide
atggccttaccagtgaccgccttgctcctgccgctggccttgctgctccacgccgccaggccgctcgaggggaaaccaattcccaaccctcttctgggactggattcaaccggcagcggcgacaagcagctggacgccgacgtgtcccccaagcctaccatcttcctgccctctatcgccgagacaaagctccagaaggccggcacctacctgtgcctgctggaaaagttcttcccagatgtgattaagatccactggcaggaaaagaagtccaacaccatcctgggcagccaggaaggcaacaccatgaagaccaacgacacctacatgaagttcagctggctgaccgtgcccgagaagtccctggacaaagaacacagatgcatcgtgcggcacgaaaacaacaagaacggcgtggaccaggaaatcatcttcccacccatcaagaccgatgtgattacaatggaccccaaggacaactgctccaaggacgccaacgataccctgctgctccagctgaccaacaccagcgcctactacatgtacttgttgctgctgctgaagtccgtggtgtacttcgccatcatcacatgctgcctgctgcggagaaccgccttctgctgcaacggcgagaagtctagggccaagcgatctggatctggagcaacaaacttctcactactcaaacaagcaggtgacgtggaggagaatcccgggcctactagcatggccttaccagtgaccgccttgctcctgccgctggccttgctgctccacgccgccaggccgcagctccagctgcaagagtctggacctggcctggtcaagcctagcgagacactgagcctgacctgtaccgtgtccggcgatagcatcagcagcggcgattactactggggctggatcagacagcctcctggcaaaggactggaatggatcggccacatctactacagcggcgtgacctactacaaccccagcctgaagtccagagtgaccatcagcgtggacaccagccggaaccagttctccctgaagctgtctagcgtgacagccgccgataccgccgtgtactactgcaccagagaggacagcagcaactggcggagtagaggccagggaacactggtcacagttagctctctcgagagcggcggaggcggatctttccaggtgcagctggttgaatctggcggaggactggttcagcctggcggatctctgagactgtcttgtgccgccagcggcttcaccttcaccaatcacgccatgagctgggtccgacaggcccctggaaaaggactggaactggtgtctagcatcagcggcaacggcagaaccacctactacgccgatagcgtgaagggcagattcaccatcagccgggacatcagcaagaacaccctggacctccagatgaacagcctgagagccgaggataccgccgtgtactactgtgccaaggatggcggagagacactggtggatagcagaggccagggcacactggtcacagtgtcatctacgcgtgagcagaaactgatctcggaagaggatgggagcggcagccagcctcacaccaagcccagcgtgttcgtgatgaagaacggcaccaacgtggcctgcctcgtgaaagagttctaccccaaggacatcaggatcaacctggtgtccagcaagaagatcaccgagttcgaccccgccatcgtgatctcccccagcggcaagtacaacgccgtgaagctggggaagtacgaggacagcaacagcgtgacctgctccgtgcagcacgacaacaagaccgtgcacagcaccgactttgaagtgaaaaccgactccaccgaccacgtgaagcccaaagagacagagaacaccaagcagcccagcaagagctgccacaagcccaaggccatcgtgcacaccgagaaagtgaacatgatgagcctgaccgtgctgggcctgcggatgctgttcgccaaaaccgtggccgtgaacttcctgctgaccgccaagctgttcttcctccgcgccaagagaagcggatctggcgtgaagcagaccctgaatttcgacctgctgaagctggctggcgacgtggaatccaacccaggcccttctagaggccatatgaccgagtacaagcccacggtgcgcctcgccacccgcgacgacgtccccagggccgtacgcaccctcgccgccgcgttcgccgactaccccgccacgcgccacaccgtcgatccggaccgccacatcgagcgggtcaccgagctgcaagaactcttcctcacgcgcgtcgggctcgacatcggcaaggtgtgggtcgcggacgacggcgccgcggtggcggtctggaccacgccggagagcgtcgaagcgggggcggtgttcgccgagatcggcccgcgcatggccgagttgagcggttcccggctggccgcgcagcaacagatggaaggcctcctggcgccgcaccggcccaaggagcccgcgtggttcctggccaccgtcggcgtctcgcccgaccaccagggcaagggtctgggcagcgccgtcgtgctccccggagtggaggcggccgagcgcgccggggtgcccgccttcctggagacctccgcgccccgcaacctccccttctacgagcggctcggcttcaccgtcaccgccgacgtcgaggtgcccgaaggaccgcgcacctggtgcatgacccgcaagcccggtgcctga

SEQ ID NO: 6703 - DNA, 3117 bp, Artificial Sequence
  Synthetic Polynucloetide
atggccttaccagtgaccgccttgctcctgccgctggccttgctgctccacgccgccaggccgcagctccagctgcaagagtctggacctggcctggtcaagcctagcgagacactgagcctgacctgtaccgtgtccggcgatagcatcagcagcggcgattactactggggctggatcagacagcctcctggcaaaggactggaatggatcggccacatctactacagcggcgtgacctactacaaccccagcctgaagtccagagtgaccatcagcgtggacaccagccggaaccagttctccctgaagctgtctagcgtgacagccgccgataccgccgtgtactactgcaccagagaggacagcagcaactggcggagtagaggccagggaacactggtcacagttagctctggacagcctaaggccaatcctaccgtgacactgttccctccaagcagcgaagaactccaggccaacaaggccacacttgtgtgcctgatctccgacttctaccctggggctgtgacagtggcttggaaggccgatggatctcctgtgaaagccggcgtggaaaccaccaagccatccaagcagagcaacaacaaatacgccgccagctcctacctgagcctgacacctgagcagtggaagtcccacagatcctacagctgccaagtgacccacgaaggcagcaccgtggaaaagacagtggcccctacagagtgcagcggatcccagagcttcggcctgctggaccccaagctgtgctacctgctggatggcatcctgttcatctacggcgtgatcctgaccgccctgttcctgagagtgaagttcagcagaagcgccgacgcccctgcctaccagcagggacagaaccaactgtacaacgagctgaacctgggcagacgggaagagtacgacgtgctggacaagcggagaggcagggaccctgagatgggcggaaagccccagcggagaaagaacccccaggaaggactgtataacgaactccagaaagacaagatggccgaagcctacagcgagatcggcatgaagggcgagcggagaagaggcaagggccacgatggcctgtaccagggcctgagcaccgccaccaaggacacctatgacgccctgcacatgcaggccctgcctccaagaagggccaagcgatctggatctggagcaacaaacttctcactactcaaacaagcaggtgacgtggaggagaatcccgggcctactagtatggactggatttggcgcatccttttccttgtcggcgctgctaccggcgcgcattccttccaggtgcagctggttgaatctggcggaggactggttcagcctggcggatctctgagactgtcttgtgccgccagcggcttcaccttcaccaatcacgccatgagctgggtccgacaggcccctggaaaaggactggaactggtgtctagcatcagcggcaacggcagaaccacctactacgccgatagcgtgaagggcagattcaccatcagccgggacatcagcaagaacaccctggacctccagatgaacagcctgagagccgaggataccgccgtgtactactgtgccaaggatggcggagagacactggtggatagcagaggccagggcacactggtcacagtgtcatctgcctctacaaagggaccctccgtgtttcctctggctcccagcagcaagtctacaagcggaggaacagccgctctgggctgcctggtcaaggattactttcccgagcctgtgaccgtgtcctggaatagcggagcactgacaagcggcgtgcacacctttccagccgtgctgcaaagcagcggcctgtactctctgagcagcgtggtcacagtgcctagctctagcctgggcacccagacctacatctgcaatgtgaaccacaagcctagcaacaccaaggtggacaagagagtggaacccaagagctgtggtacccagagttttgggttgttggaccctaaattgtgctatctgttggacggaatcctgttcatttacggagtgatcctgaccgcattgttcctgcgggttaagttttccagatccgcagacgcacccgcttaccaacaagggcagaaccaactctacaatgaacttaatttggggcggagggaagagtacgacgttctggacaaaaggaggggacgagatcccgagatgggcggaaagcctcagcgaaggaagaatccgcaagaggggctttataacgaactccagaaagataaaatggcagaagcctatagtgagattgggatgaagggagaaaggaggaggggtaaaggtcacgatgggttgtaccaaggattgagcacagccactaaagatacctatgatgcgctccacatgcaggccctgccgccaagacgcgccaagagaagcggatctggcgtgaagcagaccctgaatttcgacctgctgaagctggctggcgacgtggaatccaacccaggcccttctagaggccatatgaccgagtacaagcccacggtgcgcctcgccacccgcgacgacgtccccagggccgtacgcaccctcgccgccgcgttcgccgactaccccgccacgcgccacaccgtcgatccggaccgccacatcgagcgggtcaccgagctgcaagaactcttcctcacgcgcgtcgggctcgacatcggcaaggtgtgggtcgcggacgacggcgccgcggtggcggtctggaccacgccggagagcgtcgaagcgggggcggtgttcgccgagatcggcccgcgcatggccgagttgagcggttcccggctggccgcgcagcaacagatggaaggcctcctggcgccgcaccggcccaaggagcccgcgtggttcctggccaccgtcggcgtctcgcccgaccaccagggcaagggtctgggcagcgccgtcgtgctccccggagtggaggcggccgagcgcgccggggtgcccgccttcctggagacctccgcgccccgcaacctccccttctacgagcggctcggcttcaccgtcaccgccgacgtcgaggtgcccgaaggaccgcgcacctggtgcatgacccgcaagcccggtgcctga

SEQ ID NO: 6704 - DNA, 2472 bp, Artificial Sequence
  Synthetic Polynucloetide
atggccttaccagtgaccgccttgctcctgccgctggccttgctgctccacgccgccaggccgcagctccagctgcaagagtctggacctggcctggtcaagcctagcgagacactgagcctgacctgtaccgtgtccggcgatagcatcagcagcggcgattactactggggctggatcagacagcctcctggcaaaggactggaatggatcggccacatctactacagcggcgtgacctactacaaccccagcctgaagtccagagtgaccatcagcgtggacaccagccggaaccagttctccctgaagctgtctagcgtgacagccgccgataccgccgtgtactactgcaccagagaggacagcagcaactggcggagtagaggccagggaacactggtcacagttagctctctcgaggacctgaagaacgtgttcccacctgaggtggccgtgttcgagcctagcgaggccgagatcagccacacccagaaagccaccctcgtgtgcctggctaccggcttctaccccgaccatgtggaactgtcttggtgggtcaacggcaaagaggtgcacagcggcgtgtctaccgacccccagccactgaaagaacagcccgccctgaacgacagccggtactgcctgagcagcagactgagagtgtccgccaccttctggcagaacccccggaaccacttcagatgccaggtgcagttctacggcctgagcgagaacgacgagtggacccaggacagagccaagcccgtgacccagatcgtgtctgccgaagcctggggcagagccgattgcggatcccagagcttcggcctgctggaccccaagctgtgctacctgctggatggcatcctgttcatctacggcgtgatcctgaccgccctgttcctgagagtgaagttcagcagaagcgccgacgcccctgcctaccagcagggacagaaccaactgtacaacgagctgaacctgggcagacgggaagagtacgacgtgctggacaagcggagaggcagggaccctgagatgggcggaaagccccagcggagaaagaacccccaggaaggactgtataacgaactccagaaagacaagatggccgaagcctacagcgagatcggcatgaagggcgagcggagaagaggcaagggccacgatggcctgtaccagggcctgagcaccgccaccaaggacacctatgacgccctgcacatgcaggccctgcctccaagaagggccaagcgatctggatctggagcaacaaacttctcactactcaaacaagcaggtgacgtggaggagaatcccgggcctactagtatggactggatttggcgcatccttttccttgtcggcgctgctaccggcgcgcattccttccaggtgcagctggttgaatctggcggaggactggttcagcctggcggatctctgagactgtcttgtgccgccagcggcttcaccttcaccaatcacgccatgagctgggtccgacaggcccctggaaaaggactggaactggtgtctagcatcagcggcaacggcagaaccacctactacgccgatagcgtgaagggcagattcaccatcagccgggacatcagcaagaacaccctggacctccagatgaacagcctgagagccgaggataccgccgtgtactactgtgccaaggatggcggagagacactggtggatagcagaggccagggcacactggtcacagtgtcatctacgcgtatccagaaccctgatcctgccgtgtaccagctgcgggatagcaagagcagcgacaagagcgtgtgtctgttcaccgacttcgacagccagaccaacgtgtcccagagcaaggactccgacgtgtacatcaccgataagaccgtgctggacatgcggagcatggacttcaagagcaactccgccgtggcctggtccaacaagtccgatttcgcctgcgccaacgccttcaacaacagcattatccccgaggacacattcttcccaagccccgagagcagctgcggtacccagagttttgggttgttggaccctaaattgtgctatctgttggacggaatcctgttcatttacggagtgatcctgaccgcattgttcctgcgggttaagttttccagatccgcagacgcacccgcttaccaacaagggcagaaccaactctacaatgaacttaatttggggcggagggaagagtacgacgttctggacaaaaggaggggacgagatcccgagatgggcggaaagcctcagcgaaggaagaatccgcaagaggggctttataacgaactccagaaagataaaatggcagaagcctatagtgagattgggatgaagggagaaaggaggaggggtaaaggtcacgatgggttgtaccaaggattgagcacagccactaaagatacctatgatgcgctccacatgcaggccctgccgccaaga

SEQ ID NO: 6705 - DNA, 2472 bp, Artificial Sequence
  Synthetic Polynucloetide
atggccttaccagtgaccgccttgctcctgccgctggccttgctgctccacgccgccaggccgcagctccagctgcaagagtctggacctggcctggtcaagcctagcgagacactgagcctgacctgtaccgtgtccggcgatagcatcagcagcggcgattactactggggctggatcagacagcctcctggcaaaggactggaatggatcggccacatctactacagcggcgtgacctactacaaccccagcctgaagtccagagtgaccatcagcgtggacaccagccggaaccagttctccctgaagctgtctagcgtgacagccgccgataccgccgtgtactactgcaccagagaggacagcagcaactggcggagtagaggccagggaacactggtcacagttagctctctcgaggacctgaagaacgtgttcccacctgaggtggccgtgttcgagcctagcaaggccgagatcgcccacacccagaaagccaccctcgtgtgcctggctaccggcttctaccccgaccatgtggaactgtcttggtgggtcaacggcaaagaggtgcacagcggcgtgtgtaccgacccccagccactgaaagaacagcccgccctgaacgacagccggtactgcctgagcagcagactgagagtgtccgccaccttctggcagaacccccggaaccacttcagatgccaggtgcagttctacggcctgagcgagaacgacgagtggacccaggacagagccaagcccgtgacccagatcgtgtctgccgaagcctggggcagagccgattgcggatcccagagcttcggcctgctggaccccaagctgtgctacctgctggatggcatcctgttcatctacggcgtgatcctgaccgccctgttcctgagagtgaagttcagcagaagcgccgacgcccctgcctaccagcagggacagaaccaactgtacaacgagctgaacctgggcagacgggaagagtacgacgtgctggacaagcggagaggcagggaccctgagatgggcggaaagccccagcggagaaagaacccccaggaaggactgtataacgaactccagaaagacaagatggccgaagcctacagcgagatcggcatgaagggcgagcggagaagaggcaagggccacgatggcctgtaccagggcctgagcaccgccaccaaggacacctatgacgccctgcacatgcaggccctgcctccaagaagggccaagcgatctggatctggagcaacaaacttctcactactcaaacaagcaggtgacgtggaggagaatcccgggcctactagtatggactggatttggcgcatccttttccttgtcggcgctgctaccggcgcgcattccttccaggtgcagctggttgaatctggcggaggactggttcagcctggcggatctctgagactgtcttgtgccgccagcggcttcaccttcaccaatcacgccatgagctgggtccgacaggcccctggaaaaggactggaactggtgtctagcatcagcggcaacggcagaaccacctactacgccgatagcgtgaagggcagattcaccatcagccgggacatcagcaagaacaccctggacctccagatgaacagcctgagagccgaggataccgccgtgtactactgtgccaaggatggcggagagacactggtggatagcagaggccagggcacactggtcacagtgtcatctacgcgtatccagaaccctgatcctgccgtgtaccagctgcgggatagcaagagcagcgacaagagcgtgtgtctgttcaccgacttcgacagccagaccaacgtgtcccagagcaaggactccgacgtgtacatcaccgataagtgcgtgctggacatgcggagcatggacttcaagagcaactccgccgtggcctggtccaacaagtccgatttcgcctgcgccaacgccttcaacaacagcattatccccgaggacacattcttcccaagcagcgacgtgccctgcggtacccagagttttgggttgttggaccctaaattgtgctatctgttggacggaatcctgttcatttacggagtgatcctgaccgcattgttcctgcgggttaagttttccagatccgcagacgcacccgcttaccaacaagggcagaaccaactctacaatgaacttaatttggggcggagggaagagtacgacgttctggacaaaaggaggggacgagatcccgagatgggcggaaagcctcagcgaaggaagaatccgcaagaggggctttataacgaactccagaaagataaaatggcagaagcctatagtgagattgggatgaagggagaaaggaggaggggtaaaggtcacgatgggttgtaccaaggattgagcacagccactaaagatacctatgatgcgctccacatgcaggccctgccgccaaga

SEQ ID NO: 6706 - DNA, 2685 bp, Artificial Sequence
  Synthetic Polynucloetide
atggccttaccagtgaccgccttgctcctgccgctggccttgctgctccacgccgccaggccgcagctccagctgcaagagtctggacctggcctggtcaagcctagcgagacactgagcctgacctgtaccgtgtccggcgatagcatcagcagcggcgattactactggggctggatcagacagcctcctggcaaaggactggaatggatcggccacatctactacagcggcgtgacctactacaaccccagcctgaagtccagagtgaccatcagcgtggacaccagccggaaccagttctccctgaagctgtctagcgtgacagccgccgataccgccgtgtactactgcaccagagaggacagcagcaactggcggagtagaggccagggaacactggtcacagttagctctctcgaggggaaaccaattcccaaccctcttctgggactggattcaaccggcagcggcgaggacctgaagaacgtgttcccacctgaggtggccgtgttcgagcctagcgaggccgagatcagccacacccagaaagccaccctcgtgtgcctggctaccggcttctaccccgaccatgtggaactgtcttggtgggtcaacggcaaagaggtgcacagcggcgtgtctaccgacccccagccactgaaagaacagcccgccctgaacgacagccggtactgcctgagcagcagactgagagtgtccgccaccttctggcagaacccccggaaccacttcagatgccaggtgcagttctacggcctgagcgagaacgacgagtggacccaggacagagccaagcccgtgacccagatcgtgtctgccgaagcctggggcagagccgattgcggatcccagagcttcggcctgctggaccccaagctgtgctacctgctggatggcatcctgttcatctacggcgtgatcctgaccgccctgttcctgagagtgaagttcagcagaagcgccgacgcccctgcctaccagcagggacagaaccaactgtacaacgagctgaacctgggcagacgggaagagtacgacgtgctggacaagcggagaggcagggaccctgagatgggcggaaagccccagcggagaaagaacccccaggaaggactgtataacgaactccagaaagacaagatggccgaagcctacagcgagatcggcatgaagggcgagcggagaagaggcaagggccacgatggcctgtaccagggcctgagcaccgccaccaaggacacctatgacgccctgcacatgcaggccctgcctccaagaagggccaagcgatctggatctggagcaacaaacttctcactactcaaacaagcaggtgacgtggaggagaatcccgggcctactagtatggactggatttggcgcatccttttccttgtcggcgctgctaccggcgcgcattccttccaggtgcagctggttgaatctggcggaggactggttcagcctggcggatctctgagactgtcttgtgccgccagcggcttcaccttcaccaatcacgccatgagctgggtccgacaggcccctggaaaaggactggaactggtgtctagcatcagcggcaacggcagaaccacctactacgccgatagcgtgaagggcagattcaccatcagccgggacatcagcaagaacaccctggacctccagatgaacagcctgagagccgaggataccgccgtgtactactgtgccaaggatggcggagagacactggtggatagcagaggccagggcacactggtcacagtgtcatctacgcgtgagcagaaactgatctcggaagaggatgggagcggcatccagaaccctgatcctgccgtgtaccagctgcgggatagcaagagcagcgacaagagcgtgtgtctgttcaccgacttcgacagccagaccaacgtgtcccagagcaaggactccgacgtgtacatcaccgataagaccgtgctggacatgcggagcatggacttcaagagcaactccgccgtggcctggtccaacaagtccgatttcgcctgcgccaacgccttcaacaacagcattatccccgaggacacattcttcccaagccccgagagcagctgcggtacccagagttttgggttgttggaccctaaattgtgctatctgttggacggaatcctgttcatttacggagtgatcctgaccgcattgttcctgaggagcaagcggtcacggctgctccacagcgattacatgaatatgacaccacgaagaccgggtcctactcgcaaacactaccaaccctacgcacctccccgcgactttgcagcgtaccgatctcgggttaagttttccagatccgcagacgcacccgcttaccaacaagggcagaaccaactctacaatgaacttaatttggggcggagggaagagtacgacgttctggacaaaaggaggggacgagatcccgagatgggcggaaagcctcagcgaaggaagaatccgcaagaggggctttataacgaactccagaaagataaaatggcagaagcctatagtgagattgggatgaagggagaaaggaggaggggtaaaggtcacgatgggttgtaccaaggattgagcacagccactaaagatacctatgatgcgctccacatgcaggccctgccgccaaga

SEQ ID NO: 6707 - DNA, 2808 bp, Artificial Sequence
  Synthetic Polynucloetide
atggccttaccagtgaccgccttgctcctgccgctggccttgctgctccacgccgccaggccgcagctccagctgcaagagtctggacctggcctggtcaagcctagcgagacactgagcctgacctgtaccgtgtccggcgatagcatcagcagcggcgattactactggggctggatcagacagcctcctggcaaaggactggaatggatcggccacatctactacagcggcgtgacctactacaaccccagcctgaagtccagagtgaccatcagcgtggacaccagccggaaccagttctccctgaagctgtctagcgtgacagccgccgataccgccgtgtactactgcaccagagaggacagcagcaactggcggagtagaggccagggaacactggtcacagttagctctctcgaggggaaaccaattcccaaccctcttctgggactggattcaaccggcagcggcgaggacctgaagaacgtgttcccacctgaggtggccgtgttcgagcctagcgaggccgagatcagccacacccagaaagccaccctcgtgtgcctggctaccggcttctaccccgaccatgtggaactgtcttggtgggtcaacggcaaagaggtgcacagcggcgtgtctaccgacccccagccactgaaagaacagcccgccctgaacgacagccggtactgcctgagcagcagactgagagtgtccgccaccttctggcagaacccccggaaccacttcagatgccaggtgcagttctacggcctgagcgagaacgacgagtggacccaggacagagccaagcccgtgacccagatcgtgtctgccgaagcctggggcagagccgattgcggatcccagagcttcggcctgctggaccccaagctgtgctacctgctggatggcatcctgttcatctacggcgtgatcctgaccgccctgttcctgaggagtaagaggagcaggctcctgcacagtgactacatgaacatgactccacgccgccccggacccacccgcaagcattaccagccctatgccccaccacgcgacttcgcagcctatcgctccagagtgaagttcagcagaagcgccgacgcccctgcctaccagcagggacagaaccaactgtacaacgagctgaacctgggcagacgggaagagtacgacgtgctggacaagcggagaggcagggaccctgagatgggcggaaagccccagcggagaaagaacccccaggaaggactgtataacgaactccagaaagacaagatggccgaagcctacagcgagatcggcatgaagggcgagcggagaagaggcaagggccacgatggcctgtaccagggcctgagcaccgccaccaaggacacctatgacgccctgcacatgcaggccctgcctccaagaagggccaagcgatctggatctggagcaacaaacttctcactactcaaacaagcaggtgacgtggaggagaatcccgggcctactagtatggactggatttggcgcatccttttccttgtcggcgctgctaccggcgcgcattccttccaggtgcagctggttgaatctggcggaggactggttcagcctggcggatctctgagactgtcttgtgccgccagcggcttcaccttcaccaatcacgccatgagctgggtccgacaggcccctggaaaaggactggaactggtgtctagcatcagcggcaacggcagaaccacctactacgccgatagcgtgaagggcagattcaccatcagccgggacatcagcaagaacaccctggacctccagatgaacagcctgagagccgaggataccgccgtgtactactgtgccaaggatggcggagagacactggtggatagcagaggccagggcacactggtcacagtgtcatctacgcgtgagcagaaactgatctcggaagaggatgggagcggcatccagaaccctgatcctgccgtgtaccagctgcgggatagcaagagcagcgacaagagcgtgtgtctgttcaccgacttcgacagccagaccaacgtgtcccagagcaaggactccgacgtgtacatcaccgataagaccgtgctggacatgcggagcatggacttcaagagcaactccgccgtggcctggtccaacaagtccgatttcgcctgcgccaacgccttcaacaacagcattatccccgaggacacattcttcccaagccccgagagcagctgcggtacccagagttttgggttgttggaccctaaattgtgctatctgttggacggaatcctgttcatttacggagtgatcctgaccgcattgttcctgaggagcaagcggtcacggctgctccacagcgattacatgaatatgacaccacgaagaccgggtcctactcgcaaacactaccaaccctacgcacctccccgcgactttgcagcgtaccgatctcgggttaagttttccagatccgcagacgcacccgcttaccaacaagggcagaaccaactctacaatgaacttaatttggggcggagggaagagtacgacgttctggacaaaaggaggggacgagatcccgagatgggcggaaagcctcagcgaaggaagaatccgcaagaggggctttataacgaactccagaaagataaaatggcagaagcctatagtgagattgggatgaagggagaaaggaggaggggtaaaggtcacgatgggttgtaccaaggattgagcacagccactaaagatacctatgatgcgctccacatgcaggccctgccgccaaga

SEQ ID NO: 6708 - DNA, 2691 bp, Artificial Sequence
  Synthetic Polynucloetide
atggccttaccagtgaccgccttgctcctgccgctggccttgctgctccacgccgccaggccgcagctccagctgcaagagtctggacctggcctggtcaagcctagcgagacactgagcctgacctgtaccgtgtccggcgatagcatcagcagcggcgattactactggggctggatcagacagcctcctggcaaaggactggaatggatcggccacatctactacagcggcgtgacctactacaaccccagcctgaagtccagagtgaccatcagcgtggacaccagccggaaccagttctccctgaagctgtctagcgtgacagccgccgataccgccgtgtactactgcaccagagaggacagcagcaactggcggagtagaggccagggaacactggtcacagttagctctctcgaggggaaaccaattcccaaccctcttctgggactggattcaaccggcagcggcgaggacctgaagaacgtgttcccacctgaggtggccgtgttcgagcctagcgaggccgagatcagccacacccagaaagccaccctcgtgtgcctggctaccggcttctaccccgaccatgtggaactgtcttggtgggtcaacggcaaagaggtgcacagcggcgtgtctaccgacccccagccactgaaagaacagcccgccctgaacgacagccggtactgcctgagcagcagactgagagtgtccgccaccttctggcagaacccccggaaccacttcagatgccaggtgcagttctacggcctgagcgagaacgacgagtggacccaggacagagccaagcccgtgacccagatcgtgtctgccgaagcctggggcagagccgattgcggatcccagagcttcggcctgctggaccccaagctgtgctacctgctggatggcatcctgttcatctacggcgtgatcctgaccgccctgttcctgagagtgaagttcagcagaagcgccgacgcccctgcctaccagcagggacagaaccaactgtacaacgagctgaacctgggcagacgggaagagtacgacgtgctggacaagcggagaggcagggaccctgagatgggcggaaagccccagcggagaaagaacccccaggaaggactgtataacgaactccagaaagacaagatggccgaagcctacagcgagatcggcatgaagggcgagcggagaagaggcaagggccacgatggcctgtaccagggcctgagcaccgccaccaaggacacctatgacgccctgcacatgcaggccctgcctccaagaagggccaagcgatctggatctggagcaacaaacttctcactactcaaacaagcaggtgacgtggaggagaatcccgggcctactagtatggactggatttggcgcatccttttccttgtcggcgctgctaccggcgcgcattccttccaggtgcagctggttgaatctggcggaggactggttcagcctggcggatctctgagactgtcttgtgccgccagcggcttcaccttcaccaatcacgccatgagctgggtccgacaggcccctggaaaaggactggaactggtgtctagcatcagcggcaacggcagaaccacctactacgccgatagcgtgaagggcagattcaccatcagccgggacatcagcaagaacaccctggacctccagatgaacagcctgagagccgaggataccgccgtgtactactgtgccaaggatggcggagagacactggtggatagcagaggccagggcacactggtcacagtgtcatctacgcgtgagcagaaactgatctcggaagaggatctggggagcggcatccagaaccctgatcctgccgtgtaccagctgcgggatagcaagagcagcgacaagagcgtgtgtctgttcaccgacttcgacagccagaccaacgtgtcccagagcaaggactccgacgtgtacatcaccgataagaccgtgctggacatgcggagcatggacttcaagagcaactccgccgtggcctggtccaacaagtccgatttcgcctgcgccaacgccttcaacaacagcattatccccgaggacacattcttcccaagccccgagagcagctgcggtacccagagttttgggttgttggaccctaaattgtgctatctgttggacggaatcctgttcatttacggagtgatcctgaccgcattgttcctgaagagaggccggaagaagctgctgtacatcttcaagcagcctttcatgcggcccgtgcagaccacccaggaagaggacggctgctcctgccggttccccgaggaagaagaaggcggctgcgagctgcgggttaagttttccagatccgcagacgcacccgcttaccaacaagggcagaaccaactctacaatgaacttaatttggggcggagggaagagtacgacgttctggacaaaaggaggggacgagatcccgagatgggcggaaagcctcagcgaaggaagaatccgcaagaggggctttataacgaactccagaaagataaaatggcagaagcctatagtgagattgggatgaagggagaaaggaggaggggtaaaggtcacgatgggttgtaccaaggattgagcacagccactaaagatacctatgatgcgctccacatgcaggccctgccgccaaga

SEQ ID NO: 6709 - DNA, 2817 bp, Artificial Sequence
  Synthetic Polynucloetide
atggccttaccagtgaccgccttgctcctgccgctggccttgctgctccacgccgccaggccgcagctccagctgcaagagtctggacctggcctggtcaagcctagcgagacactgagcctgacctgtaccgtgtccggcgatagcatcagcagcggcgattactactggggctggatcagacagcctcctggcaaaggactggaatggatcggccacatctactacagcggcgtgacctactacaaccccagcctgaagtccagagtgaccatcagcgtggacaccagccggaaccagttctccctgaagctgtctagcgtgacagccgccgataccgccgtgtactactgcaccagagaggacagcagcaactggcggagtagaggccagggaacactggtcacagttagctctctcgaggggaaaccaattcccaaccctcttctgggactggattcaaccggcagcggcgaggacctgaagaacgtgttcccacctgaggtggccgtgttcgagcctagcgaggccgagatcagccacacccagaaagccaccctcgtgtgcctggctaccggcttctaccccgaccatgtggaactgtcttggtgggtcaacggcaaagaggtgcacagcggcgtgtctaccgacccccagccactgaaagaacagcccgccctgaacgacagccggtactgcctgagcagcagactgagagtgtccgccaccttctggcagaacccccggaaccacttcagatgccaggtgcagttctacggcctgagcgagaacgacgagtggacccaggacagagccaagcccgtgacccagatcgtgtctgccgaagcctggggcagagccgattgcggatcccagagcttcggcctgctggaccccaagctgtgctacctgctggatggcatcctgttcatctacggcgtgatcctgaccgccctgttcctgaaacggggcagaaagaaactcctgtatatattcaaacaaccatttatgagaccagtacaaactactcaagaggaagatggctgtagctgccgatttccagaagaagaagaaggaggatgtgaactgagagtgaagttcagcagaagcgccgacgcccctgcctaccagcagggacagaaccaactgtacaacgagctgaacctgggcagacgggaagagtacgacgtgctggacaagcggagaggcagggaccctgagatgggcggaaagccccagcggagaaagaacccccaggaaggactgtataacgaactccagaaagacaagatggccgaagcctacagcgagatcggcatgaagggcgagcggagaagaggcaagggccacgatggcctgtaccagggcctgagcaccgccaccaaggacacctatgacgccctgcacatgcaggccctgcctccaagaagggccaagcgatctggatctggagcaacaaacttctcactactcaaacaagcaggtgacgtggaggagaatcccgggcctactagtatggactggatttggcgcatccttttccttgtcggcgctgctaccggcgcgcattccttccaggtgcagctggttgaatctggcggaggactggttcagcctggcggatctctgagactgtcttgtgccgccagcggcttcaccttcaccaatcacgccatgagctgggtccgacaggcccctggaaaaggactggaactggtgtctagcatcagcggcaacggcagaaccacctactacgccgatagcgtgaagggcagattcaccatcagccgggacatcagcaagaacaccctggacctccagatgaacagcctgagagccgaggataccgccgtgtactactgtgccaaggatggcggagagacactggtggatagcagaggccagggcacactggtcacagtgtcatctacgcgtgagcagaaactgatctcggaagaggatctggggagcggcatccagaaccctgatcctgccgtgtaccagctgcgggatagcaagagcagcgacaagagcgtgtgtctgttcaccgacttcgacagccagaccaacgtgtcccagagcaaggactccgacgtgtacatcaccgataagaccgtgctggacatgcggagcatggacttcaagagcaactccgccgtggcctggtccaacaagtccgatttcgcctgcgccaacgccttcaacaacagcattatccccgaggacacattcttcccaagccccgagagcagctgcggtacccagagttttgggttgttggaccctaaattgtgctatctgttggacggaatcctgttcatttacggagtgatcctgaccgcattgttcctgaagagaggccggaagaagctgctgtacatcttcaagcagcctttcatgcggcccgtgcagaccacccaggaagaggacggctgctcctgccggttccccgaggaagaagaaggcggctgcgagctgcgggttaagttttccagatccgcagacgcacccgcttaccaacaagggcagaaccaactctacaatgaacttaatttggggcggagggaagagtacgacgttctggacaaaaggaggggacgagatcccgagatgggcggaaagcctcagcgaaggaagaatccgcaagaggggctttataacgaactccagaaagataaaatggcagaagcctatagtgagattgggatgaagggagaaaggaggaggggtaaaggtcacgatgggttgtaccaaggattgagcacagccactaaagatacctatgatgcgctccacatgcaggccctgccgccaaga

SEQ ID NO: 6710 - DNA, 2490 bp, Artificial Sequence
  Synthetic Polynucloetide
atggccttaccagtgaccgccttgctcctgccgctggccttgctgctccacgccgccaggccgcagctccagctgcaagagtctggacctggcctggtcaagcctagcgagacactgagcctgacctgtaccgtgtccggcgatagcatcagcagcggcgattactactggggctggatcagacagcctcctggcaaaggactggaatggatcggccacatctactacagcggcgtgacctactacaaccccagcctgaagtccagagtgaccatcagcgtggacaccagccggaaccagttctccctgaagctgtctagcgtgacagccgccgataccgccgtgtactactgcaccagagaggacagcagcaactggcggagtagaggccagggaacactggtcacagttagctctctcgagcagagcttcggcctgctggaccccaagctgtgctacctgctggatggcatcctgttcatctacggcgtgatcctgaccgccctgttcctgagagtgaagttcagcagaagcgccgacgcccctgcctaccagcagggacagaaccaactgtacaacgagctgaacctgggcagacgggaagagtacgacgtgctggacaagcggagaggcagggaccctgagatgggcggaaagccccagcggagaaagaacccccaggaaggactgtataacgaactccagaaagacaagatggccgaagcctacagcgagatcggcatgaagggcgagcggagaagaggcaagggccacgatggcctgtaccagggcctgagcaccgccaccaaggacacctatgacgccctgcacatgcaggccctgcctccaagaagggccaagcgatctggatctggagcaacaaacttctcactactcaaacaagcaggtgacgtggaggagaatcccgggcctactagtatggactggatttggcgcatccttttccttgtcggcgctgctaccggcgcgcattccttccaggtgcagctggttgaatctggcggaggactggttcagcctggcggatctctgagactgtcttgtgccgccagcggcttcaccttcaccaatcacgccatgagctgggtccgacaggcccctggaaaaggactggaactggtgtctagcatcagcggcaacggcagaaccacctactacgccgatagcgtgaagggcagattcaccatcagccgggacatcagcaagaacaccctggacctccagatgaacagcctgagagccgaggataccgccgtgtactactgtgccaaggatggcggagagacactggtggatagcagaggccagggcacactggtcacagtgtcatctacgcgtcagagttttgggttgttggaccctaaattgtgctatctgttggacggaatcctgttcatttacggagtgatcctgaccgcattgttcctgcgggttaagttttccagatccgcagacgcacccgcttaccaacaagggcagaaccaactctacaatgaacttaatttggggcggagggaagagtacgacgttctggacaaaaggaggggacgagatcccgagatgggcggaaagcctcagcgaaggaagaatccgcaagaggggctttataacgaactccagaaagataaaatggcagaagcctatagtgagattgggatgaagggagaaaggaggaggggtaaaggtcacgatgggttgtaccaaggattgagcacagccactaaagatacctatgatgcgctccacatgcaggccctgccgccaagacgcgccaagagaagcggatctggcgtgaagcagaccctgaatttcgacctgctgaagctggctggcgacgtggaatccaacccaggcccttctagaggccatatgaccgagtacaagcccacggtgcgcctcgccacccgcgacgacgtccccagggccgtacgcaccctcgccgccgcgttcgccgactaccccgccacgcgccacaccgtcgatccggaccgccacatcgagcgggtcaccgagctgcaagaactcttcctcacgcgcgtcgggctcgacatcggcaaggtgtgggtcgcggacgacggcgccgcggtggcggtctggaccacgccggagagcgtcgaagcgggggcggtgttcgccgagatcggcccgcgcatggccgagttgagcggttcccggctggccgcgcagcaacagatggaaggcctcctggcgccgcaccggcccaaggagcccgcgtggttcctggccaccgtcggcgtctcgcccgaccaccagggcaagggtctgggcagcgccgtcgtgctccccggagtggaggcggccgagcgcgccggggtgcccgccttcctggagacctccgcgccccgcaacctccccttctacgagcggctcggcttcaccgtcaccgccgacgtcgaggtgcccgaaggaccgcgcacctggtgcatgacccgcaagcccggtgcctga

SEQ ID NO: 6711 - DNA, 1962 bp, Artificial Sequence
  Synthetic Polynucloetide
atggccttaccagtgaccgccttgctcctgccgctggccttgctgctccacgccgccaggccgcagctccagctgcaagagtctggacctggcctggtcaagcctagcgagacactgagcctgacctgtaccgtgtccggcgatagcatcagcagcggcgattactactggggctggatcagacagcctcctggcaaaggactggaatggatcggccacatctactacagcggcgtgacctactacaaccccagcctgaagtccagagtgaccatcagcgtggacaccagccggaaccagttctccctgaagctgtctagcgtgacagccgccgataccgccgtgtactactgcaccagagaggacagcagcaactggcggagtagaggccagggaacactggtcacagttagctctctcgagggacagcctaaggccaatcctaccgtgacactgttccctccaagcagcgaagaactccaggccaacaaggccacacttgtgtgcctgatctccgacttctaccctggggctgtgacagtggcttggaaggccgatggatctcctgtgaaagccggcgtggaaaccaccaagccatccaagcagagcaacaacaaatacgccgccagctcctacctgagcctgacacctgagcagtggaagtcccacagatcctacagctgccaagtgacccacgaaggcagcaccgtggaaaagacagtggcccctacagagtgcagccccatcaagaccgatgtgattacaatggaccccaaggacaactgctccaaggacgccaacgataccctgctgctccagctgaccaacaccagcgcctactacatgtacttgttgctgctgctgaagtccgtggtgtacttcgccatcatcacatgctgcctgctgcggagaaccgccttctgctgcaacggcgagaagtctagggccaagcgatctggatctggagcaacaaacttctcactactcaaacaagcaggtgacgtggaggagaatcccgggcctactagtatggactggatttggcgcatccttttccttgtcggcgctgctaccggcgcgcattccttccaggtgcagctggttgaatctggcggaggactggttcagcctggcggatctctgagactgtcttgtgccgccagcggcttcaccttcaccaatcacgccatgagctgggtccgacaggcccctggaaaaggactggaactggtgtctagcatcagcggcaacggcagaaccacctactacgccgatagcgtgaagggcagattcaccatcagccgggacatcagcaagaacaccctggacctccagatgaacagcctgagagccgaggataccgccgtgtactactgtgccaaggatggcggagagacactggtggatagcagaggccagggcacactggtcacagtgtcatctacgcgtgcctctacaaagggaccctccgtgtttcctctggctcccagcagcaagtctacaagcggaggaacagccgctctgggctgcctggtcaaggattactttcccgagcctgtgaccgtgtcctggaatagcggagcactgacaagcggcgtgcacacctttccagccgtgctgcaaagcagcggcctgtactctctgagcagcgtggtcacagtgcctagctctagcctgggcacccagacctacatctgcaatgtgaaccacaagcctagcaacaccaaggtggacaagagagtggaacccaagagctgtgaagtgaaaaccgactccaccgaccacgtgaagcccaaagagacagagaacaccaagcagcccagcaagagctgccacaagcccaaggccatcgtgcacaccgagaaagtgaacatgatgagcctgaccgtgctgggcctgcggatgctgttcgccaaaaccgtggccgtgaacttcctgctgaccgccaagctgttcttcctc

SEQ ID NO: 6712 - DNA, 1896 bp, Artificial Sequence
  Synthetic Polynucloetide
atggccttaccagtgaccgccttgctcctgccgctggccttgctgctccacgccgccaggccgcagctccagctgcaagagtctggacctggcctggtcaagcctagcgagacactgagcctgacctgtaccgtgtccggcgatagcatcagcagcggcgattactactggggctggatcagacagcctcctggcaaaggactggaatggatcggccacatctactacagcggcgtgacctactacaaccccagcctgaagtccagagtgaccatcagcgtggacaccagccggaaccagttctccctgaagctgtctagcgtgacagccgccgataccgccgtgtactactgcaccagagaggacagcagcaactggcggagtagaggccagggaacactggtcacagttagctctctcgagggacagcctaaggccaatcctaccgtgacactgttccctccaagcagcgaagaactccaggccaacaaggccacacttgtgtgcctgatctccgacttctaccctggggctgtgacagtggcttggaaggccgatggatctcctgtgaaagccggcgtggaaaccaccaagccatccaagcagagcaacaacaaatacgccgccagctcctacctgagcctgacacctgagcagtggaagtcccacagatcctacagctgccaagtgacccacgaaggcagcaccgtggaaaagacagtggcccctacagagtgcagcggcagagccgattgcggcatcaccagcgccagctaccaccagggcgtgctgagcgccaccatcctgtacgagatcctgctgggcaaggccaccctgtacgccgtgctggtgtctgccctggtgctgatggctatggtcaagcggaaggacagccggggaagggccaagcgatctggatctggagcaacaaacttctcactactcaaacaagcaggtgacgtggaggagaatcccgggcctactagtatggactggatttggcgcatccttttccttgtcggcgctgctaccggcgcgcattccttccaggtgcagctggttgaatctggcggaggactggttcagcctggcggatctctgagactgtcttgtgccgccagcggcttcaccttcaccaatcacgccatgagctgggtccgacaggcccctggaaaaggactggaactggtgtctagcatcagcggcaacggcagaaccacctactacgccgatagcgtgaagggcagattcaccatcagccgggacatcagcaagaacaccctggacctccagatgaacagcctgagagccgaggataccgccgtgtactactgtgccaaggatggcggagagacactggtggatagcagaggccagggcacactggtcacagtgtcatctacgcgtgcctctacaaagggaccctccgtgtttcctctggctcccagcagcaagtctacaagcggaggaacagccgctctgggctgcctggtcaaggattactttcccgagcctgtgaccgtgtcctggaatagcggagcactgacaagcggcgtgcacacctttccagccgtgctgcaaagcagcggcctgtactctctgagcagcgtggtcacagtgcctagctctagcctgggcacccagacctacatctgcaatgtgaaccacaagcctagcaacaccaaggtggacaagagagtggaacccaagagctgtatccccgaggacacattcttcccaagcagcgacgtgccctgcgacgtgaagctggtggaaaagagcttcgagacagacaccaacctgaacttccagaacctgagcgtgatcggcttcagaatcctgctgctgaaagtggccggctttaacctgctgatgaccctgcggctgtggtccagc

SEQ ID NO: 6713 - DNA, 1896 bp, Artificial Sequence
  Synthetic Polynucloetide
atggccttaccagtgaccgccttgctcctgccgctggccttgctgctccacgccgccaggccgcagctccagctgcaagagtctggacctggcctggtcaagcctagcgagacactgagcctgacctgtaccgtgtccggcgatagcatcagcagcggcgattactactggggctggatcagacagcctcctggcaaaggactggaatggatcggccacatctactacagcggcgtgacctactacaaccccagcctgaagtccagagtgaccatcagcgtggacaccagccggaaccagttctccctgaagctgtctagcgtgacagccgccgataccgccgtgtactactgcaccagagaggacagcagcaactggcggagtagaggccagggaacactggtcacagttagctctctcgagggacagcctaaggccaatcctaccgtgacactgttccctccaagcagcgaagaactccaggccaacaaggccacacttgtgtgcctgatctccgacttctaccctggggctgtgacagtggcttggaaggccgatggatctcctgtgaaagccggcgtggaaaccaccaagccatccaagcagagcaacaacaaatacgccgccagctcctacctgagcctgacacctgagcagtggaagtcccacagatcctacagctgccaagtgacccacgaaggcagcaccgtggaaaagacagtggcccctacagagtgcagcggcagagccgattgcggctttaccagcgagagctaccagcagggcgtgctgagcgccaccatcctgtacgagatcctgctgggcaaggccaccctgtacgccgtgctggtgtctgccctggtgctgatggctatggtcaagcggaaggacagccggggaagggccaagcgatctggatctggagcaacaaacttctcactactcaaacaagcaggtgacgtggaggagaatcccgggcctactagtatggactggatttggcgcatccttttccttgtcggcgctgctaccggcgcgcattccttccaggtgcagctggttgaatctggcggaggactggttcagcctggcggatctctgagactgtcttgtgccgccagcggcttcaccttcaccaatcacgccatgagctgggtccgacaggcccctggaaaaggactggaactggtgtctagcatcagcggcaacggcagaaccacctactacgccgatagcgtgaagggcagattcaccatcagccgggacatcagcaagaacaccctggacctccagatgaacagcctgagagccgaggataccgccgtgtactactgtgccaaggatggcggagagacactggtggatagcagaggccagggcacactggtcacagtgtcatctacgcgtgcctctacaaagggaccctccgtgtttcctctggctcccagcagcaagtctacaagcggaggaacagccgctctgggctgcctggtcaaggattactttcccgagcctgtgaccgtgtcctggaatagcggagcactgacaagcggcgtgcacacctttccagccgtgctgcaaagcagcggcctgtactctctgagcagcgtggtcacagtgcctagctctagcctgggcacccagacctacatctgcaatgtgaaccacaagcctagcaacaccaaggtggacaagagagtggaacccaagagctgtatccccgaggacacattcttcccaagccccgagagcagctgcgacgtgaagctggtggaaaagagcttcgagacagacaccaacctgaacttccagaacctgagcgtgatcggcttcagaatcctgctgctgaaagtggccggctttaacctgctgatgaccctgcggctgtggtccagc

SEQ ID NO: 6714 - DNA, 1359 bp, Artificial Sequence
  Synthetic Polynucloetide
atggccttaccagtgaccgccttgctcctgccgctggccttgctgctccacgccgccaggccgcagctccagctgcaagagtctggacctggcctggtcaagcctagcgagacactgagcctgacctgtaccgtgtccggcgatagcatcagcagcggcgattactactggggctggatcagacagcctcctggcaaaggactggaatggatcggccacatctactacagcggcgtgacctactacaaccccagcctgaagtccagagtgaccatcagcgtggacaccagccggaaccagttctccctgaagctgtctagcgtgacagccgccgataccgccgtgtactactgcaccagagaggacagcagcaactggcggagtagaggccagggaacactggtcacagttagctctctcgagagcggcggaggcggatctttccaggtgcagctggttgaatctggcggaggactggttcagcctggcggatctctgagactgtcttgtgccgccagcggcttcaccttcaccaatcacgccatgagctgggtccgacaggcccctggaaaaggactggaactggtgtctagcatcagcggcaacggcagaaccacctactacgccgatagcgtgaagggcagattcaccatcagccgggacatcagcaagaacaccctggacctccagatgaacagcctgagagccgaggataccgccgtgtactactgtgccaaggatggcggagagacactggtggatagcagaggccagggcacactggtcacagtgtcatctacgcgtgacggtaacgaggagatgggaggaatcactcaaaccccttacaaagtctcaatttcaggaacaactgttatccttacatgtccccagtatcctggcagcgagatcctttggcagcataacgacaagaatatagggggagatgaagacgataagaatatcggatctgacgaggatcacttgagcctgaaagagttctccgagcttgaacaaagcggatattatgtgtgctatccgcgcgggtcaaagccggaagacgctaacttttacctttatctccgagccagagtgtgcgaaaattgcatggaaatggacgttatgtccgttgctacaatagttatcgtagatatatgcatcacgggtggactgcttctgctggtttattattggtccaagaatagaaaggccaaagctaaacccgtgaccagaggcgctggcgcaggcggaaggcaaaggggacaaaacaaagaacggccaccaccagtgccaaatccagattatgagcctattcggaaaggacagagggacctgtactctggcctgaatcagagaagaatc

SEQ ID NO: 6715 - DNA, 1254 bp, Artificial Sequence
  Synthetic Polynucloetide
atggccttaccagtgaccgccttgctcctgccgctggccttgctgctccacgccgccaggccgcagctccagctgcaagagtctggacctggcctggtcaagcctagcgagacactgagcctgacctgtaccgtgtccggcgatagcatcagcagcggcgattactactggggctggatcagacagcctcctggcaaaggactggaatggatcggccacatctactacagcggcgtgacctactacaaccccagcctgaagtccagagtgaccatcagcgtggacaccagccggaaccagttctccctgaagctgtctagcgtgacagccgccgataccgccgtgtactactgcaccagagaggacagcagcaactggcggagtagaggccagggaacactggtcacagttagctctctcgagagcggcggaggcggatctttccaggtgcagctggttgaatctggcggaggactggttcagcctggcggatctctgagactgtcttgtgccgccagcggcttcaccttcaccaatcacgccatgagctgggtccgacaggcccctggaaaaggactggaactggtgtctagcatcagcggcaacggcagaaccacctactacgccgatagcgtgaagggcagattcaccatcagccgggacatcagcaagaacaccctggacctccagatgaacagcctgagagccgaggataccgccgtgtactactgtgccaaggatggcggagagacactggtggatagcagaggccagggcacactggtcacagtgtcatctacgcgtttcaagatccccatcgaggaactggaagatcgggtgttcgtgaactgcaacacctctatcacctgggtggaaggcaccgtgggaacactgctgagcgacatcaccagactggacctcggcaagcggattctggaccctcggggcatctacagatgcaacggcaccgacatctacaaggacaaagaaagcaccgtgcaggtccactacagaatgtgccagtcctgcgtggaactggaccctgctacagtggccggcatcatcgtgaccgatgtgatcgctactctgctgctggctctgggagtgttctgcttcgccggacacgaaacaggcagactgtctggcgctgccgatacacaggccctgctgagaaacgaccaagtgtatcagcccctgcgcgacagagatgatgcccagtattctcacctcggcggcaactgggctagaaacaag

SEQ ID NO: 6716 - DNA, 1284 bp, Artificial Sequence
  Synthetic Polynucloetide
atggccttaccagtgaccgccttgctcctgccgctggccttgctgctccacgccgccaggccgcagctccagctgcaagagtctggacctggcctggtcaagcctagcgagacactgagcctgacctgtaccgtgtccggcgatagcatcagcagcggcgattactactggggctggatcagacagcctcctggcaaaggactggaatggatcggccacatctactacagcggcgtgacctactacaaccccagcctgaagtccagagtgaccatcagcgtggacaccagccggaaccagttctccctgaagctgtctagcgtgacagccgccgataccgccgtgtactactgcaccagagaggacagcagcaactggcggagtagaggccagggaacactggtcacagttagctctctcgagagcggcggaggcggatctttccaggtgcagctggttgaatctggcggaggactggttcagcctggcggatctctgagactgtcttgtgccgccagcggcttcaccttcaccaatcacgccatgagctgggtccgacaggcccctggaaaaggactggaactggtgtctagcatcagcggcaacggcagaaccacctactacgccgatagcgtgaagggcagattcaccatcagccgggacatcagcaagaacaccctggacctccagatgaacagcctgagagccgaggataccgccgtgtactactgtgccaaggatggcggagagacactggtggatagcagaggccagggcacactggtcacagtgtcatctacgcgtcagagcatcaagggcaaccacctggtcaaggtgtacgactaccaagaggacggcagcgtgctgctgacatgtgatgccgaggccaagaacatcacctggtttaaggacggcaagatgatcggcttcctgaccgaggacaagaagaagtggaacctgggcagcaacgctaaggaccccagaggcatgtatcagtgcaagggcagccagaacaagagcaagcccctccaggtgtactaccggatgtgccagaactgcatcgagctgaacgccgctaccatcagcggctttctgttcgccgagatcgtgtccatcttcgtgctggccgtgggcgtgtactttatcgctggacaggatggcgtgcggcagagcagagcttccgataagcaaaccctgctgcctaacgaccagctgtaccagcctctgaaggacagagaggacgaccagtacagccacctccagggcaatcagctgagaagaaac

SEQ ID NO: 6717 - DNA, 1233 bp, Artificial Sequence
  Synthetic Polynucloetide
atggccttaccagtgaccgccttgctcctgccgctggccttgctgctccacgccgccaggccgcagctccagctgcaagagtctggacctggcctggtcaagcctagcgagacactgagcctgacctgtaccgtgtccggcgatagcatcagcagcggcgattactactggggctggatcagacagcctcctggcaaaggactggaatggatcggccacatctactacagcggcgtgacctactacaaccccagcctgaagtccagagtgaccatcagcgtggacaccagccggaaccagttctccctgaagctgtctagcgtgacagccgccgataccgccgtgtactactgcaccagagaggacagcagcaactggcggagtagaggccagggaacactggtcacagttagctctctcgagagcggcggaggcggatctttccaggtgcagctggttgaatctggcggaggactggttcagcctggcggatctctgagactgtcttgtgccgccagcggcttcaccttcaccaatcacgccatgagctgggtccgacaggcccctggaaaaggactggaactggtgtctagcatcagcggcaacggcagaaccacctactacgccgatagcgtgaagggcagattcaccatcagccgggacatcagcaagaacaccctggacctccagatgaacagcctgagagccgaggataccgccgtgtactactgtgccaaggatggcggagagacactggtggatagcagaggccagggcacactggtcacagtgtcatctacgcgtcagagttttgggttgttggaccctaaattgtgctatctgttggacggaatcctgttcatttacggagtgatcctgaccgcattgttcctgcgggttaagttttccagatccgcagacgcacccgcttaccaacaagggcagaaccaactctacaatgaacttaatttggggcggagggaagagtacgacgttctggacaaaaggaggggacgagatcccgagatgggcggaaagcctcagcgaaggaagaatccgcaagaggggctttataacgaactccagaaagataaaatggcagaagcctatagtgagattgggatgaagggagaaaggaggaggggtaaaggtcacgatgggttgtaccaaggattgagcacagccactaaagatacctatgatgcgctccacatgcaggccctgccgccaaga

SEQ ID NO: 6718 - DNA, 1362 bp, Artificial Sequence
  Synthetic Polynucloetide
atggccttaccagtgaccgccttgctcctgccgctggccttgctgctccacgccgccaggccgcaggtgcagctggttgaatctggcggaggactggttcagcctggcggatctctgagactgtcttgtgccgccagcggcttcaccttcaccaatcacgccatgagctgggtccgacaggcccctggaaaaggactggaactggtgtctagcatcagcggcaacggcagaaccacctactacgccgatagcgtgaagggcagattcaccatcagccgggacatcagcaagaacaccctggacctccagatgaacagcctgagagccgaggataccgccgtgtactactgtgccaaggatggcggagagacactggtggatagcagaggccagggcacactggtcacagtgtcatctctcgagagcggcggaggcggatctttcgaacagctccagctgcaagagtctggacctggcctggtcaagcctagcgagacactgagcctgacctgtaccgtgtccggcgatagcatcagcagcggcgattactactggggctggatcagacagcctcctggcaaaggactggaatggatcggccacatctactacagcggcgtgacctactacaaccccagcctgaagtccagagtgaccatcagcgtggacaccagccggaaccagttctccctgaagctgtctagcgtgacagccgccgataccgccgtgtactactgcaccagagaggacagcagcaactggcggagtagaggccagggaacactggtcacagttagctctacgcgtgacggtaacgaggagatgggaggaatcactcaaaccccttacaaagtctcaatttcaggaacaactgttatccttacatgtccccagtatcctggcagcgagatcctttggcagcataacgacaagaatatagggggagatgaagacgataagaatatcggatctgacgaggatcacttgagcctgaaagagttctccgagcttgaacaaagcggatattatgtgtgctatccgcgcgggtcaaagccggaagacgctaacttttacctttatctccgagccagagtgtgcgaaaattgcatggaaatggacgttatgtccgttgctacaatagttatcgtagatatatgcatcacgggtggactgcttctgctggtttattattggtccaagaatagaaaggccaaagctaaacccgtgaccagaggcgctggcgcaggcggaaggcaaaggggacaaaacaaagaacggccaccaccagtgccaaatccagattatgagcctattcggaaaggacagagggacctgtactctggcctgaatcagagaagaatc

SEQ ID NO: 6719 - DNA, 1257 bp, Artificial Sequence
  Synthetic Polynucloetide
atggccttaccagtgaccgccttgctcctgccgctggccttgctgctccacgccgccaggccgcaggtgcagctggttgaatctggcggaggactggttcagcctggcggatctctgagactgtcttgtgccgccagcggcttcaccttcaccaatcacgccatgagctgggtccgacaggcccctggaaaaggactggaactggtgtctagcatcagcggcaacggcagaaccacctactacgccgatagcgtgaagggcagattcaccatcagccgggacatcagcaagaacaccctggacctccagatgaacagcctgagagccgaggataccgccgtgtactactgtgccaaggatggcggagagacactggtggatagcagaggccagggcacactggtcacagtgtcatctctcgagagcggcggaggcggatctttcgaacagctccagctgcaagagtctggacctggcctggtcaagcctagcgagacactgagcctgacctgtaccgtgtccggcgatagcatcagcagcggcgattactactggggctggatcagacagcctcctggcaaaggactggaatggatcggccacatctactacagcggcgtgacctactacaaccccagcctgaagtccagagtgaccatcagcgtggacaccagccggaaccagttctccctgaagctgtctagcgtgacagccgccgataccgccgtgtactactgcaccagagaggacagcagcaactggcggagtagaggccagggaacactggtcacagttagctctacgcgtttcaagatccccatcgaggaactggaagatcgggtgttcgtgaactgcaacacctctatcacctgggtggaaggcaccgtgggaacactgctgagcgacatcaccagactggacctcggcaagcggattctggaccctcggggcatctacagatgcaacggcaccgacatctacaaggacaaagaaagcaccgtgcaggtccactacagaatgtgccagtcctgcgtggaactggaccctgctacagtggccggcatcatcgtgaccgatgtgatcgctactctgctgctggctctgggagtgttctgcttcgccggacacgaaacaggcagactgtctggcgctgccgatacacaggccctgctgagaaacgaccaagtgtatcagcccctgcgcgacagagatgatgcccagtattctcacctcggcggcaactgggctagaaacaag

SEQ ID NO: 6720 - DNA, 1287 bp, Artificial Sequence
  Synthetic Polynucloetide
atggccttaccagtgaccgccttgctcctgccgctggccttgctgctccacgccgccaggccgcaggtgcagctggttgaatctggcggaggactggttcagcctggcggatctctgagactgtcttgtgccgccagcggcttcaccttcaccaatcacgccatgagctgggtccgacaggcccctggaaaaggactggaactggtgtctagcatcagcggcaacggcagaaccacctactacgccgatagcgtgaagggcagattcaccatcagccgggacatcagcaagaacaccctggacctccagatgaacagcctgagagccgaggataccgccgtgtactactgtgccaaggatggcggagagacactggtggatagcagaggccagggcacactggtcacagtgtcatctctcgagagcggcggaggcggatctttcgaacagctccagctgcaagagtctggacctggcctggtcaagcctagcgagacactgagcctgacctgtaccgtgtccggcgatagcatcagcagcggcgattactactggggctggatcagacagcctcctggcaaaggactggaatggatcggccacatctactacagcggcgtgacctactacaaccccagcctgaagtccagagtgaccatcagcgtggacaccagccggaaccagttctccctgaagctgtctagcgtgacagccgccgataccgccgtgtactactgcaccagagaggacagcagcaactggcggagtagaggccagggaacactggtcacagttagctctacgcgtcagagcatcaagggcaaccacctggtcaaggtgtacgactaccaagaggacggcagcgtgctgctgacatgtgatgccgaggccaagaacatcacctggtttaaggacggcaagatgatcggcttcctgaccgaggacaagaagaagtggaacctgggcagcaacgctaaggaccccagaggcatgtatcagtgcaagggcagccagaacaagagcaagcccctccaggtgtactaccggatgtgccagaactgcatcgagctgaacgccgctaccatcagcggctttctgttcgccgagatcgtgtccatcttcgtgctggccgtgggcgtgtactttatcgctggacaggatggcgtgcggcagagcagagcttccgataagcaaaccctgctgcctaacgaccagctgtaccagcctctgaaggacagagaggacgaccagtacagccacctccagggcaatcagctgagaagaaac

SEQ ID NO: 6721 - DNA, 1236 bp, Artificial Sequence
  Synthetic Polynucloetide
atggccttaccagtgaccgccttgctcctgccgctggccttgctgctccacgccgccaggccgcaggtgcagctggttgaatctggcggaggactggttcagcctggcggatctctgagactgtcttgtgccgccagcggcttcaccttcaccaatcacgccatgagctgggtccgacaggcccctggaaaaggactggaactggtgtctagcatcagcggcaacggcagaaccacctactacgccgatagcgtgaagggcagattcaccatcagccgggacatcagcaagaacaccctggacctccagatgaacagcctgagagccgaggataccgccgtgtactactgtgccaaggatggcggagagacactggtggatagcagaggccagggcacactggtcacagtgtcatctctcgagagcggcggaggcggatctttcgaacagctccagctgcaagagtctggacctggcctggtcaagcctagcgagacactgagcctgacctgtaccgtgtccggcgatagcatcagcagcggcgattactactggggctggatcagacagcctcctggcaaaggactggaatggatcggccacatctactacagcggcgtgacctactacaaccccagcctgaagtccagagtgaccatcagcgtggacaccagccggaaccagttctccctgaagctgtctagcgtgacagccgccgataccgccgtgtactactgcaccagagaggacagcagcaactggcggagtagaggccagggaacactggtcacagttagctctacgcgtcagagttttgggttgttggaccctaaattgtgctatctgttggacggaatcctgttcatttacggagtgatcctgaccgcattgttcctgcgggttaagttttccagatccgcagacgcacccgcttaccaacaagggcagaaccaactctacaatgaacttaatttggggcggagggaagagtacgacgttctggacaaaaggaggggacgagatcccgagatgggcggaaagcctcagcgaaggaagaatccgcaagaggggctttataacgaactccagaaagataaaatggcagaagcctatagtgagattgggatgaagggagaaaggaggaggggtaaaggtcacgatgggttgtaccaaggattgagcacagccactaaagatacctatgatgcgctccacatgcaggccctgccgccaaga

SEQ ID NO: 6722 - DNA, 1935 bp, Artificial Sequence
  Synthetic Polynucloetide
atggccttaccagtgaccgccttgctcctgccgctggccttgctgctccacgccgccaggccgcagctccagctgcaagagtctggacctggcctggtcaagcctagcgagacactgagcctgacctgtaccgtgtccggcgatagcatcagcagcggcgattactactggggctggatcagacagcctcctggcaaaggactggaatggatcggccacatctactacagcggcgtgacctactacaaccccagcctgaagtccagagtgaccatcagcgtggacaccagccggaaccagttctccctgaagctgtctagcgtgacagccgccgataccgccgtgtactactgcaccagagaggacagcagcaactggcggagtagaggccagggaacactggtcacagttagctctctcgagagcggcggaggcggatctttccaggtgcagctggttgaatctggcggaggactggttcagcctggcggatctctgagactgtcttgtgccgccagcggcttcaccttcaccaatcacgccatgagctgggtccgacaggcccctggaaaaggactggaactggtgtctagcatcagcggcaacggcagaaccacctactacgccgatagcgtgaagggcagattcaccatcagccgggacatcagcaagaacaccctggacctccagatgaacagcctgagagccgaggataccgccgtgtactactgtgccaaggatggcggagagacactggtggatagcagaggccagggcacactggtcacagtgtcatctacgcgtgggagcggcatccagaaccctgatcctgccgtgtaccagctgcgggatagcaagagcagcgacaagagcgtgtgtctgttcaccgacttcgacagccagaccaacgtgtcccagagcaaggactccgacgtgtacatcaccgataagaccgtgctggacatgcggagcatggacttcaagagcaactccgccgtggcctggtccaacaagtccgatttcgcctgcgccaacgccttcaacaacagcattatccccgaggacacattcttcccaagccccgagagcagctgcgacgtgaagctggtggaaaagagcttcgagacagacaccaacctgaacttccagaacctgagcgtgatcggcttcagaatcctgctgctgaaagtggccggctttaacctgctgatgaccctgcggctgtggtccagccgcgccaagagaagcggatctggcgtgaagcagaccctgaatttcgacctgctgaagctggctggcgacgtggaatccaacccaggcccttctagaggccatatgaccgagtacaagcccacggtgcgcctcgccacccgcgacgacgtccccagggccgtacgcaccctcgccgccgcgttcgccgactaccccgccacgcgccacaccgtcgatccggaccgccacatcgagcgggtcaccgagctgcaagaactcttcctcacgcgcgtcgggctcgacatcggcaaggtgtgggtcgcggacgacggcgccgcggtggcggtctggaccacgccggagagcgtcgaagcgggggcggtgttcgccgagatcggcccgcgcatggccgagttgagcggttcccggctggccgcgcagcaacagatggaaggcctcctggcgccgcaccggcccaaggagcccgcgtggttcctggccaccgtcggcgtctcgcccgaccaccagggcaagggtctgggcagcgccgtcgtgctccccggagtggaggcggccgagcgcgccggggtgcccgccttcctggagacctccgcgccccgcaacctccccttctacgagcggctcggcttcaccgtcaccgccgacgtcgaggtgcccgaaggaccgcgcacctggtgcatgacccgcaagcccggtgcctga

SEQ ID NO: 6723 - DNA, 2031 bp, Artificial Sequence
  Synthetic Polynucloetide
atggccttaccagtgaccgccttgctcctgccgctggccttgctgctccacgccgccaggccgcagctccagctgcaagagtctggacctggcctggtcaagcctagcgagacactgagcctgacctgtaccgtgtccggcgatagcatcagcagcggcgattactactggggctggatcagacagcctcctggcaaaggactggaatggatcggccacatctactacagcggcgtgacctactacaaccccagcctgaagtccagagtgaccatcagcgtggacaccagccggaaccagttctccctgaagctgtctagcgtgacagccgccgataccgccgtgtactactgcaccagagaggacagcagcaactggcggagtagaggccagggaacactggtcacagttagctctctcgagagcggcggaggcggatctttccaggtgcagctggttgaatctggcggaggactggttcagcctggcggatctctgagactgtcttgtgccgccagcggcttcaccttcaccaatcacgccatgagctgggtccgacaggcccctggaaaaggactggaactggtgtctagcatcagcggcaacggcagaaccacctactacgccgatagcgtgaagggcagattcaccatcagccgggacatcagcaagaacaccctggacctccagatgaacagcctgagagccgaggataccgccgtgtactactgtgccaaggatggcggagagacactggtggatagcagaggccagggcacactggtcacagtgtcatctctcgaggacctgaagaacgtgttcccacctgaggtggccgtgttcgagcctagcgaggccgagatcagccacacccagaaagccaccctcgtgtgcctggctaccggcttctaccccgaccatgtggaactgtcttggtgggtcaacggcaaagaggtgcacagcggcgtgtctaccgacccccagccactgaaagaacagcccgccctgaacgacagccggtactgcctgagcagcagactgagagtgtccgccaccttctggcagaacccccggaaccacttcagatgccaggtgcagttctacggcctgagcgagaacgacgagtggacccaggacagagccaagcccgtgacccagatcgtgtctgccgaagcctggggcagagccgattgcggctttaccagcgagagctaccagcagggcgtgctgagcgccaccatcctgtacgagatcctgctgggcaaggccaccctgtacgccgtgctggtgtctgccctggtgctgatggctatggtcaagcggaaggacagccggggaagggccaagcgatctggatctggagcaacaaacttctcactactcaaacaagcaggtgacgtggaggagaatcccgggcctactagaggccatatgaccgagtacaagcccacggtgcgcctcgccacccgcgacgacgtccccagggccgtacgcaccctcgccgccgcgttcgccgactaccccgccacgcgccacaccgtcgatccggaccgccacatcgagcgggtcaccgagctgcaagaactcttcctcacgcgcgtcgggctcgacatcggcaaggtgtgggtcgcggacgacggcgccgcggtggcggtctggaccacgccggagagcgtcgaagcgggggcggtgttcgccgagatcggcccgcgcatggccgagttgagcggttcccggctggccgcgcagcaacagatggaaggcctcctggcgccgcaccggcccaaggagcccgcgtggttcctggccaccgtcggcgtctcgcccgaccaccagggcaagggtctgggcagcgccgtcgtgctccccggagtggaggcggccgagcgcgccggggtgcccgccttcctggagacctccgcgccccgcaacctccccttctacgagcggctcggcttcaccgtcaccgccgacgtcgaggtgcccgaaggaccgcgcacctggtgcatgacccgcaagcccggtgcctga

SEQ ID NO: 6724 - DNA, 2181 bp, Artificial Sequence
  Synthetic Polynucloetide
atggccttaccagtgaccgccttgctcctgccgctggccttgctgctccacgccgccaggccgcagctccagctgcaagagtctggacctggcctggtcaagcctagcgagacactgagcctgacctgtaccgtgtccggcgatagcatcagcagcggcgattactactggggctggatcagacagcctcctggcaaaggactggaatggatcggccacatctactacagcggcgtgacctactacaaccccagcctgaagtccagagtgaccatcagcgtggacaccagccggaaccagttctccctgaagctgtctagcgtgacagccgccgataccgccgtgtactactgcaccagagaggacagcagcaactggcggagtagaggccagggaacactggtcacagttagctctctcgagagcggcggaggcggatctttccaggtgcagctggttgaatctggcggaggactggttcagcctggcggatctctgagactgtcttgtgccgccagcggcttcaccttcaccaatcacgccatgagctgggtccgacaggcccctggaaaaggactggaactggtgtctagcatcagcggcaacggcagaaccacctactacgccgatagcgtgaagggcagattcaccatcagccgggacatcagcaagaacaccctggacctccagatgaacagcctgagagccgaggataccgccgtgtactactgtgccaaggatggcggagagacactggtggatagcagaggccagggcacactggtcacagtgtcatctacgcgtgagcagaaactgatctcggaagaggatctggggagcggcaccccattcccttctctggcccctcccatcatgctgctggtggacggcaagcagcagatggtggtcgtgtgcctggtgctggatgtggccccacctggactggacagccccatctggtttagcgccggcaatggctctgccctggacgcctttacctacggcccaagccctgccaccgatggcacctggacaaatctggcccacctgagcctgcccagcgaggaactggcttcttgggagcctctcgtgtgccacacaggacctggcgctgagggacacagcagatccacccagcctatgcacctgtctggcgaggccagcaccgccagaacctgtcctcaggaacctctgagaggcacccctggcggagcactgtggctgggagtgctgagactgctgctgttcaagctgctgctgtttgacctgctgctgacctgctcctgtctgtgcgatcctgccggccctctgccttctcctgccaccaccacaagactgagagccctgggcagccacagactgcaccctgccacagagacaggcggcagagaggccacaagcagccctagaccccagcccagagacagaagatggggcgataccccccctggcagaaagcctggatctccagtccgcgccaagagaagcggatctggcgtgaagcagaccctgaatttcgacctgctgaagctggctggcgacgtggaatccaacccaggcccttctagatctagaggccatatgaccgagtacaagcccacggtgcgcctcgccacccgcgacgacgtccccagggccgtacgcaccctcgccgccgcgttcgccgactaccccgccacgcgccacaccgtcgatccggaccgccacatcgagcgggtcaccgagctgcaagaactcttcctcacgcgcgtcgggctcgacatcggcaaggtgtgggtcgcggacgacggcgccgcggtggcggtctggaccacgccggagagcgtcgaagcgggggcggtgttcgccgagatcggcccgcgcatggccgagttgagcggttcccggctggccgcgcagcaacagatggaaggcctcctggcgccgcaccggcccaaggagcccgcgtggttcctggccaccgtcggcgtctcgcccgaccaccagggcaagggtctgggcagcgccgtcgtgctccccggagtggaggcggccgagcgcgccggggtgcccgccttcctggagacctccgcgccccgcaacctccccttctacgagcggctcggcttcaccgtcaccgccgacgtcgaggtgcccgaaggaccgcgcacctggtgcatgacccgcaagcccggtgcctga

SEQ ID NO: 6725 - DNA, 1650 bp, Artificial Sequence; identical to SEQ ID NO: 6506
  Synthetic Polynucloetide

SEQ ID NO: 6726 - DNA, 957 bp, Artificial Sequence; identical to SEQ ID NO: 6507
  Synthetic Polynucloetide

SEQ ID NO: 6727 - DNA, 1341 bp, Artificial Sequence
  Synthetic Polynucloetide
atggactggatttggcgcatccttttccttgtcggcgctgctaccggcgcgcattccttccaggtgcagctggttgaatctggcggaggactggttcagcctggcggatctctgagactgtcttgtgccgccagcggcttcaccttcaccaatcacgccatgagctgggtccgacaggcccctggaaaaggactggaactggtgtctagcatcagcggcaacggcagaaccacctactacgccgatagcgtgaagggcagattcaccatcagccgggacatcagcaagaacaccctggacctccagatgaacagcctgagagccgaggataccgccgtgtactactgtgccaaggatggcggagagacactggtggatagcagaggccagggcacactggtcacagtgtcatctacgcgtatccagaaccctgatcctgccgtgtaccagctgcgggatagcaagagcagcgacaagagcgtgtgtctgttcaccgacttcgacagccagaccaacgtgtcccagagcaaggactccgacgtgtacatcaccgataagaccgtgctggacatgcggagcatggacttcaagagcaactccgccgtggcctggtccaacaagtccgatttcgcctgcgccaacgccttcaacaacagcattatccccgaggacacattcttcccaagccccgagagcagctgcgacgtgaagctggtggaaaagagcttcgagacagacaccaacctgaacttccagaacctgagcgtgatcggcttcagaatcctgctgctgaaagtggccggctttaacctgctgatgaccctgcggctgtggtccagccgcgccaagagaagcggatctggcgtgaagcagaccctgaatttcgacctgctgaagctggctggcgacgtggaatccaacccaggcccttctagaggccatatggccaagcctttgtctcaagaagaatccaccctcattgaaagagcaacggctacaatcaacagcatccccatctctgaagactacagcgtcgccagcgcagctctctctagcgacggccgcatcttcactggtgtcaatgtatatcattttactgggggaccttgtgcagaactcgtggtgctgggcactgctgctgctgcggcagctggcaacctgacttgtatcgtcgcgatcggaaatgagaacaggggcatcttgagcccctgcggacggtgccgacaggtgcttctcgatctgcatcctgggatcaaagccatagtgaaggacagtgatggacagccgacggcagttgggattcgtgaattgctgccctctggttatgtgtgggagggctga

SEQ ID NO: 6728 - DNA, 840 bp, Artificial Sequence
  Synthetic Polynucloetide
atggactggatttggcgcatccttttccttgtcggcgctgctaccggcgcgcattccttccaggtgcagctggttgaatctggcggaggactggttcagcctggcggatctctgagactgtcttgtgccgccagcggcttcaccttcaccaatcacgccatgagctgggtccgacaggcccctggaaaaggactggaactggtgtctagcatcagcggcaacggcagaaccacctactacgccgatagcgtgaagggcagattcaccatcagccgggacatcagcaagaacaccctggacctccagatgaacagcctgagagccgaggataccgccgtgtactactgtgccaaggatggcggagagacactggtggatagcagaggccagggcacactggtcacagtgtcatctacgcgtatccagaaccctgatcctgccgtgtaccagctgcgggatagcaagagcagcgacaagagcgtgtgtctgttcaccgacttcgacagccagaccaacgtgtcccagagcaaggactccgacgtgtacatcaccgataagaccgtgctggacatgcggagcatggacttcaagagcaactccgccgtggcctggtccaacaagtccgatttcgcctgcgccaacgccttcaacaacagcattatccccgaggacacattcttcccaagccccgagagcagctgcgacgtgaagctggtggaaaagagcttcgagacagacaccaacctgaacttccagaacctgagcgtgatcggcttcagaatcctgctgctgaaagtggccggctttaacctgctgatgaccctgcggctgtggtccagc

SEQ ID NO: 6729 - DNA, 1704 bp, Artificial Sequence; identical to SEQ ID NO: 6510
  Synthetic Polynucloetide

SEQ ID NO: 6730 - DNA, 1014 bp, Artificial Sequence; identical to SEQ ID NO: 6511
  Synthetic Polynucloetide

SEQ ID NO: 6731 - DNA, 1377 bp, Artificial Sequence
  Synthetic Polynucloetide
atggactggatttggcgcatccttttccttgtcggcgctgctaccggcgcgcattccttccaggtgcagctggttgaatctggcggaggactggttcagcctggcggatctctgagactgtcttgtgccgccagcggcttcaccttcaccaatcacgccatgagctgggtccgacaggcccctggaaaaggactggaactggtgtctagcatcagcggcaacggcagaaccacctactacgccgatagcgtgaagggcagattcaccatcagccgggacatcagcaagaacaccctggacctccagatgaacagcctgagagccgaggataccgccgtgtactactgtgccaaggatggcggagagacactggtggatagcagaggccagggcacactggtcacagtgtcatctacgcgtgagcagaaactgatctcggaagaggatgggagcggcatccagaaccctgatcctgccgtgtaccagctgcgggatagcaagagcagcgacaagagcgtgtgtctgttcaccgacttcgacagccagaccaacgtgtcccagagcaaggactccgacgtgtacatcaccgataagtgcgtgctggacatgcggagcatggacttcaagagcaactccgccgtggcctggtccaacaagtccgatttcgcctgcgccaacgccttcaacaacagcattatccccgaggacacattcttcccaagccccgagagcagctgcgacgtgaagctggtggaaaagagcttcgagacagacaccaacctgaacttccagaacctgagcgtgatcggcttcagaatcctgctgctgaaagtggccggctttaacctgctgatgaccctgcggctgtggtccagccgcgccaagagaagcggatctggcgtgaagcagaccctgaatttcgacctgctgaagctggctggcgacgtggaatccaacccaggcccttctagaggccatatggccaagcctttgtctcaagaagaatccaccctcattgaaagagcaacggctacaatcaacagcatccccatctctgaagactacagcgtcgccagcgcagctctctctagcgacggccgcatcttcactggtgtcaatgtatatcattttactgggggaccttgtgcagaactcgtggtgctgggcactgctgctgctgcggcagctggcaacctgacttgtatcgtcgcgatcggaaatgagaacaggggcatcttgagcccctgcggacggtgccgacaggtgcttctcgatctgcatcctgggatcaaagccatagtgaaggacagtgatggacagccgacggcagttgggattcgtgaattgctgccctctggttatgtgtgggagggctga

SEQ ID NO: 6732 - DNA, 879 bp, Artificial Sequence
  Synthetic Polynucloetide
atggactggatttggcgcatccttttccttgtcggcgctgctaccggcgcgcattccttccaggtgcagctggttgaatctggcggaggactggttcagcctggcggatctctgagactgtcttgtgccgccagcggcttcaccttcaccaatcacgccatgagctgggtccgacaggcccctggaaaaggactggaactggtgtctagcatcagcggcaacggcagaaccacctactacgccgatagcgtgaagggcagattcaccatcagccgggacatcagcaagaacaccctggacctccagatgaacagcctgagagccgaggataccgccgtgtactactgtgccaaggatggcggagagacactggtggatagcagaggccagggcacactggtcacagtgtcatctacgcgtgagcagaaactgatctcggaagaggatgggagcggcatccagaaccctgatcctgccgtgtaccagctgcgggatagcaagagcagcgacaagagcgtgtgtctgttcaccgacttcgacagccagaccaacgtgtcccagagcaaggactccgacgtgtacatcaccgataagtgcgtgctggacatgcggagcatggacttcaagagcaactccgccgtggcctggtccaacaagtccgatttcgcctgcgccaacgccttcaacaacagcattatccccgaggacacattcttcccaagccccgagagcagctgcgacgtgaagctggtggaaaagagcttcgagacagacaccaacctgaacttccagaacctgagcgtgatcggcttcagaatcctgctgctgaaagtggccggctttaacctgctgatgaccctgcggctgtggtccagctga

SEQ ID NO: 6733 - DNA, 1935 bp, Artificial Sequence
  Synthetic Polynucloetide
atggccttaccagtgaccgccttgctcctgccgctggccttgctgctccacgccgccaggccgcagctccagctgcaagagtctggacctggcctggtcaagcctagcgagacactgagcctgacctgtaccgtgtccggcgatagcatcagcagcggcgattactactggggctggatcagacagcctcctggcaaaggactggaatggatcggccacatctactacagcggcgtgacctactacaaccccagcctgaagtccagagtgaccatcagcgtggacaccagccggaaccagttctccctgaagctgtctagcgtgacagccgccgataccgccgtgtactactgcaccagagaggacagcagcaactggcggagtagaggccagggaacactggtcacagttagctctctcgagagcggcggaggcggatctttccaggtgcagctggttgaatctggcggaggactggttcagcctggcggatctctgagactgtcttgtgccgccagcggcttcaccttcaccaatcacgccatgagctgggtccgacaggcccctggaaaaggactggaactggtgtctagcatcagcggcaacggcagaaccacctactacgccgatagcgtgaagggcagattcaccatcagccgggacatcagcaagaacaccctggacctccagatgaacagcctgagagccgaggataccgccgtgtactactgtgccaaggatggcggagagacactggtggatagcagaggccagggcacactggtcacagtgtcatctacgcgtgggagcggcatccagaaccctgatcctgccgtgtaccagctgcgggatagcaagagcagcgacaagagcgtgtgtctgttcaccgacttcgacagccagaccaacgtgtcccagagcaaggactccgacgtgtacatcaccgataagaccgtgctggacatgcggagcatggacttcaagagcaactccgccgtggcctggtccaacaagtccgatttcgcctgcgccaacgccttcaacaacagcattatccccgaggacacattcttcccaagcagcgacgtgccctgcgacgtgaagctggtggaaaagagcttcgagacagacaccaacctgaacttccagaacctgagcgtgatcggcttcagaatcctgctgctgaaagtggccggctttaacctgctgatgaccctgcggctgtggtccagccgcgccaagagaagcggatctggcgtgaagcagaccctgaatttcgacctgctgaagctggctggcgacgtggaatccaacccaggcccttctagaggccatatgaccgagtacaagcccacggtgcgcctcgccacccgcgacgacgtccccagggccgtacgcaccctcgccgccgcgttcgccgactaccccgccacgcgccacaccgtcgatccggaccgccacatcgagcgggtcaccgagctgcaagaactcttcctcacgcgcgtcgggctcgacatcggcaaggtgtgggtcgcggacgacggcgccgcggtggcggtctggaccacgccggagagcgtcgaagcgggggcggtgttcgccgagatcggcccgcgcatggccgagttgagcggttcccggctggccgcgcagcaacagatggaaggcctcctggcgccgcaccggcccaaggagcccgcgtggttcctggccaccgtcggcgtctcgcccgaccaccagggcaagggtctgggcagcgccgtcgtgctccccggagtggaggcggccgagcgcgccggggtgcccgccttcctggagacctccgcgccccgcaacctccccttctacgagcggctcggcttcaccgtcaccgccgacgtcgaggtgcccgaaggaccgcgcacctggtgcatgacccgcaagcccggtgcctga

SEQ ID NO: 6734 - DNA, 2031 bp, Artificial Sequence
  Synthetic Polynucloetide
atggccttaccagtgaccgccttgctcctgccgctggccttgctgctccacgccgccaggccgcagctccagctgcaagagtctggacctggcctggtcaagcctagcgagacactgagcctgacctgtaccgtgtccggcgatagcatcagcagcggcgattactactggggctggatcagacagcctcctggcaaaggactggaatggatcggccacatctactacagcggcgtgacctactacaaccccagcctgaagtccagagtgaccatcagcgtggacaccagccggaaccagttctccctgaagctgtctagcgtgacagccgccgataccgccgtgtactactgcaccagagaggacagcagcaactggcggagtagaggccagggaacactggtcacagttagctctctcgagagcggcggaggcggatctttccaggtgcagctggttgaatctggcggaggactggttcagcctggcggatctctgagactgtcttgtgccgccagcggcttcaccttcaccaatcacgccatgagctgggtccgacaggcccctggaaaaggactggaactggtgtctagcatcagcggcaacggcagaaccacctactacgccgatagcgtgaagggcagattcaccatcagccgggacatcagcaagaacaccctggacctccagatgaacagcctgagagccgaggataccgccgtgtactactgtgccaaggatggcggagagacactggtggatagcagaggccagggcacactggtcacagtgtcatctctcgaggacctgaagaacgtgttcccacctgaggtggccgtgttcgagcctagcaaggccgagatcgcccacacccagaaagccaccctcgtgtgcctggctaccggcttctaccccgaccatgtggaactgtcttggtgggtcaacggcaaagaggtgcacagcggcgtgtctaccgacccccagccactgaaagaacagcccgccctgaacgacagccggtactgcctgagcagcagactgagagtgtccgccaccttctggcagaacccccggaaccacttcagatgccaggtgcagttctacggcctgagcgagaacgacgagtggacccaggacagagccaagcccgtgacccagatcgtgtctgccgaagcctggggcagagccgattgcggcatcaccagcgccagctaccaccagggcgtgctgagcgccaccatcctgtacgagatcctgctgggcaaggccaccctgtacgccgtgctggtgtctgccctggtgctgatggctatggtcaagcggaaggacagccggggaagggccaagcgatctggatctggagcaacaaacttctcactactcaaacaagcaggtgacgtggaggagaatcccgggcctactagaggccatatgaccgagtacaagcccacggtgcgcctcgccacccgcgacgacgtccccagggccgtacgcaccctcgccgccgcgttcgccgactaccccgccacgcgccacaccgtcgatccggaccgccacatcgagcgggtcaccgagctgcaagaactcttcctcacgcgcgtcgggctcgacatcggcaaggtgtgggtcgcggacgacggcgccgcggtggcggtctggaccacgccggagagcgtcgaagcgggggcggtgttcgccgagatcggcccgcgcatggccgagttgagcggttcccggctggccgcgcagcaacagatggaaggcctcctggcgccgcaccggcccaaggagcccgcgtggttcctggccaccgtcggcgtctcgcccgaccaccagggcaagggtctgggcagcgccgtcgtgctccccggagtggaggcggccgagcgcgccggggtgcccgccttcctggagacctccgcgccccgcaacctccccttctacgagcggctcggcttcaccgtcaccgccgacgtcgaggtgcccgaaggaccgcgcacctggtgcatgacccgcaagcccggtgcctga

SEQ ID NO: 6735 - DNA, 2100 bp, Artificial Sequence
  Synthetic Polynucloetide
atggccttaccagtgaccgccttgctcctgccgctggccttgctgctccacgccgccaggccgcagctccagctgcaagagtctggacctggcctggtcaagcctagcgagacactgagcctgacctgtaccgtgtccggcgatagcatcagcagcggcgattactactggggctggatcagacagcctcctggcaaaggactggaatggatcggccacatctactacagcggcgtgacctactacaaccccagcctgaagtccagagtgaccatcagcgtggacaccagccggaaccagttctccctgaagctgtctagcgtgacagccgccgataccgccgtgtactactgcaccagagaggacagcagcaactggcggagtagaggccagggaacactggtcacagttagctctctcgagagcggcggaggcggatctttccaggtgcagctggttgaatctggcggaggactggttcagcctggcggatctctgagactgtcttgtgccgccagcggcttcaccttcaccaatcacgccatgagctgggtccgacaggcccctggaaaaggactggaactggtgtctagcatcagcggcaacggcagaaccacctactacgccgatagcgtgaagggcagattcaccatcagccgggacatcagcaagaacaccctggacctccagatgaacagcctgagagccgaggataccgccgtgtactactgtgccaaggatggcggagagacactggtggatagcagaggccagggcacactggtcacagtgtcatctacgcgtgggtctggaggcggaggcagcggcggaggcgggagcggcgacggtaacgaggagatgggaggaatcactcaaaccccttacaaagtctcaatttcaggaacaactgttatccttacatgtccccagtatcctggcagcgagatcctttggcagcataacgacaagaatatagggggagatgaagacgataagaatatcggatctgacgaggatcacttgagcctgaaagagttctccgagcttgaacaaagcggatattatgtgtgctatccgcgcgggtcaaagccggaagacgctaacttttacctttatctccgagccagagtgtgcgaaaattgcatggaaatggacgttatgtccgttgctacaatagttatcgtagatatatgcatcacgggtggactgcttctgctggtttattattggtccaagaatagaaaggccaaagctaaacccgtgaccagaggcgctggcgcaggcggaaggcaaaggggacaaaacaaagaacggccaccaccagtgccaaatccagattatgagcctattcggaaaggacagagggacctgtactctggcctgaatcagagaagaatccgcgccaagagaagcggatctggcgtgaagcagaccctgaatttcgacctgctgaagctggctggcgacgtggaatccaacccaggcccttctagaggccatatgaccgagtacaagcccacggtgcgcctcgccacccgcgacgacgtccccagggccgtacgcaccctcgccgccgcgttcgccgactaccccgccacgcgccacaccgtcgatccggaccgccacatcgagcgggtcaccgagctgcaagaactcttcctcacgcgcgtcgggctcgacatcggcaaggtgtgggtcgcggacgacggcgccgcggtggcggtctggaccacgccggagagcgtcgaagcgggggcggtgttcgccgagatcggcccgcgcatggccgagttgagcggttcccggctggccgcgcagcaacagatggaaggcctcctggcgccgcaccggcccaaggagcccgcgtggttcctggccaccgtcggcgtctcgcccgaccaccagggcaagggtctgggcagcgccgtcgtgctccccggagtggaggcggccgagcgcgccggggtgcccgccttcctggagacctccgcgccccgcaacctccccttctacgagcggctcggcttcaccgtcaccgccgacgtcgaggtgcccgaaggaccgcgcacctggtgcatgacccgcaagcccggtgcctga

SEQ ID NO: 6736 - DNA, 1995 bp, Artificial Sequence
  Synthetic Polynucloetide
atggccttaccagtgaccgccttgctcctgccgctggccttgctgctccacgccgccaggccgcagctccagctgcaagagtctggacctggcctggtcaagcctagcgagacactgagcctgacctgtaccgtgtccggcgatagcatcagcagcggcgattactactggggctggatcagacagcctcctggcaaaggactggaatggatcggccacatctactacagcggcgtgacctactacaaccccagcctgaagtccagagtgaccatcagcgtggacaccagccggaaccagttctccctgaagctgtctagcgtgacagccgccgataccgccgtgtactactgcaccagagaggacagcagcaactggcggagtagaggccagggaacactggtcacagttagctctctcgagagcggcggaggcggatctttccaggtgcagctggttgaatctggcggaggactggttcagcctggcggatctctgagactgtcttgtgccgccagcggcttcaccttcaccaatcacgccatgagctgggtccgacaggcccctggaaaaggactggaactggtgtctagcatcagcggcaacggcagaaccacctactacgccgatagcgtgaagggcagattcaccatcagccgggacatcagcaagaacaccctggacctccagatgaacagcctgagagccgaggataccgccgtgtactactgtgccaaggatggcggagagacactggtggatagcagaggccagggcacactggtcacagtgtcatctacgcgtgggtctggaggcggaggcagcggcggaggcgggagcggcttcaagatccccatcgaggaactggaagatcgggtgttcgtgaactgcaacacctctatcacctgggtggaaggcaccgtgggaacactgctgagcgacatcaccagactggacctcggcaagcggattctggaccctcggggcatctacagatgcaacggcaccgacatctacaaggacaaagaaagcaccgtgcaggtccactacagaatgtgccagtcctgcgtggaactggaccctgctacagtggccggcatcatcgtgaccgatgtgatcgctactctgctgctggctctgggagtgttctgcttcgccggacacgaaacaggcagactgtctggcgctgccgatacacaggccctgctgagaaacgaccaagtgtatcagcccctgcgcgacagagatgatgcccagtattctcacctcggcggcaactgggctagaaacaagcgcgccaagagaagcggatctggcgtgaagcagaccctgaatttcgacctgctgaagctggctggcgacgtggaatccaacccaggcccttctagaggccatatgaccgagtacaagcccacggtgcgcctcgccacccgcgacgacgtccccagggccgtacgcaccctcgccgccgcgttcgccgactaccccgccacgcgccacaccgtcgatccggaccgccacatcgagcgggtcaccgagctgcaagaactcttcctcacgcgcgtcgggctcgacatcggcaaggtgtgggtcgcggacgacggcgccgcggtggcggtctggaccacgccggagagcgtcgaagcgggggcggtgttcgccgagatcggcccgcgcatggccgagttgagcggttcccggctggccgcgcagcaacagatggaaggcctcctggcgccgcaccggcccaaggagcccgcgtggttcctggccaccgtcggcgtctcgcccgaccaccagggcaagggtctgggcagcgccgtcgtgctccccggagtggaggcggccgagcgcgccggggtgcccgccttcctggagacctccgcgccccgcaacctccccttctacgagcggctcggcttcaccgtcaccgccgacgtcgaggtgcccgaaggaccgcgcacctggtgcatgacccgcaagcccggtgcctga

SEQ ID NO: 6737 - DNA, 2025 bp, Artificial Sequence
  Synthetic Polynucloetide
atggccttaccagtgaccgccttgctcctgccgctggccttgctgctccacgccgccaggccgcagctccagctgcaagagtctggacctggcctggtcaagcctagcgagacactgagcctgacctgtaccgtgtccggcgatagcatcagcagcggcgattactactggggctggatcagacagcctcctggcaaaggactggaatggatcggccacatctactacagcggcgtgacctactacaaccccagcctgaagtccagagtgaccatcagcgtggacaccagccggaaccagttctccctgaagctgtctagcgtgacagccgccgataccgccgtgtactactgcaccagagaggacagcagcaactggcggagtagaggccagggaacactggtcacagttagctctctcgagagcggcggaggcggatctttccaggtgcagctggttgaatctggcggaggactggttcagcctggcggatctctgagactgtcttgtgccgccagcggcttcaccttcaccaatcacgccatgagctgggtccgacaggcccctggaaaaggactggaactggtgtctagcatcagcggcaacggcagaaccacctactacgccgatagcgtgaagggcagattcaccatcagccgggacatcagcaagaacaccctggacctccagatgaacagcctgagagccgaggataccgccgtgtactactgtgccaaggatggcggagagacactggtggatagcagaggccagggcacactggtcacagtgtcatctacgcgtgggtctggaggcggaggcagcggcggaggcgggagcggccagagcatcaagggcaaccacctggtcaaggtgtacgactaccaagaggacggcagcgtgctgctgacatgtgatgccgaggccaagaacatcacctggtttaaggacggcaagatgatcggcttcctgaccgaggacaagaagaagtggaacctgggcagcaacgctaaggaccccagaggcatgtatcagtgcaagggcagccagaacaagagcaagcccctccaggtgtactaccggatgtgccagaactgcatcgagctgaacgccgctaccatcagcggctttctgttcgccgagatcgtgtccatcttcgtgctggccgtgggcgtgtactttatcgctggacaggatggcgtgcggcagagcagagcttccgataagcaaaccctgctgcctaacgaccagctgtaccagcctctgaaggacagagaggacgaccagtacagccacctccagggcaatcagctgagaagaaaccgcgccaagagaagcggatctggcgtgaagcagaccctgaatttcgacctgctgaagctggctggcgacgtggaatccaacccaggcccttctagaggccatatgaccgagtacaagcccacggtgcgcctcgccacccgcgacgacgtccccagggccgtacgcaccctcgccgccgcgttcgccgactaccccgccacgcgccacaccgtcgatccggaccgccacatcgagcgggtcaccgagctgcaagaactcttcctcacgcgcgtcgggctcgacatcggcaaggtgtgggtcgcggacgacggcgccgcggtggcggtctggaccacgccggagagcgtcgaagcgggggcggtgttcgccgagatcggcccgcgcatggccgagttgagcggttcccggctggccgcgcagcaacagatggaaggcctcctggcgccgcaccggcccaaggagcccgcgtggttcctggccaccgtcggcgtctcgcccgaccaccagggcaagggtctgggcagcgccgtcgtgctccccggagtggaggcggccgagcgcgccggggtgcccgccttcctggagacctccgcgccccgcaacctccccttctacgagcggctcggcttcaccgtcaccgccgacgtcgaggtgcccgaaggaccgcgcacctggtgcatgacccgcaagcccggtgcctga

SEQ ID NO: 6738 - DNA, 1974 bp, Artificial Sequence
  Synthetic Polynucloetide
atggccttaccagtgaccgccttgctcctgccgctggccttgctgctccacgccgccaggccgcagctccagctgcaagagtctggacctggcctggtcaagcctagcgagacactgagcctgacctgtaccgtgtccggcgatagcatcagcagcggcgattactactggggctggatcagacagcctcctggcaaaggactggaatggatcggccacatctactacagcggcgtgacctactacaaccccagcctgaagtccagagtgaccatcagcgtggacaccagccggaaccagttctccctgaagctgtctagcgtgacagccgccgataccgccgtgtactactgcaccagagaggacagcagcaactggcggagtagaggccagggaacactggtcacagttagctctctcgagagcggcggaggcggatctttccaggtgcagctggttgaatctggcggaggactggttcagcctggcggatctctgagactgtcttgtgccgccagcggcttcaccttcaccaatcacgccatgagctgggtccgacaggcccctggaaaaggactggaactggtgtctagcatcagcggcaacggcagaaccacctactacgccgatagcgtgaagggcagattcaccatcagccgggacatcagcaagaacaccctggacctccagatgaacagcctgagagccgaggataccgccgtgtactactgtgccaaggatggcggagagacactggtggatagcagaggccagggcacactggtcacagtgtcatctacgcgtgggtctggaggcggaggcagcggcggaggcgggagcggccagagttttgggttgttggaccctaaattgtgctatctgttggacggaatcctgttcatttacggagtgatcctgaccgcattgttcctgcgggttaagttttccagatccgcagacgcacccgcttaccaacaagggcagaaccaactctacaatgaacttaatttggggcggagggaagagtacgacgttctggacaaaaggaggggacgagatcccgagatgggcggaaagcctcagcgaaggaagaatccgcaagaggggctttataacgaactccagaaagataaaatggcagaagcctatagtgagattgggatgaagggagaaaggaggaggggtaaaggtcacgatgggttgtaccaaggattgagcacagccactaaagatacctatgatgcgctccacatgcaggccctgccgccaagacgcgccaagagaagcggatctggcgtgaagcagaccctgaatttcgacctgctgaagctggctggcgacgtggaatccaacccaggcccttctagaggccatatgaccgagtacaagcccacggtgcgcctcgccacccgcgacgacgtccccagggccgtacgcaccctcgccgccgcgttcgccgactaccccgccacgcgccacaccgtcgatccggaccgccacatcgagcgggtcaccgagctgcaagaactcttcctcacgcgcgtcgggctcgacatcggcaaggtgtgggtcgcggacgacggcgccgcggtggcggtctggaccacgccggagagcgtcgaagcgggggcggtgttcgccgagatcggcccgcgcatggccgagttgagcggttcccggctggccgcgcagcaacagatggaaggcctcctggcgccgcaccggcccaaggagcccgcgtggttcctggccaccgtcggcgtctcgcccgaccaccagggcaagggtctgggcagcgccgtcgtgctccccggagtggaggcggccgagcgcgccggggtgcccgccttcctggagacctccgcgccccgcaacctccccttctacgagcggctcggcttcaccgtcaccgccgacgtcgaggtgcccgaaggaccgcgcacctggtgcatgacccgcaagcccggtgcctga

SEQ ID NO: 6739 - DNA, 2598 bp, Artificial Sequence
  Synthetic Polynucloetide
atggccttaccagtgaccgccttgctcctgccgctggccttgctgctccacgccgccaggccgcagctccagctgcaagagtctggacctggcctggtcaagcctagcgagacactgagcctgacctgtaccgtgtccggcgatagcatcagcagcggcgattactactggggctggatcagacagcctcctggcaaaggactggaatggatcggccacatctactacagcggcgtgacctactacaaccccagcctgaagtccagagtgaccatcagcgtggacaccagccggaaccagttctccctgaagctgtctagcgtgacagccgccgataccgccgtgtactactgcaccagagaggacagcagcaactggcggagtagaggccagggaacactggtcacagttagctctctcgagggacagcctaaggccaatcctaccgtgacactgttccctccaagcagcgaagaactccaggccaacaaggccacacttgtgtgcctgatctccgacttctaccctggggctgtgacagtggcttggaaggccgatggatctcctgtgaaagccggcgtggaaaccaccaagccatccaagcagagcaacaacaaatacgccgccagctcctacctgagcctgacacctgagcagtggaagtcccacagatcctacagctgccaagtgacccacgaaggcagcaccgtggaaaagacagtggcccctacagagtgcagcggcagagccgattgcggctttaccagcgagagctaccagcagggcgtgctgagcgccaccatcctgtacgagatcctgctgggcaaggccaccctgtacgccgtgctggtgtctgccctggtgctgatggctatggtcaagcggaaggacagccggggaagggccaagcgatctggatctggagcaacaaacttctcactactcaaacaagcaggtgacgtggaggagaatcccgggcctactagtatggactggatttggcgcatccttttccttgtcggcgctgctaccggcgcgcattccttccaggtgcagctggttgaatctggcggaggactggttcagcctggcggatctctgagactgtcttgtgccgccagcggcttcaccttcaccaatcacgccatgagctgggtccgacaggcccctggaaaaggactggaactggtgtctagcatcagcggcaacggcagaaccacctactacgccgatagcgtgaagggcagattcaccatcagccgggacatcagcaagaacaccctggacctccagatgaacagcctgagagccgaggataccgccgtgtactactgtgccaaggatggcggagagacactggtggatagcagaggccagggcacactggtcacagtgtcatctacgcgtgcctctacaaagggaccctccgtgtttcctctggctcccagcagcaagtctacaagcggaggaacagccgctctgggctgcctggtcaaggattactttcccgagcctgtgaccgtgtcctggaatagcggagcactgacaagcggcgtgcacacctttccagccgtgctgcaaagcagcggcctgtactctctgagcagcgtggtcacagtgcctagctctagcctgggcacccagacctacatctgcaatgtgaaccacaagcctagcaacaccaaggtggacaagagagtggaacccaagagctgtatccccgaggacacattcttcccaagccccgagagcagctgcgacgtgaagctggtggaaaagagcttcgagacagacaccaacctgaacttccagaacctgagcgtgatcggcttcagaatcctgctgctgaaagtggccggctttaacctgctgatgaccctgcggctgtggtccagccgcgccaagagaagcggatctggcgtgaagcagaccctgaatttcgacctgctgaagctggctggcgacgtggaatccaacccaggcccttctagaggccatatgaccgagtacaagcccacggtgcgcctcgccacccgcgacgacgtccccagggccgtacgcaccctcgccgccgcgttcgccgactaccccgccacgcgccacaccgtcgatccggaccgccacatcgagcgggtcaccgagctgcaagaactcttcctcacgcgcgtcgggctcgacatcggcaaggtgtgggtcgcggacgacggcgccgcggtggcggtctggaccacgccggagagcgtcgaagcgggggcggtgttcgccgagatcggcccgcgcatggccgagttgagcggttcccggctggccgcgcagcaacagatggaaggcctcctggcgccgcaccggcccaaggagcccgcgtggttcctggccaccgtcggcgtctcgcccgaccaccagggcaagggtctgggcagcgccgtcgtgctccccggagtggaggcggccgagcgcgccggggtgcccgccttcctggagacctccgcgccccgcaacctccccttctacgagcggctcggcttcaccgtcaccgccgacgtcgaggtgcccgaaggaccgcgcacctggtgcatgacccgcaagcccggtgcctga

SEQ ID NO: 6740 - DNA, 1896 bp, Artificial Sequence; identical to SEQ ID NO: 6713
  Synthetic Polynucloetide

SEQ ID NO: 6741 - DNA, 1983 bp, Artificial Sequence
  Synthetic Polynucloetide
atggccttaccagtgaccgccttgctcctgccgctggccttgctgctccacgccgccaggccgcagctccagctgcaagagtctggacctggcctggtcaagcctagcgagacactgagcctgacctgtaccgtgtccggcgatagcatcagcagcggcgattactactggggctggatcagacagcctcctggcaaaggactggaatggatcggccacatctactacagcggcgtgacctactacaaccccagcctgaagtccagagtgaccatcagcgtggacaccagccggaaccagttctccctgaagctgtctagcgtgacagccgccgataccgccgtgtactactgcaccagagaggacagcagcaactggcggagtagaggccagggaacactggtcacagttagctctctcgagggatctggcagagccgattgcggctttaccagcgagagctaccagcagggcgtgctgagcgccaccatcctgtacgagatcctgctgggcaaggccaccctgtacgccgtgctggtgtctgccctggtgctgatggctatggtcaagcggaaggacagccggggaagggccaagcgatctggatctggagcaacaaacttctcactactcaaacaagcaggtgacgtggaggagaatcccgggcctactagtatggactggatttggcgcatccttttccttgtcggcgctgctaccggcgcgcattccttccaggtgcagctggttgaatctggcggaggactggttcagcctggcggatctctgagactgtcttgtgccgccagcggcttcaccttcaccaatcacgccatgagctgggtccgacaggcccctggaaaaggactggaactggtgtctagcatcagcggcaacggcagaaccacctactacgccgatagcgtgaagggcagattcaccatcagccgggacatcagcaagaacaccctggacctccagatgaacagcctgagagccgaggataccgccgtgtactactgtgccaaggatggcggagagacactggtggatagcagaggccagggcacactggtcacagtgtcatctacgcgtggcagcatccccgaggacacattcttcccaagccccgagagcagctgcgacgtgaagctggtggaaaagagcttcgagacagacaccaacctgaacttccagaacctgagcgtgatcggcttcagaatcctgctgctgaaagtggccggctttaacctgctgatgaccctgcggctgtggtccagccgcgccaagagaagcggatctggcgtgaagcagaccctgaatttcgacctgctgaagctggctggcgacgtggaatccaacccaggcccttctagaggccatatgaccgagtacaagcccacggtgcgcctcgccacccgcgacgacgtccccagggccgtacgcaccctcgccgccgcgttcgccgactaccccgccacgcgccacaccgtcgatccggaccgccacatcgagcgggtcaccgagctgcaagaactcttcctcacgcgcgtcgggctcgacatcggcaaggtgtgggtcgcggacgacggcgccgcggtggcggtctggaccacgccggagagcgtcgaagcgggggcggtgttcgccgagatcggcccgcgcatggccgagttgagcggttcccggctggccgcgcagcaacagatggaaggcctcctggcgccgcaccggcccaaggagcccgcgtggttcctggccaccgtcggcgtctcgcccgaccaccagggcaagggtctgggcagcgccgtcgtgctccccggagtggaggcggccgagcgcgccggggtgcccgccttcctggagacctccgcgccccgcaacctccccttctacgagcggctcggcttcaccgtcaccgccgacgtcgaggtgcccgaaggaccgcgcacctggtgcatgacccgcaagcccggtgcctga

SEQ ID NO: 6742 - DNA, 1281 bp, Artificial Sequence
  Synthetic Polynucloetide
atggccttaccagtgaccgccttgctcctgccgctggccttgctgctccacgccgccaggccgcagctccagctgcaagagtctggacctggcctggtcaagcctagcgagacactgagcctgacctgtaccgtgtccggcgatagcatcagcagcggcgattactactggggctggatcagacagcctcctggcaaaggactggaatggatcggccacatctactacagcggcgtgacctactacaaccccagcctgaagtccagagtgaccatcagcgtggacaccagccggaaccagttctccctgaagctgtctagcgtgacagccgccgataccgccgtgtactactgcaccagagaggacagcagcaactggcggagtagaggccagggaacactggtcacagttagctctctcgagggatctggcagagccgattgcggctttaccagcgagagctaccagcagggcgtgctgagcgccaccatcctgtacgagatcctgctgggcaaggccaccctgtacgccgtgctggtgtctgccctggtgctgatggctatggtcaagcggaaggacagccggggaagggccaagcgatctggatctggagcaacaaacttctcactactcaaacaagcaggtgacgtggaggagaatcccgggcctactagtatggactggatttggcgcatccttttccttgtcggcgctgctaccggcgcgcattccttccaggtgcagctggttgaatctggcggaggactggttcagcctggcggatctctgagactgtcttgtgccgccagcggcttcaccttcaccaatcacgccatgagctgggtccgacaggcccctggaaaaggactggaactggtgtctagcatcagcggcaacggcagaaccacctactacgccgatagcgtgaagggcagattcaccatcagccgggacatcagcaagaacaccctggacctccagatgaacagcctgagagccgaggataccgccgtgtactactgtgccaaggatggcggagagacactggtggatagcagaggccagggcacactggtcacagtgtcatctacgcgtggcagcatccccgaggacacattcttcccaagccccgagagcagctgcgacgtgaagctggtggaaaagagcttcgagacagacaccaacctgaacttccagaacctgagcgtgatcggcttcagaatcctgctgctgaaagtggccggctttaacctgctgatgaccctgcggctgtggtccagc

SEQ ID NO: 6743 - DNA, 2010 bp, Artificial Sequence
  Synthetic Polynucloetide
atggccttaccagtgaccgccttgctcctgccgctggccttgctgctccacgccgccaggccgcagctccagctgcaagagtctggacctggcctggtcaagcctagcgagacactgagcctgacctgtaccgtgtccggcgatagcatcagcagcggcgattactactggggctggatcagacagcctcctggcaaaggactggaatggatcggccacatctactacagcggcgtgacctactacaaccccagcctgaagtccagagtgaccatcagcgtggacaccagccggaaccagttctccctgaagctgtctagcgtgacagccgccgataccgccgtgtactactgcaccagagaggacagcagcaactggcggagtagaggccagggaacactggtcacagttagctctctcgaggacaaaactcacacatgcccaccgtgcccagcaggcagagccgattgcggctttaccagcgagagctaccagcagggcgtgctgagcgccaccatcctgtacgagatcctgctgggcaaggccaccctgtacgccgtgctggtgtctgccctggtgctgatggctatggtcaagcggaaggacagccggggaagggccaagcgatctggatctggagcaacaaacttctcactactcaaacaagcaggtgacgtggaggagaatcccgggcctactagtatggactggatttggcgcatccttttccttgtcggcgctgctaccggcgcgcattccttccaggtgcagctggttgaatctggcggaggactggttcagcctggcggatctctgagactgtcttgtgccgccagcggcttcaccttcaccaatcacgccatgagctgggtccgacaggcccctggaaaaggactggaactggtgtctagcatcagcggcaacggcagaaccacctactacgccgatagcgtgaagggcagattcaccatcagccgggacatcagcaagaacaccctggacctccagatgaacagcctgagagccgaggataccgccgtgtactactgtgccaaggatggcggagagacactggtggatagcagaggccagggcacactggtcacagtgtcatctacgcgtggcagcatccccgaggacacattcttcccaagccccgagagcagctgcgacgtgaagctggtggaaaagagcttcgagacagacaccaacctgaacttccagaacctgagcgtgatcggcttcagaatcctgctgctgaaagtggccggctttaacctgctgatgaccctgcggctgtggtccagccgcgccaagagaagcggatctggcgtgaagcagaccctgaatttcgacctgctgaagctggctggcgacgtggaatccaacccaggcccttctagaggccatatgaccgagtacaagcccacggtgcgcctcgccacccgcgacgacgtccccagggccgtacgcaccctcgccgccgcgttcgccgactaccccgccacgcgccacaccgtcgatccggaccgccacatcgagcgggtcaccgagctgcaagaactcttcctcacgcgcgtcgggctcgacatcggcaaggtgtgggtcgcggacgacggcgccgcggtggcggtctggaccacgccggagagcgtcgaagcgggggcggtgttcgccgagatcggcccgcgcatggccgagttgagcggttcccggctggccgcgcagcaacagatggaaggcctcctggcgccgcaccggcccaaggagcccgcgtggttcctggccaccgtcggcgtctcgcccgaccaccagggcaagggtctgggcagcgccgtcgtgctccccggagtggaggcggccgagcgcgccggggtgcccgccttcctggagacctccgcgccccgcaacctccccttctacgagcggctcggcttcaccgtcaccgccgacgtcgaggtgcccgaaggaccgcgcacctggtgcatgacccgcaagcccggtgcctga

SEQ ID NO: 6744 - DNA, 2010 bp, Artificial Sequence
  Synthetic Polynucloetide
atggccttaccagtgaccgccttgctcctgccgctggccttgctgctccacgccgccaggccgcagctccagctgcaagagtctggacctggcctggtcaagcctagcgagacactgagcctgacctgtaccgtgtccggcgatagcatcagcagcggcgattactactggggctggatcagacagcctcctggcaaaggactggaatggatcggccacatctactacagcggcgtgacctactacaaccccagcctgaagtccagagtgaccatcagcgtggacaccagccggaaccagttctccctgaagctgtctagcgtgacagccgccgataccgccgtgtactactgcaccagagaggacagcagcaactggcggagtagaggccagggaacactggtcacagttagctctctcgagggatctggcagagccgattgcggctttaccagcgagagctaccagcagggcgtgctgagcgccaccatcctgtacgagatcctgctgggcaaggccaccctgtacgccgtgctggtgtctgccctggtgctgatggctatggtcaagcggaaggacagccggggaagggccaagcgatctggatctggagcaacaaacttctcactactcaaacaagcaggtgacgtggaggagaatcccgggcctactagtatggactggatttggcgcatccttttccttgtcggcgctgctaccggcgcgcattccttccaggtgcagctggttgaatctggcggaggactggttcagcctggcggatctctgagactgtcttgtgccgccagcggcttcaccttcaccaatcacgccatgagctgggtccgacaggcccctggaaaaggactggaactggtgtctagcatcagcggcaacggcagaaccacctactacgccgatagcgtgaagggcagattcaccatcagccgggacatcagcaagaacaccctggacctccagatgaacagcctgagagccgaggataccgccgtgtactactgtgccaaggatggcggagagacactggtggatagcagaggccagggcacactggtcacagtgtcatctacgcgtgataaaactcatacctgtccgccatgcccggcaatccccgaggacacattcttcccaagccccgagagcagctgcgacgtgaagctggtggaaaagagcttcgagacagacaccaacctgaacttccagaacctgagcgtgatcggcttcagaatcctgctgctgaaagtggccggctttaacctgctgatgaccctgcggctgtggtccagccgcgccaagagaagcggatctggcgtgaagcagaccctgaatttcgacctgctgaagctggctggcgacgtggaatccaacccaggcccttctagaggccatatgaccgagtacaagcccacggtgcgcctcgccacccgcgacgacgtccccagggccgtacgcaccctcgccgccgcgttcgccgactaccccgccacgcgccacaccgtcgatccggaccgccacatcgagcgggtcaccgagctgcaagaactcttcctcacgcgcgtcgggctcgacatcggcaaggtgtgggtcgcggacgacggcgccgcggtggcggtctggaccacgccggagagcgtcgaagcgggggcggtgttcgccgagatcggcccgcgcatggccgagttgagcggttcccggctggccgcgcagcaacagatggaaggcctcctggcgccgcaccggcccaaggagcccgcgtggttcctggccaccgtcggcgtctcgcccgaccaccagggcaagggtctgggcagcgccgtcgtgctccccggagtggaggcggccgagcgcgccggggtgcccgccttcctggagacctccgcgccccgcaacctccccttctacgagcggctcggcttcaccgtcaccgccgacgtcgaggtgcccgaaggaccgcgcacctggtgcatgacccgcaagcccggtgcctga

SEQ ID NO: 6745 - DNA, 2037 bp, Artificial Sequence
  Synthetic Polynucloetide
atggccttaccagtgaccgccttgctcctgccgctggccttgctgctccacgccgccaggccgcagctccagctgcaagagtctggacctggcctggtcaagcctagcgagacactgagcctgacctgtaccgtgtccggcgatagcatcagcagcggcgattactactggggctggatcagacagcctcctggcaaaggactggaatggatcggccacatctactacagcggcgtgacctactacaaccccagcctgaagtccagagtgaccatcagcgtggacaccagccggaaccagttctccctgaagctgtctagcgtgacagccgccgataccgccgtgtactactgcaccagagaggacagcagcaactggcggagtagaggccagggaacactggtcacagttagctctctcgaggacaaaactcacacatgcccaccgtgcccagcaggcagagccgattgcggctttaccagcgagagctaccagcagggcgtgctgagcgccaccatcctgtacgagatcctgctgggcaaggccaccctgtacgccgtgctggtgtctgccctggtgctgatggctatggtcaagcggaaggacagccggggaagggccaagcgatctggatctggagcaacaaacttctcactactcaaacaagcaggtgacgtggaggagaatcccgggcctactagtatggactggatttggcgcatccttttccttgtcggcgctgctaccggcgcgcattccttccaggtgcagctggttgaatctggcggaggactggttcagcctggcggatctctgagactgtcttgtgccgccagcggcttcaccttcaccaatcacgccatgagctgggtccgacaggcccctggaaaaggactggaactggtgtctagcatcagcggcaacggcagaaccacctactacgccgatagcgtgaagggcagattcaccatcagccgggacatcagcaagaacaccctggacctccagatgaacagcctgagagccgaggataccgccgtgtactactgtgccaaggatggcggagagacactggtggatagcagaggccagggcacactggtcacagtgtcatctacgcgtgataaaactcatacctgtccgccatgcccggcaatccccgaggacacattcttcccaagccccgagagcagctgcgacgtgaagctggtggaaaagagcttcgagacagacaccaacctgaacttccagaacctgagcgtgatcggcttcagaatcctgctgctgaaagtggccggctttaacctgctgatgaccctgcggctgtggtccagccgcgccaagagaagcggatctggcgtgaagcagaccctgaatttcgacctgctgaagctggctggcgacgtggaatccaacccaggcccttctagaggccatatgaccgagtacaagcccacggtgcgcctcgccacccgcgacgacgtccccagggccgtacgcaccctcgccgccgcgttcgccgactaccccgccacgcgccacaccgtcgatccggaccgccacatcgagcgggtcaccgagctgcaagaactcttcctcacgcgcgtcgggctcgacatcggcaaggtgtgggtcgcggacgacggcgccgcggtggcggtctggaccacgccggagagcgtcgaagcgggggcggtgttcgccgagatcggcccgcgcatggccgagttgagcggttcccggctggccgcgcagcaacagatggaaggcctcctggcgccgcaccggcccaaggagcccgcgtggttcctggccaccgtcggcgtctcgcccgaccaccagggcaagggtctgggcagcgccgtcgtgctccccggagtggaggcggccgagcgcgccggggtgcccgccttcctggagacctccgcgccccgcaacctccccttctacgagcggctcggcttcaccgtcaccgccgacgtcgaggtgcccgaaggaccgcgcacctggtgcatgacccgcaagcccggtgcctga

SEQ ID NO: 6746 - DNA, 1335 bp, Artificial Sequence
  Synthetic Polynucloetide
atggccttaccagtgaccgccttgctcctgccgctggccttgctgctccacgccgccaggccgcagctccagctgcaagagtctggacctggcctggtcaagcctagcgagacactgagcctgacctgtaccgtgtccggcgatagcatcagcagcggcgattactactggggctggatcagacagcctcctggcaaaggactggaatggatcggccacatctactacagcggcgtgacctactacaaccccagcctgaagtccagagtgaccatcagcgtggacaccagccggaaccagttctccctgaagctgtctagcgtgacagccgccgataccgccgtgtactactgcaccagagaggacagcagcaactggcggagtagaggccagggaacactggtcacagttagctctctcgaggacaaaactcacacatgcccaccgtgcccagcaggcagagccgattgcggctttaccagcgagagctaccagcagggcgtgctgagcgccaccatcctgtacgagatcctgctgggcaaggccaccctgtacgccgtgctggtgtctgccctggtgctgatggctatggtcaagcggaaggacagccggggaagggccaagcgatctggatctggagcaacaaacttctcactactcaaacaagcaggtgacgtggaggagaatcccgggcctactagtatggactggatttggcgcatccttttccttgtcggcgctgctaccggcgcgcattccttccaggtgcagctggttgaatctggcggaggactggttcagcctggcggatctctgagactgtcttgtgccgccagcggcttcaccttcaccaatcacgccatgagctgggtccgacaggcccctggaaaaggactggaactggtgtctagcatcagcggcaacggcagaaccacctactacgccgatagcgtgaagggcagattcaccatcagccgggacatcagcaagaacaccctggacctccagatgaacagcctgagagccgaggataccgccgtgtactactgtgccaaggatggcggagagacactggtggatagcagaggccagggcacactggtcacagtgtcatctacgcgtgataaaactcatacctgtccgccatgcccggcaatccccgaggacacattcttcccaagccccgagagcagctgcgacgtgaagctggtggaaaagagcttcgagacagacaccaacctgaacttccagaacctgagcgtgatcggcttcagaatcctgctgctgaaagtggccggctttaacctgctgatgaccctgcggctgtggtccagc

SEQ ID NO: 6747 - DNA, 1308 bp, Artificial Sequence
  Synthetic Polynucloetide
atggccttaccagtgaccgccttgctcctgccgctggccttgctgctccacgccgccaggccgcagctccagctgcaagagtctggacctggcctggtcaagcctagcgagacactgagcctgacctgtaccgtgtccggcgatagcatcagcagcggcgattactactggggctggatcagacagcctcctggcaaaggactggaatggatcggccacatctactacagcggcgtgacctactacaaccccagcctgaagtccagagtgaccatcagcgtggacaccagccggaaccagttctccctgaagctgtctagcgtgacagccgccgataccgccgtgtactactgcaccagagaggacagcagcaactggcggagtagaggccagggaacactggtcacagttagctctctcgagggatctggcagagccgattgcggctttaccagcgagagctaccagcagggcgtgctgagcgccaccatcctgtacgagatcctgctgggcaaggccaccctgtacgccgtgctggtgtctgccctggtgctgatggctatggtcaagcggaaggacagccggggaagggccaagcgatctggatctggagcaacaaacttctcactactcaaacaagcaggtgacgtggaggagaatcccgggcctactagtatggactggatttggcgcatccttttccttgtcggcgctgctaccggcgcgcattccttccaggtgcagctggttgaatctggcggaggactggttcagcctggcggatctctgagactgtcttgtgccgccagcggcttcaccttcaccaatcacgccatgagctgggtccgacaggcccctggaaaaggactggaactggtgtctagcatcagcggcaacggcagaaccacctactacgccgatagcgtgaagggcagattcaccatcagccgggacatcagcaagaacaccctggacctccagatgaacagcctgagagccgaggataccgccgtgtactactgtgccaaggatggcggagagacactggtggatagcagaggccagggcacactggtcacagtgtcatctacgcgtgataaaactcatacctgtccgccatgcccggcaatccccgaggacacattcttcccaagccccgagagcagctgcgacgtgaagctggtggaaaagagcttcgagacagacaccaacctgaacttccagaacctgagcgtgatcggcttcagaatcctgctgctgaaagtggccggctttaacctgctgatgaccctgcggctgtggtccagc

SEQ ID NO: 6748 - DNA, 2664 bp, Artificial Sequence
  Synthetic Polynucloetide
atggccttaccagtgaccgccttgctcctgccgctggccttgctgctccacgccgccaggccgcagctccagctgcaagagtctggacctggcctggtcaagcctagcgagacactgagcctgacctgtaccgtgtccggcgatagcatcagcagcggcgattactactggggctggatcagacagcctcctggcaaaggactggaatggatcggccacatctactacagcggcgtgacctactacaaccccagcctgaagtccagagtgaccatcagcgtggacaccagccggaaccagttctccctgaagctgtctagcgtgacagccgccgataccgccgtgtactactgcaccagagaggacagcagcaactggcggagtagaggccagggaacactggtcacagttagctctctcgagggacagcctaaggccaatcctaccgtgacactgttccctccaagcagcgaagaactccaggccaacaaggccacacttgtgtgcctgatctccgacttctaccctggggctgtgacagtggcttggaaggccgatggatctcctgtgaaagccggcgtggaaaccaccaagccatccaagcagagcaacaacaaatacgccgccagctcctacctgagcctgacacctgagcagtggaagtcccacagatcctacagctgccaagtgacccacgaaggcagcaccgtggaaaagacagtggcccctacagagtgcagccccatcaagaccgatgtgattacaatggaccccaaggacaactgctccaaggacgccaacgataccctgctgctccagctgaccaacaccagcgcctactacatgtacttgttgctgctgctgaagtccgtggtgtacttcgccatcatcacatgctgcctgctgcggagaaccgccttctgctgcaacggcgagaagtctagggccaagcgatctggatctggagcaacaaacttctcactactcaaacaagcaggtgacgtggaggagaatcccgggcctactagtatggactggatttggcgcatccttttccttgtcggcgctgctaccggcgcgcattccttccaggtgcagctggttgaatctggcggaggactggttcagcctggcggatctctgagactgtcttgtgccgccagcggcttcaccttcaccaatcacgccatgagctgggtccgacaggcccctggaaaaggactggaactggtgtctagcatcagcggcaacggcagaaccacctactacgccgatagcgtgaagggcagattcaccatcagccgggacatcagcaagaacaccctggacctccagatgaacagcctgagagccgaggataccgccgtgtactactgtgccaaggatggcggagagacactggtggatagcagaggccagggcacactggtcacagtgtcatctacgcgtgcctctacaaagggaccctccgtgtttcctctggctcccagcagcaagtctacaagcggaggaacagccgctctgggctgcctggtcaaggattactttcccgagcctgtgaccgtgtcctggaatagcggagcactgacaagcggcgtgcacacctttccagccgtgctgcaaagcagcggcctgtactctctgagcagcgtggtcacagtgcctagctctagcctgggcacccagacctacatctgcaatgtgaaccacaagcctagcaacaccaaggtggacaagagagtggaacccaagagctgtgaagtgaaaaccgactccaccgaccacgtgaagcccaaagagacagagaacaccaagcagcccagcaagagctgccacaagcccaaggccatcgtgcacaccgagaaagtgaacatgatgagcctgaccgtgctgggcctgcggatgctgttcgccaaaaccgtggccgtgaacttcctgctgaccgccaagctgttcttcctccgcgccaagagaagcggatctggcgtgaagcagaccctgaatttcgacctgctgaagctggctggcgacgtggaatccaacccaggcccttctagaggccatatgaccgagtacaagcccacggtgcgcctcgccacccgcgacgacgtccccagggccgtacgcaccctcgccgccgcgttcgccgactaccccgccacgcgccacaccgtcgatccggaccgccacatcgagcgggtcaccgagctgcaagaactcttcctcacgcgcgtcgggctcgacatcggcaaggtgtgggtcgcggacgacggcgccgcggtggcggtctggaccacgccggagagcgtcgaagcgggggcggtgttcgccgagatcggcccgcgcatggccgagttgagcggttcccggctggccgcgcagcaacagatggaaggcctcctggcgccgcaccggcccaaggagcccgcgtggttcctggccaccgtcggcgtctcgcccgaccaccagggcaagggtctgggcagcgccgtcgtgctccccggagtggaggcggccgagcgcgccggggtgcccgccttcctggagacctccgcgccccgcaacctccccttctacgagcggctcggcttcaccgtcaccgccgacgtcgaggtgcccgaaggaccgcgcacctggtgcatgacccgcaagcccggtgcctga

SEQ ID NO: 6749 - DNA, 1962 bp, Artificial Sequence; identical to SEQ ID NO: 6711
  Synthetic Polynucloetide

SEQ ID NO: 6750 - DNA, 2049 bp, Artificial Sequence
  Synthetic Polynucloetide
atggccttaccagtgaccgccttgctcctgccgctggccttgctgctccacgccgccaggccgcagctccagctgcaagagtctggacctggcctggtcaagcctagcgagacactgagcctgacctgtaccgtgtccggcgatagcatcagcagcggcgattactactggggctggatcagacagcctcctggcaaaggactggaatggatcggccacatctactacagcggcgtgacctactacaaccccagcctgaagtccagagtgaccatcagcgtggacaccagccggaaccagttctccctgaagctgtctagcgtgacagccgccgataccgccgtgtactactgcaccagagaggacagcagcaactggcggagtagaggccagggaacactggtcacagttagctctctcgagggatctcccatcaagaccgatgtgattacaatggaccccaaggacaactgctccaaggacgccaacgataccctgctgctccagctgaccaacaccagcgcctactacatgtacttgttgctgctgctgaagtccgtggtgtacttcgccatcatcacatgctgcctgctgcggagaaccgccttctgctgcaacggcgagaagtctagggccaagcgatctggatctggagcaacaaacttctcactactcaaacaagcaggtgacgtggaggagaatcccgggcctactagtatggactggatttggcgcatccttttccttgtcggcgctgctaccggcgcgcattccttccaggtgcagctggttgaatctggcggaggactggttcagcctggcggatctctgagactgtcttgtgccgccagcggcttcaccttcaccaatcacgccatgagctgggtccgacaggcccctggaaaaggactggaactggtgtctagcatcagcggcaacggcagaaccacctactacgccgatagcgtgaagggcagattcaccatcagccgggacatcagcaagaacaccctggacctccagatgaacagcctgagagccgaggataccgccgtgtactactgtgccaaggatggcggagagacactggtggatagcagaggccagggcacactggtcacagtgtcatctacgcgtggcagcgaagtgaaaaccgactccaccgaccacgtgaagcccaaagagacagagaacaccaagcagcccagcaagagctgccacaagcccaaggccatcgtgcacaccgagaaagtgaacatgatgagcctgaccgtgctgggcctgcggatgctgttcgccaaaaccgtggccgtgaacttcctgctgaccgccaagctgttcttcctccgcgccaagagaagcggatctggcgtgaagcagaccctgaatttcgacctgctgaagctggctggcgacgtggaatccaacccaggcccttctagaggccatatgaccgagtacaagcccacggtgcgcctcgccacccgcgacgacgtccccagggccgtacgcaccctcgccgccgcgttcgccgactaccccgccacgcgccacaccgtcgatccggaccgccacatcgagcgggtcaccgagctgcaagaactcttcctcacgcgcgtcgggctcgacatcggcaaggtgtgggtcgcggacgacggcgccgcggtggcggtctggaccacgccggagagcgtcgaagcgggggcggtgttcgccgagatcggcccgcgcatggccgagttgagcggttcccggctggccgcgcagcaacagatggaaggcctcctggcgccgcaccggcccaaggagcccgcgtggttcctggccaccgtcggcgtctcgcccgaccaccagggcaagggtctgggcagcgccgtcgtgctccccggagtggaggcggccgagcgcgccggggtgcccgccttcctggagacctccgcgccccgcaacctccccttctacgagcggctcggcttcaccgtcaccgccgacgtcgaggtgcccgaaggaccgcgcacctggtgcatgacccgcaagcccggtgcctga

SEQ ID NO: 6751 - DNA, 1347 bp, Artificial Sequence
  Synthetic Polynucloetide
atggccttaccagtgaccgccttgctcctgccgctggccttgctgctccacgccgccaggccgcagctccagctgcaagagtctggacctggcctggtcaagcctagcgagacactgagcctgacctgtaccgtgtccggcgatagcatcagcagcggcgattactactggggctggatcagacagcctcctggcaaaggactggaatggatcggccacatctactacagcggcgtgacctactacaaccccagcctgaagtccagagtgaccatcagcgtggacaccagccggaaccagttctccctgaagctgtctagcgtgacagccgccgataccgccgtgtactactgcaccagagaggacagcagcaactggcggagtagaggccagggaacactggtcacagttagctctctcgagggatctcccatcaagaccgatgtgattacaatggaccccaaggacaactgctccaaggacgccaacgataccctgctgctccagctgaccaacaccagcgcctactacatgtacttgttgctgctgctgaagtccgtggtgtacttcgccatcatcacatgctgcctgctgcggagaaccgccttctgctgcaacggcgagaagtctagggccaagcgatctggatctggagcaacaaacttctcactactcaaacaagcaggtgacgtggaggagaatcccgggcctactagtatggactggatttggcgcatccttttccttgtcggcgctgctaccggcgcgcattccttccaggtgcagctggttgaatctggcggaggactggttcagcctggcggatctctgagactgtcttgtgccgccagcggcttcaccttcaccaatcacgccatgagctgggtccgacaggcccctggaaaaggactggaactggtgtctagcatcagcggcaacggcagaaccacctactacgccgatagcgtgaagggcagattcaccatcagccgggacatcagcaagaacaccctggacctccagatgaacagcctgagagccgaggataccgccgtgtactactgtgccaaggatggcggagagacactggtggatagcagaggccagggcacactggtcacagtgtcatctacgcgtggcagcgaagtgaaaaccgactccaccgaccacgtgaagcccaaagagacagagaacaccaagcagcccagcaagagctgccacaagcccaaggccatcgtgcacaccgagaaagtgaacatgatgagcctgaccgtgctgggcctgcggatgctgttcgccaaaaccgtggccgtgaacttcctgctgaccgccaagctgttcttcctc

SEQ ID NO: 6752 - DNA, 2076 bp, Artificial Sequence
  Synthetic Polynucloetide
atggccttaccagtgaccgccttgctcctgccgctggccttgctgctccacgccgccaggccgcagctccagctgcaagagtctggacctggcctggtcaagcctagcgagacactgagcctgacctgtaccgtgtccggcgatagcatcagcagcggcgattactactggggctggatcagacagcctcctggcaaaggactggaatggatcggccacatctactacagcggcgtgacctactacaaccccagcctgaagtccagagtgaccatcagcgtggacaccagccggaaccagttctccctgaagctgtctagcgtgacagccgccgataccgccgtgtactactgcaccagagaggacagcagcaactggcggagtagaggccagggaacactggtcacagttagctctctcgaggacaaaactcacacatgcccaccgtgcccagcacccatcaagaccgatgtgattacaatggaccccaaggacaactgctccaaggacgccaacgataccctgctgctccagctgaccaacaccagcgcctactacatgtacttgttgctgctgctgaagtccgtggtgtacttcgccatcatcacatgctgcctgctgcggagaaccgccttctgctgcaacggcgagaagtctagggccaagcgatctggatctggagcaacaaacttctcactactcaaacaagcaggtgacgtggaggagaatcccgggcctactagtatggactggatttggcgcatccttttccttgtcggcgctgctaccggcgcgcattccttccaggtgcagctggttgaatctggcggaggactggttcagcctggcggatctctgagactgtcttgtgccgccagcggcttcaccttcaccaatcacgccatgagctgggtccgacaggcccctggaaaaggactggaactggtgtctagcatcagcggcaacggcagaaccacctactacgccgatagcgtgaagggcagattcaccatcagccgggacatcagcaagaacaccctggacctccagatgaacagcctgagagccgaggataccgccgtgtactactgtgccaaggatggcggagagacactggtggatagcagaggccagggcacactggtcacagtgtcatctacgcgtggcagcgaagtgaaaaccgactccaccgaccacgtgaagcccaaagagacagagaacaccaagcagcccagcaagagctgccacaagcccaaggccatcgtgcacaccgagaaagtgaacatgatgagcctgaccgtgctgggcctgcggatgctgttcgccaaaaccgtggccgtgaacttcctgctgaccgccaagctgttcttcctccgcgccaagagaagcggatctggcgtgaagcagaccctgaatttcgacctgctgaagctggctggcgacgtggaatccaacccaggcccttctagaggccatatgaccgagtacaagcccacggtgcgcctcgccacccgcgacgacgtccccagggccgtacgcaccctcgccgccgcgttcgccgactaccccgccacgcgccacaccgtcgatccggaccgccacatcgagcgggtcaccgagctgcaagaactcttcctcacgcgcgtcgggctcgacatcggcaaggtgtgggtcgcggacgacggcgccgcggtggcggtctggaccacgccggagagcgtcgaagcgggggcggtgttcgccgagatcggcccgcgcatggccgagttgagcggttcccggctggccgcgcagcaacagatggaaggcctcctggcgccgcaccggcccaaggagcccgcgtggttcctggccaccgtcggcgtctcgcccgaccaccagggcaagggtctgggcagcgccgtcgtgctccccggagtggaggcggccgagcgcgccggggtgcccgccttcctggagacctccgcgccccgcaacctccccttctacgagcggctcggcttcaccgtcaccgccgacgtcgaggtgcccgaaggaccgcgcacctggtgcatgacccgcaagcccggtgcctga

SEQ ID NO: 6753 - DNA, 2076 bp, Artificial Sequence
  Synthetic Polynucloetide
atggccttaccagtgaccgccttgctcctgccgctggccttgctgctccacgccgccaggccgcagctccagctgcaagagtctggacctggcctggtcaagcctagcgagacactgagcctgacctgtaccgtgtccggcgatagcatcagcagcggcgattactactggggctggatcagacagcctcctggcaaaggactggaatggatcggccacatctactacagcggcgtgacctactacaaccccagcctgaagtccagagtgaccatcagcgtggacaccagccggaaccagttctccctgaagctgtctagcgtgacagccgccgataccgccgtgtactactgcaccagagaggacagcagcaactggcggagtagaggccagggaacactggtcacagttagctctctcgagggatctcccatcaagaccgatgtgattacaatggaccccaaggacaactgctccaaggacgccaacgataccctgctgctccagctgaccaacaccagcgcctactacatgtacttgttgctgctgctgaagtccgtggtgtacttcgccatcatcacatgctgcctgctgcggagaaccgccttctgctgcaacggcgagaagtctagggccaagcgatctggatctggagcaacaaacttctcactactcaaacaagcaggtgacgtggaggagaatcccgggcctactagtatggactggatttggcgcatccttttccttgtcggcgctgctaccggcgcgcattccttccaggtgcagctggttgaatctggcggaggactggttcagcctggcggatctctgagactgtcttgtgccgccagcggcttcaccttcaccaatcacgccatgagctgggtccgacaggcccctggaaaaggactggaactggtgtctagcatcagcggcaacggcagaaccacctactacgccgatagcgtgaagggcagattcaccatcagccgggacatcagcaagaacaccctggacctccagatgaacagcctgagagccgaggataccgccgtgtactactgtgccaaggatggcggagagacactggtggatagcagaggccagggcacactggtcacagtgtcatctacgcgtgataaaactcatacctgtccgccatgcccggcagaagtgaaaaccgactccaccgaccacgtgaagcccaaagagacagagaacaccaagcagcccagcaagagctgccacaagcccaaggccatcgtgcacaccgagaaagtgaacatgatgagcctgaccgtgctgggcctgcggatgctgttcgccaaaaccgtggccgtgaacttcctgctgaccgccaagctgttcttcctccgcgccaagagaagcggatctggcgtgaagcagaccctgaatttcgacctgctgaagctggctggcgacgtggaatccaacccaggcccttctagaggccatatgaccgagtacaagcccacggtgcgcctcgccacccgcgacgacgtccccagggccgtacgcaccctcgccgccgcgttcgccgactaccccgccacgcgccacaccgtcgatccggaccgccacatcgagcgggtcaccgagctgcaagaactcttcctcacgcgcgtcgggctcgacatcggcaaggtgtgggtcgcggacgacggcgccgcggtggcggtctggaccacgccggagagcgtcgaagcgggggcggtgttcgccgagatcggcccgcgcatggccgagttgagcggttcccggctggccgcgcagcaacagatggaaggcctcctggcgccgcaccggcccaaggagcccgcgtggttcctggccaccgtcggcgtctcgcccgaccaccagggcaagggtctgggcagcgccgtcgtgctccccggagtggaggcggccgagcgcgccggggtgcccgccttcctggagacctccgcgccccgcaacctccccttctacgagcggctcggcttcaccgtcaccgccgacgtcgaggtgcccgaaggaccgcgcacctggtgcatgacccgcaagcccggtgcctga

SEQ ID NO: 6754 - DNA, 2103 bp, Artificial Sequence
  Synthetic Polynucloetide
atggccttaccagtgaccgccttgctcctgccgctggccttgctgctccacgccgccaggccgcagctccagctgcaagagtctggacctggcctggtcaagcctagcgagacactgagcctgacctgtaccgtgtccggcgatagcatcagcagcggcgattactactggggctggatcagacagcctcctggcaaaggactggaatggatcggccacatctactacagcggcgtgacctactacaaccccagcctgaagtccagagtgaccatcagcgtggacaccagccggaaccagttctccctgaagctgtctagcgtgacagccgccgataccgccgtgtactactgcaccagagaggacagcagcaactggcggagtagaggccagggaacactggtcacagttagctctctcgaggacaaaactcacacatgcccaccgtgcccagcacccatcaagaccgatgtgattacaatggaccccaaggacaactgctccaaggacgccaacgataccctgctgctccagctgaccaacaccagcgcctactacatgtacttgttgctgctgctgaagtccgtggtgtacttcgccatcatcacatgctgcctgctgcggagaaccgccttctgctgcaacggcgagaagtctagggccaagcgatctggatctggagcaacaaacttctcactactcaaacaagcaggtgacgtggaggagaatcccgggcctactagtatggactggatttggcgcatccttttccttgtcggcgctgctaccggcgcgcattccttccaggtgcagctggttgaatctggcggaggactggttcagcctggcggatctctgagactgtcttgtgccgccagcggcttcaccttcaccaatcacgccatgagctgggtccgacaggcccctggaaaaggactggaactggtgtctagcatcagcggcaacggcagaaccacctactacgccgatagcgtgaagggcagattcaccatcagccgggacatcagcaagaacaccctggacctccagatgaacagcctgagagccgaggataccgccgtgtactactgtgccaaggatggcggagagacactggtggatagcagaggccagggcacactggtcacagtgtcatctacgcgtgataaaactcatacctgtccgccatgcccggcagaagtgaaaaccgactccaccgaccacgtgaagcccaaagagacagagaacaccaagcagcccagcaagagctgccacaagcccaaggccatcgtgcacaccgagaaagtgaacatgatgagcctgaccgtgctgggcctgcggatgctgttcgccaaaaccgtggccgtgaacttcctgctgaccgccaagctgttcttcctccgcgccaagagaagcggatctggcgtgaagcagaccctgaatttcgacctgctgaagctggctggcgacgtggaatccaacccaggcccttctagaggccatatgaccgagtacaagcccacggtgcgcctcgccacccgcgacgacgtccccagggccgtacgcaccctcgccgccgcgttcgccgactaccccgccacgcgccacaccgtcgatccggaccgccacatcgagcgggtcaccgagctgcaagaactcttcctcacgcgcgtcgggctcgacatcggcaaggtgtgggtcgcggacgacggcgccgcggtggcggtctggaccacgccggagagcgtcgaagcgggggcggtgttcgccgagatcggcccgcgcatggccgagttgagcggttcccggctggccgcgcagcaacagatggaaggcctcctggcgccgcaccggcccaaggagcccgcgtggttcctggccaccgtcggcgtctcgcccgaccaccagggcaagggtctgggcagcgccgtcgtgctccccggagtggaggcggccgagcgcgccggggtgcccgccttcctggagacctccgcgccccgcaacctccccttctacgagcggctcggcttcaccgtcaccgccgacgtcgaggtgcccgaaggaccgcgcacctggtgcatgacccgcaagcccggtgcctga

SEQ ID NO: 6755 - DNA, 1401 bp, Artificial Sequence
  Synthetic Polynucloetide
atggccttaccagtgaccgccttgctcctgccgctggccttgctgctccacgccgccaggccgcagctccagctgcaagagtctggacctggcctggtcaagcctagcgagacactgagcctgacctgtaccgtgtccggcgatagcatcagcagcggcgattactactggggctggatcagacagcctcctggcaaaggactggaatggatcggccacatctactacagcggcgtgacctactacaaccccagcctgaagtccagagtgaccatcagcgtggacaccagccggaaccagttctccctgaagctgtctagcgtgacagccgccgataccgccgtgtactactgcaccagagaggacagcagcaactggcggagtagaggccagggaacactggtcacagttagctctctcgaggacaaaactcacacatgcccaccgtgcccagcacccatcaagaccgatgtgattacaatggaccccaaggacaactgctccaaggacgccaacgataccctgctgctccagctgaccaacaccagcgcctactacatgtacttgttgctgctgctgaagtccgtggtgtacttcgccatcatcacatgctgcctgctgcggagaaccgccttctgctgcaacggcgagaagtctagggccaagcgatctggatctggagcaacaaacttctcactactcaaacaagcaggtgacgtggaggagaatcccgggcctactagtatggactggatttggcgcatccttttccttgtcggcgctgctaccggcgcgcattccttccaggtgcagctggttgaatctggcggaggactggttcagcctggcggatctctgagactgtcttgtgccgccagcggcttcaccttcaccaatcacgccatgagctgggtccgacaggcccctggaaaaggactggaactggtgtctagcatcagcggcaacggcagaaccacctactacgccgatagcgtgaagggcagattcaccatcagccgggacatcagcaagaacaccctggacctccagatgaacagcctgagagccgaggataccgccgtgtactactgtgccaaggatggcggagagacactggtggatagcagaggccagggcacactggtcacagtgtcatctacgcgtgataaaactcatacctgtccgccatgcccggcagaagtgaaaaccgactccaccgaccacgtgaagcccaaagagacagagaacaccaagcagcccagcaagagctgccacaagcccaaggccatcgtgcacaccgagaaagtgaacatgatgagcctgaccgtgctgggcctgcggatgctgttcgccaaaaccgtggccgtgaacttcctgctgaccgccaagctgttcttcctc

SEQ ID NO: 6756 - DNA, 2187 bp, Artificial Sequence
  Synthetic Polynucloetide
atggccttaccagtgaccgccttgctcctgccgctggccttgctgctccacgccgccaggccgcagctccagctgcaagagtctggacctggcctggtcaagcctagcgagacactgagcctgacctgtaccgtgtccggcgatagcatcagcagcggcgattactactggggctggatcagacagcctcctggcaaaggactggaatggatcggccacatctactacagcggcgtgacctactacaaccccagcctgaagtccagagtgaccatcagcgtggacaccagccggaaccagttctccctgaagctgtctagcgtgacagccgccgataccgccgtgtactactgcaccagagaggacagcagcaactggcggagtagaggccagggaacactggtcacagttagctctctcgagagcggcggaggcggatctttcgaagtgcagctgcttgaaagtggcggcggactgattcagcctggcggatctctgagactgagctgtgccgccagcggcttcaccttttctagccacgccatgacctgggtccgacaggcacctggaaaagggcttgaatgggtgtccgccatcagcggctctggcgattacacacactacgccgacagcgtgaagggcagattcaccatcagcagagacaacagcaagaacaccgtgtacctccagatgaacagcctgagagccgaggacagcgccgtgtattattgcgccaaggatgaggatggcggcagcctgcttggacacagaggacaaggcaccctggtcaccgtttcttccacgcgtgagcagaaactgatctcggaagaggatctggcgaagcccaccacgacgccagcgccgcgaccaccaacaccggcgcccaccatcgcgtcgcagcccctgtccctgcgcccagaggcgtgccggccagcggcggggggcgcagtgcacacgagggggctggacttcgcctgtgacatctacatctgggcgcccttggccgggacttgtggggtccttctcctgtcactggttatcaccctttactgcaaacggggcagaaagaaactcctgtatatattcaaacaaccatttatgagaccagtacaaactactcaagaggaagatggctgtagctgccgatttccagaagaagaagaaggaggatgtgaactgagagtgaagttcagcaggagcgcagacgcccccgcgtaccagcagggccagaaccagctctataacgagctgaatctaggacgaagagaggagtacgatgttttggacaagagacgtggccgggaccctgagatggggggaaagccgagaaggaagaaccctcaggaaggcctgtacaatgaactgcagaaagataagatggcggaggcctacagtgagattgggatgaaaggcgagcgccggaggggcaaggggcacgatggcctttaccagggtctcagtacagccaccaaggacacctacgacgcccttcacatgcaggccctgccccctcgctctagtggctccggcgagggcagaggaagtctactaacctgcggagatgtggaagaaaatcctggcccacatatgaccgagtacaagcccacggtgcgcctcgccacccgcgacgacgtccccagggccgtacgcaccctcgccgccgcgttcgccgactaccccgccacgcgccacaccgtcgatccggaccgccacatcgagcgggtcaccgagctgcaagaactcttcctcacgcgcgtcgggctcgacatcggcaaggtgtgggtcgcggacgacggcgccgcggtggcggtctggaccacgccggagagcgtcgaagcgggggcggtgttcgccgagatcggcccgcgcatggccgagttgagcggttcccggctggccgcgcagcaacagatggaaggcctcctggcgccgcaccggcccaaggagcccgcgtggttcctggccaccgtcggcgtctcgcccgaccaccagggcaagggtctgggcagcgccgtcgtgctccccggagtggaggcggccgagcgcgccggggtgcccgccttcctggagacctccgcgccccgcaacctccccttctacgagcggctcggcttcaccgtcaccgccgacgtcgaggtgcccgaaggaccgcgcacctggtgcatgacccgcaagcccggtgcctga

SEQ ID NO: 6757 - DNA, 2169 bp, Artificial Sequence
  Synthetic Polynucloetide
atggccttaccagtgaccgccttgctcctgccgctggccttgctgctccacgccgccaggccgcagctccagctgcaagagtctggacctggcctggtcaagcctagcgagacactgagcctgacctgtaccgtgtccggcgatagcatcagcagcggcgattactactggggctggatcagacagcctcctggcaaaggactggaatggatcggccacatctactacagcggcgtgacctactacaaccccagcctgaagtccagagtgaccatcagcgtggacaccagccggaaccagttctccctgaagctgtctagcgtgacagccgccgataccgccgtgtactactgcaccagagaggacagcagcaactggcggagtagaggccagggaacactggtcacagttagctctctcgagagcggcggaggcggatctttcgaagtgcagctgcttgaaagtggcggcggactgattcagcctggcggatctctgagactgagctgtgccgccagcggcttcaccttttctagccacgccatgacctgggtccgacaggcacctggaaaagggcttgaatgggtgtccgccatcagcggctctggcgattacacacactacgccgacagcgtgaagggcagattcaccatcagcagagacaacagcaagaacaccgtgtacctccagatgaacagcctgagagccgaggacagcgccgtgtattattgcgccaaggatgaggatggcggcagcctgcttggacacagaggacaaggcaccctggtcaccgtttcttccacgcgtgagcagaaactgatctcggaagaggatctgaaaattgaagttatgtatcctcctccttacctagacaatgagaagagcaatggaaccattatccatgtgaaagggaaacacctttgtccaagtcccctatttcccggaccttctaagcccttttgggtgctggtggtggttgggggagtcctggcttgctatagcttgctagtaacagtggcctttattattttctgggtgaggagtaagaggagcaggctcctgcacagtgactacatgaacatgactccacgccgccccggacccacccgcaagcattaccagccctatgccccaccacgcgacttcgcagcctatcgctccagagtgaagttcagcaggagcgcagacgcccccgcgtaccagcagggccagaaccagctctataacgagctcaatctaggacgaagagaggagtacgatgttttggacaagagacgtggccgggaccctgagatggggggaaagccgagaaggaagaaccctcaggaaggcctgtacaatgaactgcagaaagataagatggcggaggcctacagtgagattgggatgaaaggcgagcgccggaggggcaaggggcacgatggcctttaccagggtctcagtacagccaccaaggacacctacgacgcccttcacatgcaggccctgccccctcgctctagtggctccggcgagggcagaggaagtctactaacctgcggagatgtggaagaaaatcctggcccacatatgaccgagtacaagcccacggtgcgcctcgccacccgcgacgacgtccccagggccgtacgcaccctcgccgccgcgttcgccgactaccccgccacgcgccacaccgtcgatccggaccgccacatcgagcgggtcaccgagctgcaagaactcttcctcacgcgcgtcgggctcgacatcggcaaggtgtgggtcgcggacgacggcgccgcggtggcggtctggaccacgccggagagcgtcgaagcgggggcggtgttcgccgagatcggcccgcgcatggccgagttgagcggttcccggctggccgcgcagcaacagatggaaggcctcctggcgccgcaccggcccaaggagcccgcgtggttcctggccaccgtcggcgtctcgcccgaccaccagggcaagggtctgggcagcgccgtcgtgctccccggagtggaggcggccgagcgcgccggggtgcccgccttcctggagacctccgcgccccgcaacctccccttctacgagcggctcggcttcaccgtcaccgccgacgtcgaggtgcccgaaggaccgcgcacctggtgcatgacccgcaagcccggtgcctga

SEQ ID NO: 6758 - DNA, 1497 bp, Artificial Sequence
  Synthetic Polynucloetide
atggccttaccagtgaccgccttgctcctgccgctggccttgctgctccacgccgccaggccgcagctccagctgcaagagtctggacctggcctggtcaagcctagcgagacactgagcctgacctgtaccgtgtccggcgatagcatcagcagcggcgattactactggggctggatcagacagcctcctggcaaaggactggaatggatcggccacatctactacagcggcgtgacctactacaaccccagcctgaagtccagagtgaccatcagcgtggacaccagccggaaccagttctccctgaagctgtctagcgtgacagccgccgataccgccgtgtactactgcaccagagaggacagcagcaactggcggagtagaggccagggaacactggtcacagttagctctctcgagagcggcggaggcggatctttcgaagtgcagctgcttgaaagtggcggcggactgattcagcctggcggatctctgagactgagctgtgccgccagcggcttcaccttttctagccacgccatgacctgggtccgacaggcacctggaaaagggcttgaatgggtgtccgccatcagcggctctggcgattacacacactacgccgacagcgtgaagggcagattcaccatcagcagagacaacagcaagaacaccgtgtacctccagatgaacagcctgagagccgaggacagcgccgtgtattattgcgccaaggatgaggatggcggcagcctgcttggacacagaggacaaggcaccctggtcaccgtttcttccacgcgtgagcagaaactgatctcggaagaggatctgaaaattgaagttatgtatcctcctccttacctagacaatgagaagagcaatggaaccattatccatgtgaaagggaaacacctttgtccaagtcccctatttcccggaccttctaagcccttttgggtgctggtggtggttgggggagtcctggcttgctatagcttgctagtaacagtggcctttattattttctgggtgaggagtaagaggagcaggctcctgcacagtgactacatgaacatgactccacgccgccccggacccacccgcaagcattaccagccctatgccccaccacgcgacttcgcagcctatcgctccagagtgaagttcagcaggagcgcagacgcccccgcgtaccagcagggccagaaccagctctataacgagctcaatctaggacgaagagaggagtacgatgttttggacaagagacgtggccgggaccctgagatggggggaaagccgagaaggaagaaccctcaggaaggcctgtacaatgaactgcagaaagataagatggcggaggcctacagtgagattgggatgaaaggcgagcgccggaggggcaaggggcacgatggcctttaccagggtctcagtacagccaccaaggacacctacgacgcccttcacatgcaggccctgccccctcgc

SEQ ID NO: 6759 - DNA, 1518 bp, Artificial Sequence
  Synthetic Polynucloetide
atggccttaccagtgaccgccttgctcctgccgctggccttgctgctccacgccgccaggccgcagctccagctgcaagagtctggacctggcctggtcaagcctagcgagacactgagcctgacctgtaccgtgtccggcgatagcatcagcagcggcgattactactggggctggatcagacagcctcctggcaaaggactggaatggatcggccacatctactacagcggcgtgacctactacaaccccagcctgaagtccagagtgaccatcagcgtggacaccagccggaaccagttctccctgaagctgtctagcgtgacagccgccgataccgccgtgtactactgcaccagagaggacagcagcaactggcggagtagaggccagggaacactggtcacagttagctctctcgagagcggcggaggcggatctttcgaagtgcagctgcttgaaagtggcggcggactgattcagcctggcggatctctgagactgagctgtgccgccagcggcttcaccttttctagccacgccatgacctgggtccgacaggcacctggaaaagggcttgaatgggtgtccgccatcagcggctctggcgattacacacactacgccgacagcgtgaagggcagattcaccatcagcagagacaacagcaagaacaccgtgtacctccagatgaacagcctgagagccgaggacagcgccgtgtattattgcgccaaggatgaggatggcggcagcctgcttggacacagaggacaaggcaccctggtcaccgtttcttccacgcgtgagcagaaactgatctcggaagaggatctggcgaagcccaccacgacgccagcgccgcgaccaccaacaccggcgcccaccatcgcgtcgcagcccctgtccctgcgcccagaggcgtgccggccagcggcggggggcgcagtgcacacgagggggctggacttcgcctgtgacatctacatctgggcgcccttggccgggacttgtggggtccttctcctgtcactggttatcaccctttactgcaaacggggcagaaagaaactcctgtatatattcaaacaaccatttatgagaccagtacaaactactcaagaggaagatggctgtagctgccgatttccagaagaagaagaaggaggatgtgaactgagagtgaagttcagcaggagcgcagacgcccccgcgtaccagcagggccagaaccagctctataacgagctgaatctaggacgaagagaggagtacgatgttttggacaagagacgtggccgggaccctgagatggggggaaagccgagaaggaagaaccctcaggaaggcctgtacaatgaactgcagaaagataagatggcggaggcctacagtgagattgggatgaaaggcgagcgccggaggggcaaggggcacgatggcctttaccagggtctcagtacagccaccaaggacacctacgacgcccttcacatgcaggccctgccccctcgctga

SEQ ID NO: 6760 - DNA, 1521 bp, Artificial Sequence
  Synthetic Polynucloetide
atggccttaccagtgaccgccttgctcctgccgctggccttgctgctccacgccgccaggccggaagtgcagctgcttgaaagtggcggcggactgattcagcctggcggatctctgagactgagctgtgccgccagcggcttcaccttttctagccacgccatgacctgggtccgacaggcacctggaaaagggcttgaatgggtgtccgccatcagcggctctggcgattacacacactacgccgacagcgtgaagggcagattcaccatcagcagagacaacagcaagaacaccgtgtacctccagatgaacagcctgagagccgaggacagcgccgtgtattattgcgccaaggatgaggatggcggcagcctgcttggacacagaggacaaggcaccctggtcaccgtttcttccctcgagagcggcggaggcggatctttcgaacagctccagctgcaagagtctggacctggcctggtcaagcctagcgagacactgagcctgacctgtaccgtgtccggcgatagcatcagcagcggcgattactactggggctggatcagacagcctcctggcaaaggactggaatggatcggccacatctactacagcggcgtgacctactacaaccccagcctgaagtccagagtgaccatcagcgtggacaccagccggaaccagttctccctgaagctgtctagcgtgacagccgccgataccgccgtgtactactgcaccagagaggacagcagcaactggcggagtagaggccagggaacactggtcacagttagctctacgcgtgagcagaaactgatctcggaagaggatctggcgaagcccaccacgacgccagcgccgcgaccaccaacaccggcgcccaccatcgcgtcgcagcccctgtccctgcgcccagaggcgtgccggccagcggcggggggcgcagtgcacacgagggggctggacttcgcctgtgacatctacatctgggcgcccttggccgggacttgtggggtccttctcctgtcactggttatcaccctttactgcaaacggggcagaaagaaactcctgtatatattcaaacaaccatttatgagaccagtacaaactactcaagaggaagatggctgtagctgccgatttccagaagaagaagaaggaggatgtgaactgagagtgaagttcagcaggagcgcagacgcccccgcgtaccagcagggccagaaccagctctataacgagctgaatctaggacgaagagaggagtacgatgttttggacaagagacgtggccgggaccctgagatggggggaaagccgagaaggaagaaccctcaggaaggcctgtacaatgaactgcagaaagataagatggcggaggcctacagtgagattgggatgaaaggcgagcgccggaggggcaaggggcacgatggcctttaccagggtctcagtacagccaccaaggacacctacgacgcccttcacatgcaggccctgccccctcgctga

SEQ ID NO: 6761 - DNA, 2757 bp, Artificial Sequence
  Synthetic Polynucloetide
atggccttaccagtgaccgccttgctcctgccgctggccttgctgctccacgccgccaggccgcagctccagctgcaagagtctggacctggcctggtcaagcctagcgagacactgagcctgacctgtaccgtgtccggcgatagcatcagcagcggcgattactactggggctggatcagacagcctcctggcaaaggactggaatggatcggccacatctactacagcggcgtgacctactacaaccccagcctgaagtccagagtgaccatcagcgtggacaccagccggaaccagttctccctgaagctgtctagcgtgacagccgccgataccgccgtgtactactgcaccagagaggacagcagcaactggcggagtagaggccagggaacactggtcacagttagctctctcgagagcggcggaggcggatctttcgaagtgcagctgcttgaaagtggcggcggactgattcagcctggcggatctctgagactgagctgtgccgccagcggcttcaccttttctagccacgccatgacctgggtccgacaggcacctggaaaagggcttgaatgggtgtccgccatcagcggctctggcgattacacacactacgccgacagcgtgaagggcagattcaccatcagcagagacaacagcaagaacaccgtgtacctccagatgaacagcctgagagccgaggacagcgccgtgtattattgcgccaaggatgaggatggcggcagcctgcttggacacagaggacaaggcaccctggtcaccgtttcttccacgcgtgagcagaaactgatctcggaagaggatctggcgaagcccaccacgacgccagcgccgcgaccaccaacaccggcgcccaccatcgcgtcgcagcccctgtccctgcgcccagaggcgtgccggccagcggcggggggcgcagtgcacacgagggggctggacttcgcctgtgacatctacatctgggcgcccttggccgggacttgtggggtccttctcctgtcactggttatcaccctttactgcgggcgcgccagagtgaagttcagcaggagcgcagacgcccccgcgtaccagcagggccagaaccagctctataacgagctgaatctaggacgaagagaggagtacgatgttttggacaagagacgtggccgggaccctgagatggggggaaagccgagaaggaagaaccctcaggaaggcctgtacaatgaactgcagaaagataagatggcggaggcctacagtgagattgggatgaaaggcgagcgccggaggggcaaggggcacgatggcctttaccagggtctcagtacagccaccaaggacacctacgacgcccttcacatgcaggccctgccccctcgctctagaggatctggagcaacaaacttctcactactcaaacaagcaggtgacgtggaggagaatcccgggcctgggatccacatggccacttacgaggttctctgtgaggtggcgcggaaactgggcacggatgacagggaagtggtattgttcctcctaaacgtgttcatacctcaacccacactggcccaattaattggagctcttagagctttaaaggaggagggcaggttaacgtttcccctgttagcggaatgtctgtttcgtgcaggtcgcagagacctcttgcgcgacctgcttcacttagacccgcgttttttagagcgccacctagcgggcacaatgagttatttcagcccttatcagctcactgttctccacgtagacggggagctgtgtgcgagggatattaggtctttgatatttttaagcaaggacactatagggtctcgcagcacaccacagacattcttacactgggtgtactgtatggaaaacttagacctactgggtcccactgacgtggatgccctaatgtcaatgcttagatctttgtcaagagtagacctacagcgccaagtgcaaaccctaatgggccttcacctttccggcccatcacactcccaacactatcgccatacaccactcgagaccgatttctacgactacaaggacgacgatgacaagactagtggctccggcgagggcagaggaagtctactaacctgcggagatgtggaagaaaatcctggcccacatatgaccgagtacaagcccacggtgcgcctcgccacccgcgacgacgtccccagggccgtacgcaccctcgccgccgcgttcgccgactaccccgccacgcgccacaccgtcgatccggaccgccacatcgagcgggtcaccgagctgcaagaactcttcctcacgcgcgtcgggctcgacatcggcaaggtgtgggtcgcggacgacggcgccgcggtggcggtctggaccacgccggagagcgtcgaagcgggggcggtgttcgccgagatcggcccgcgcatggccgagttgagcggttcccggctggccgcgcagcaacagatggaaggcctcctggcgccgcaccggcccaaggagcccgcgtggttcctggccaccgtcggcgtctcgcccgaccaccagggcaagggtctgggcagcgccgtcgtgctccccggagtggaggcggccgagcgcgccggggtgcccgccttcctggagacctccgcgccccgcaacctccccttctacgagcggctcggcttcaccgtcaccgccgacgtcgaggtgcccgaaggaccgcgcacctggtgcatgacccgcaagcccggtgcctga

SEQ ID NO: 6762 - DNA, 2592 bp, Artificial Sequence
  Synthetic Polynucloetide
atggccttaccagtgaccgccttgctcctgccgctggccttgctgctccacgccgccaggccgcagctccagctgcaagagtctggacctggcctggtcaagcctagcgagacactgagcctgacctgtaccgtgtccggcgatagcatcagcagcggcgattactactggggctggatcagacagcctcctggcaaaggactggaatggatcggccacatctactacagcggcgtgacctactacaaccccagcctgaagtccagagtgaccatcagcgtggacaccagccggaaccagttctccctgaagctgtctagcgtgacagccgccgataccgccgtgtactactgcaccagagaggacagcagcaactggcggagtagaggccagggaacactggtcacagttagctctctcgagatccagaaccctgatcctgccgtgtaccagctgcgggatagcaagagcagcgacaagagcgtgtgtctgttcaccgacttcgacagccagaccaacgtgtcccagagcaaggactccgacgtgtacatcaccgataagtgcgtgctggacatgcggagcatggacttcaagagcaactccgccgtggcctggtccaacaagtccgatttcgcctgcgccaacgccttcaacaacagcattatccccgaggacacattcttcccaagcagcgacgtgccctgcgacgtgaagctggtggaaaagagcttcgagacagacaccaacctgaacttccagaacctgagcgtgatcggcttcagaatcctgctgctgaaagtggccggctttaacctgctgatgaccctgcggctgtggtccagccgcgccaagagaagcggatctggcgtgaagcagaccctgaatttcgacctgctgaagctggctggcgacgtggaatccaacccaggccctactagtatggactggatttggcgcatccttttccttgtcggcgctgctaccggcgcgcattccttcgaagtgcagctgcttgaaagtggcggcggactgattcagcctggcggatctctgagactgagctgtgccgccagcggcttcaccttttctagccacgccatgacctgggtccgacaggcacctggaaaagggcttgaatgggtgtccgccatcagcggctctggcgattacacacactacgccgacagcgtgaagggcagattcaccatcagcagagacaacagcaagaacaccgtgtacctccagatgaacagcctgagagccgaggacagcgccgtgtattattgcgccaaggatgaggatggcggcagcctgcttggacacagaggacaaggcaccctggtcaccgtttcttccacgcgtgaggacctgaagaacgtgttcccacctgaggtggccgtgttcgagcctagcaaggccgagatcgcccacacccagaaagccaccctcgtgtgcctggctaccggcttctaccccgaccatgtggaactgtcttggtgggtcaacggcaaagaggtgcacagcggcgtgtgtaccgacccccagccactgaaagaacagcccgccctgaacgacagccggtactgcctgagcagcagactgagagtgtccgccaccttctggcagaacccccggaaccacttcagatgccaggtgcagttctacggcctgagcgagaacgacgagtggacccaggacagagccaagcccgtgacccagatcgtgtctgccgaagcctggggcagagccgattgcggcatcaccagcgccagctaccaccagggcgtgctgagcgccaccatcctgtacgagatcctgctgggcaaggccaccctgtacgccgtgctggtgtctgccctggtgctgatggctatggtcaagcggaaggacagccggggaagggccaagcgatctggatctggagcaacaaacttctcactactcaaacaagcaggtgacgtggaggagaatcccgggccttctagaggccatatgaccgagtacaagcccacggtgcgcctcgccacccgcgacgacgtccccagggccgtacgcaccctcgccgccgcgttcgccgactaccccgccacgcgccacaccgtcgatccggaccgccacatcgagcgggtcaccgagctgcaagaactcttcctcacgcgcgtcgggctcgacatcggcaaggtgtgggtcgcggacgacggcgccgcggtggcggtctggaccacgccggagagcgtcgaagcgggggcggtgttcgccgagatcggcccgcgcatggccgagttgagcggttcccggctggccgcgcagcaacagatggaaggcctcctggcgccgcaccggcccaaggagcccgcgtggttcctggccaccgtcggcgtctcgcccgaccaccagggcaagggtctgggcagcgccgtcgtgctccccggagtggaggcggccgagcgcgccggggtgcccgccttcctggagacctccgcgccccgcaacctccccttctacgagcggctcggcttcaccgtcaccgccgacgtcgaggtgcccgaaggaccgcgcacctggtgcatgacccgcaagcccggtgcctga

SEQ ID NO: 6763 - DNA, 2589 bp, Artificial Sequence
  Synthetic Polynucloetide
atggccttaccagtgaccgccttgctcctgccgctggccttgctgctccacgccgccaggccgcagctccagctgcaagagtctggacctggcctggtcaagcctagcgagacactgagcctgacctgtaccgtgtccggcgatagcatcagcagcggcgattactactggggctggatcagacagcctcctggcaaaggactggaatggatcggccacatctactacagcggcgtgacctactacaaccccagcctgaagtccagagtgaccatcagcgtggacaccagccggaaccagttctccctgaagctgtctagcgtgacagccgccgataccgccgtgtactactgcaccagagaggacagcagcaactggcggagtagaggccagggaacactggtcacagttagctctctcgaggacctgaagaacgtgttcccacctgaggtggccgtgttcgagcctagcaaggccgagatcgcccacacccagaaagccaccctcgtgtgcctggctaccggcttctaccccgaccatgtggaactgtcttggtgggtcaacggcaaagaggtgcacagcggcgtgtgtaccgacccccagccactgaaagaacagcccgccctgaacgacagccggtactgcctgagcagcagactgagagtgtccgccaccttctggcagaacccccggaaccacttcagatgccaggtgcagttctacggcctgagcgagaacgacgagtggacccaggacagagccaagcccgtgacccagatcgtgtctgccgaagcctggggcagagccgattgcggcatcaccagcgccagctaccaccagggcgtgctgagcgccaccatcctgtacgagatcctgctgggcaaggccaccctgtacgccgtgctggtgtctgccctggtgctgatggctatggtcaagcggaaggacagccggggaagggccaagcgatctggatctggagcaacaaacttctcactactcaaacaagcaggtgacgtggaggagaatcccgggcctactagtatggactggatttggcgcatccttttccttgtcggcgctgctaccggcgcgcattccttcgaagtgcagctgcttgaaagtggcggcggactgattcagcctggcggatctctgagactgagctgtgccgccagcggcttcaccttttctagccacgccatgacctgggtccgacaggcacctggaaaagggcttgaatgggtgtccgccatcagcggctctggcgattacacacactacgccgacagcgtgaagggcagattcaccatcagcagagacaacagcaagaacaccgtgtacctccagatgaacagcctgagagccgaggacagcgccgtgtattattgcgccaaggatgaggatggcggcagcctgcttggacacagaggacaaggcaccctggtcaccgtttcttccacgcgtatccagaaccctgatcctgccgtgtaccagctgcgggatagcaagagcagcgacaagagcgtgtgtctgttcaccgacttcgacagccagaccaacgtgtcccagagcaaggactccgacgtgtacatcaccgataagtgcgtgctggacatgcggagcatggacttcaagagcaactccgccgtggcctggtccaacaagtccgatttcgcctgcgccaacgccttcaacaacagcattatccccgaggacacattcttcccaagcagcgacgtgccctgcgacgtgaagctggtggaaaagagcttcgagacagacaccaacctgaacttccagaacctgagcgtgatcggcttcagaatcctgctgctgaaagtggccggctttaacctgctgatgaccctgcggctgtggtccagccgcgccaagagaagcggatctggcgtgaagcagaccctgaatttcgacctgctgaagctggctggcgacgtggaatccaacccaggcccttctagaggccatatgaccgagtacaagcccacggtgcgcctcgccacccgcgacgacgtccccagggccgtacgcaccctcgccgccgcgttcgccgactaccccgccacgcgccacaccgtcgatccggaccgccacatcgagcgggtcaccgagctgcaagaactcttcctcacgcgcgtcgggctcgacatcggcaaggtgtgggtcgcggacgacggcgccgcggtggcggtctggaccacgccggagagcgtcgaagcgggggcggtgttcgccgagatcggcccgcgcatggccgagttgagcggttcccggctggccgcgcagcaacagatggaaggcctcctggcgccgcaccggcccaaggagcccgcgtggttcctggccaccgtcggcgtctcgcccgaccaccagggcaagggtctgggcagcgccgtcgtgctccccggagtggaggcggccgagcgcgccggggtgcccgccttcctggagacctccgcgccccgcaacctccccttctacgagcggctcggcttcaccgtcaccgccgacgtcgaggtgcccgaaggaccgcgcacctggtgcatgacccgcaagcccggtgcctga

SEQ ID NO: 6764 - DNA, 1887 bp, Artificial Sequence
  Synthetic Polynucloetide
atggccttaccagtgaccgccttgctcctgccgctggccttgctgctccacgccgccaggccgcagctccagctgcaagagtctggacctggcctggtcaagcctagcgagacactgagcctgacctgtaccgtgtccggcgatagcatcagcagcggcgattactactggggctggatcagacagcctcctggcaaaggactggaatggatcggccacatctactacagcggcgtgacctactacaaccccagcctgaagtccagagtgaccatcagcgtggacaccagccggaaccagttctccctgaagctgtctagcgtgacagccgccgataccgccgtgtactactgcaccagagaggacagcagcaactggcggagtagaggccagggaacactggtcacagttagctctctcgaggacctgaagaacgtgttcccacctgaggtggccgtgttcgagcctagcgaggccgagatcagccacacccagaaagccaccctcgtgtgcctggctaccggcttctaccccgaccatgtggaactgtcttggtgggtcaacggcaaagaggtgcacagcggcgtgtgtaccgacccccagccactgaaagaacagcccgccctgaacgacagccggtactgcctgagcagcagactgagagtgtccgccaccttctggcagaacccccggaaccacttcagatgccaggtgcagttctacggcctgagcgagaacgacgagtggacccaggacagagccaagcccgtgacccagatcgtgtctgccgaagcctggggcagagccgattgcggctttaccagcgagagctaccagcagggcgtgctgagcgccaccatcctgtacgagatcctgctgggcaaggccaccctgtacgccgtgctggtgtctgccctggtgctgatggctatggtcaagcggaaggacagccggggaagggccaagcgatctggatctggagcaacaaacttctcactactcaaacaagcaggtgacgtggaggagaatcccgggcctactagtatggactggatttggcgcatccttttccttgtcggcgctgctaccggcgcgcattccttcgaagtgcagctgcttgaaagtggcggcggactgattcagcctggcggatctctgagactgagctgtgccgccagcggcttcaccttttctagccacgccatgacctgggtccgacaggcacctggaaaagggcttgaatgggtgtccgccatcagcggctctggcgattacacacactacgccgacagcgtgaagggcagattcaccatcagcagagacaacagcaagaacaccgtgtacctccagatgaacagcctgagagccgaggacagcgccgtgtattattgcgccaaggatgaggatggcggcagcctgcttggacacagaggacaaggcaccctggtcaccgtttcttccacgcgtatccagaaccctgatcctgccgtgtaccagctgcgggatagcaagagcagcgacaagagcgtgtgtctgttcaccgacttcgacagccagaccaacgtgtcccagagcaaggactccgacgtgtacatcaccgataagtgcgtgctggacatgcggagcatggacttcaagagcaactccgccgtggcctggtccaacaagtccgatttcgcctgcgccaacgccttcaacaacagcattatccccgaggacacattcttcccaagccccgagagcagctgcgacgtgaagctggtggaaaagagcttcgagacagacaccaacctgaacttccagaacctgagcgtgatcggcttcagaatcctgctgctgaaagtggccggctttaacctgctgatgaccctgcggctgtggtccagc

SEQ ID NO: 6765 - DNA, 2562 bp, Artificial Sequence
  Synthetic Polynucloetide
atggccttaccagtgaccgccttgctcctgccgctggccttgctgctccacgccgccaggccgcagctccagctgcaagagtctggacctggcctggtcaagcctagcgagacactgagcctgacctgtaccgtgtccggcgatagcatcagcagcggcgattactactggggctggatcagacagcctcctggcaaaggactggaatggatcggccacatctactacagcggcgtgacctactacaaccccagcctgaagtccagagtgaccatcagcgtggacaccagccggaaccagttctccctgaagctgtctagcgtgacagccgccgataccgccgtgtactactgcaccagagaggacagcagcaactggcggagtagaggccagggaacactggtcacagttagctctctcgaggacctgaagaacgtgttcccacctgaggtggccgtgttcgagcctagcgaggccgagatcagccacacccagaaagccaccctcgtgtgcctggctaccggcttctaccccgaccatgtggaactgtcttggtgggtcaacggcaaagaggtgcacagcggcgtgtgtaccgacccccagccactgaaagaacagcccgccctgaacgacagccggtactgcctgagcagcagactgagagtgtccgccaccttctggcagaacccccggaaccacttcagatgccaggtgcagttctacggcctgagcgagaacgacgagtggacccaggacagagccaagcccgtgacccagatcgtgtctgccgaagcctggggcagagccgattgcggctttaccagcgagagctaccagcagggcgtgctgagcgccaccatcctgtacgagatcctgctgggcaaggccaccctgtacgccgtgctggtgtctgccctggtgctgatggctatggtcaagcggaaggacagccggggaagggccaagcgatctggatctggagcaacaaacttctcactactcaaacaagcaggtgacgtggaggagaatcccgggcctactagtatggactggatttggcgcatccttttccttgtcggcgctgctaccggcgcgcattccttcgaagtgcagctgcttgaaagtggcggcggactgattcagcctggcggatctctgagactgagctgtgccgccagcggcttcaccttttctagccacgccatgacctgggtccgacaggcacctggaaaagggcttgaatgggtgtccgccatcagcggctctggcgattacacacactacgccgacagcgtgaagggcagattcaccatcagcagagacaacagcaagaacaccgtgtacctccagatgaacagcctgagagccgaggacagcgccgtgtattattgcgccaaggatgaggatggcggcagcctgcttggacacagaggacaaggcaccctggtcaccgtttcttccacgcgtatccagaaccctgatcctgccgtgtaccagctgcgggatagcaagagcagcgacaagagcgtgtgtctgttcaccgacttcgacagccagaccaacgtgtcccagagcaaggactccgacgtgtacatcaccgataagtgcgtgctggacatgcggagcatggacttcaagagcaactccgccgtggcctggtccaacaagtccgatttcgcctgcgccaacgccttcaacaacagcattatccccgaggacacattcttcccaagccccgagagcagctgcgacgtgaagctggtggaaaagagcttcgagacagacaccaacctgaacttccagaacctgagcgtgatcggcttcagaatcctgctgctgaaagtggccggctttaacctgctgatgaccctgcggctgtggtccagccgcgccaagagaagcggatctggcgtgaagcagaccctgaatttcgacctgctgaagctggctggcgacgtggaatccaacccaggcccttctagaggcgggatccacaccatggctacctacgaggtgctgtgcgaggtggcaagaaagctgggcaccgacgacagagaagtggtgctgttcctgctgaacgtgttcatccctcagcctacactggcccagctgatcggtgcactgagagccctgaaagaggaaggccggctgacctttcctctgctggccgaatgcctgttcagagccggaagaagggatctgctgcgggacctgctgcatctggaccccagatttctggaaagacacctggccggcaccatgagctacttcagcccttaccagctgaccgtgctgcacgttgacggcgaactgtgcgccagagatattcggagcctgatcttcctgagcaaggacaccatcggcagccggtctacccctcagacatttctgcactgggtgtactgcatggaaaacctggacctgctcggccccacagatgtggatgccctgatgtccatgctgagaagcctgagcagagtggacctccagagacaggtgcagacactgatgggactgcacctgagcggacctagccacagccagcactacagacacacccct

SEQ ID NO: 6766 - DNA, 1899 bp, Artificial Sequence
  Synthetic Polynucloetide
atggccttaccagtgaccgccttgctcctgccgctggccttgctgctccacgccgccaggccgcagctccagctgcaagagtctggacctggcctggtcaagcctagcgagacactgagcctgacctgtaccgtgtccggcgatagcatcagcagcggcgattactactggggctggatcagacagcctcctggcaaaggactggaatggatcggccacatctactacagcggcgtgacctactacaaccccagcctgaagtccagagtgaccatcagcgtggacaccagccggaaccagttctccctgaagctgtctagcgtgacagccgccgataccgccgtgtactactgcaccagagaggacagcagcaactggcggagtagaggccagggaacactggtcacagttagctctctcgagatccagaaccctgatcctgccgtgtaccagctgcgggatagcaagagcagcgacaagagcgtgtgtctgttcaccgacttcgacagccagaccaacgtgtcccagagcaaggactccgacgtgtacatcaccgataagtgcgtgctggacatgcggagcatggacttcaagagcaactccgccgtggcctggtccaacaagtccgatttcgcctgcgccaacgccttcaacaacagcattatccccgaggacacattcttcccaagccccgagagcagctgcgacgtgaagctggtggaaaagagcttcgagacagacaccaacctgaacttccagaacctgagcgtgatcggcttcagaatcctgctgctgaaagtggccggctttaacctgctgatgaccctgcggctgtggtccagccgcgccaagagaagcggatctggcgtgaagcagaccctgaatttcgacctgctgaagctggctggcgacgtggaatccaacccaggccctactagtatggactggatttggcgcatccttttccttgtcggcgctgctaccggcgcgcattccttcgaagtgcagctgcttgaaagtggcggcggactgattcagcctggcggatctctgagactgagctgtgccgccagcggcttcaccttttctagccacgccatgacctgggtccgacaggcacctggaaaagggcttgaatgggtgtccgccatcagcggctctggcgattacacacactacgccgacagcgtgaagggcagattcaccatcagcagagacaacagcaagaacaccgtgtacctccagatgaacagcctgagagccgaggacagcgccgtgtattattgcgccaaggatgaggatggcggcagcctgcttggacacagaggacaaggcaccctggtcaccgtttcttccacgcgtgaggacctgaagaacgtgttcccacctgaggtggccgtgttcgagcctagcgaggccgagatcagccacacccagaaagccaccctcgtgtgcctggctaccggcttctaccccgaccatgtggaactgtcttggtgggtcaacggcaaagaggtgcacagcggcgtgtgtaccgacccccagccactgaaagaacagcccgccctgaacgacagccggtactgcctgagcagcagactgagagtgtccgccaccttctggcagaacccccggaaccacttcagatgccaggtgcagttctacggcctgagcgagaacgacgagtggacccaggacagagccaagcccgtgacccagatcgtgtctgccgaagcctggggcagagccgattgcggctttaccagcgagagctaccagcagggcgtgctgagcgccaccatcctgtacgagatcctgctgggcaaggccaccctgtacgccgtgctggtgtctgccctggtgctgatggctatggtcaagcggaaggacagccgggga

SEQ ID NO: 6767 - DNA, 2565 bp, Artificial Sequence
  Synthetic Polynucloetide
atggccttaccagtgaccgccttgctcctgccgctggccttgctgctccacgccgccaggccgcagctccagctgcaagagtctggacctggcctggtcaagcctagcgagacactgagcctgacctgtaccgtgtccggcgatagcatcagcagcggcgattactactggggctggatcagacagcctcctggcaaaggactggaatggatcggccacatctactacagcggcgtgacctactacaaccccagcctgaagtccagagtgaccatcagcgtggacaccagccggaaccagttctccctgaagctgtctagcgtgacagccgccgataccgccgtgtactactgcaccagagaggacagcagcaactggcggagtagaggccagggaacactggtcacagttagctctctcgagatccagaaccctgatcctgccgtgtaccagctgcgggatagcaagagcagcgacaagagcgtgtgtctgttcaccgacttcgacagccagaccaacgtgtcccagagcaaggactccgacgtgtacatcaccgataagtgcgtgctggacatgcggagcatggacttcaagagcaactccgccgtggcctggtccaacaagtccgatttcgcctgcgccaacgccttcaacaacagcattatccccgaggacacattcttcccaagccccgagagcagctgcgacgtgaagctggtggaaaagagcttcgagacagacaccaacctgaacttccagaacctgagcgtgatcggcttcagaatcctgctgctgaaagtggccggctttaacctgctgatgaccctgcggctgtggtccagccgcgccaagagaagcggatctggcgtgaagcagaccctgaatttcgacctgctgaagctggctggcgacgtggaatccaacccaggccctactagtatggactggatttggcgcatccttttccttgtcggcgctgctaccggcgcgcattccttcgaagtgcagctgcttgaaagtggcggcggactgattcagcctggcggatctctgagactgagctgtgccgccagcggcttcaccttttctagccacgccatgacctgggtccgacaggcacctggaaaagggcttgaatgggtgtccgccatcagcggctctggcgattacacacactacgccgacagcgtgaagggcagattcaccatcagcagagacaacagcaagaacaccgtgtacctccagatgaacagcctgagagccgaggacagcgccgtgtattattgcgccaaggatgaggatggcggcagcctgcttggacacagaggacaaggcaccctggtcaccgtttcttccacgcgtgaggacctgaagaacgtgttcccacctgaggtggccgtgttcgagcctagcgaggccgagatcagccacacccagaaagccaccctcgtgtgcctggctaccggcttctaccccgaccatgtggaactgtcttggtgggtcaacggcaaagaggtgcacagcggcgtgtgtaccgacccccagccactgaaagaacagcccgccctgaacgacagccggtactgcctgagcagcagactgagagtgtccgccaccttctggcagaacccccggaaccacttcagatgccaggtgcagttctacggcctgagcgagaacgacgagtggacccaggacagagccaagcccgtgacccagatcgtgtctgccgaagcctggggcagagccgattgcggctttaccagcgagagctaccagcagggcgtgctgagcgccaccatcctgtacgagatcctgctgggcaaggccaccctgtacgccgtgctggtgtctgccctggtgctgatggctatggtcaagcggaaggacagccggggaagggccaagcgatctggatctggagcaacaaacttctcactactcaaacaagcaggtgacgtggaggagaatcccgggccttctagaggcgggatccacaccatggctacctacgaggtgctgtgcgaggtggcaagaaagctgggcaccgacgacagagaagtggtgctgttcctgctgaacgtgttcatccctcagcctacactggcccagctgatcggtgcactgagagccctgaaagaggaaggccggctgacctttcctctgctggccgaatgcctgttcagagccggaagaagggatctgctgcgggacctgctgcatctggaccccagatttctggaaagacacctggccggcaccatgagctacttcagcccttaccagctgaccgtgctgcacgttgacggcgaactgtgcgccagagatattcggagcctgatcttcctgagcaaggacaccatcggcagccggtctacccctcagacatttctgcactgggtgtactgcatggaaaacctggacctgctcggccccacagatgtggatgccctgatgtccatgctgagaagcctgagcagagtggacctccagagacaggtgcagacactgatgggactgcacctgagcggacctagccacagccagcactacagacacacccct

SEQ ID NO: 6768 - DNA, 2709 bp, Artificial Sequence
  Synthetic Polynucloetide
atggccttaccagtgaccgccttgctcctgccgctggccttgctgctccacgccgccaggccgctcgaggggaaaccaattcccaaccctcttctgggactggattcaaccggcagcggcgaggacctgaagaacgtgttcccacctgaggtggccgtgttcgagcctagcaaggccgagatcgcccacacccagaaagccaccctcgtgtgcctggctaccggcttctaccccgaccatgtggaactgtcttggtgggtcaacggcaaagaggtgcacagcggcgtgtgtaccgacccccagccactgaaagaacagcccgccctgaacgacagccggtactgcctgagcagcagactgagagtgtccgccaccttctggcagaacccccggaaccacttcagatgccaggtgcagttctacggcctgagcgagaacgacgagtggacccaggacagagccaagcccgtgacccagatcgtgtctgccgaagcctggggcagagccgattgcggcatcaccagcgccagctaccaccagggcgtgctgagcgccaccatcctgtacgagatcctgctgggcaaggccaccctgtacgccgtgctggtgtctgccctggtgctgatggctatggtcaagcggaaggacagccggggaagggccaagcgatctggatctggagcaacaaacttctcactactcaaacaagcaggtgacgtggaggagaatcccgggcctactagcatggccttaccagtgaccgccttgctcctgccgctggccttgctgctccacgccgccaggccgcagctccagctgcaagagtctggacctggcctggtcaagcctagcgagacactgagcctgacctgtaccgtgtccggcgatagcatcagcagcggcgattactactggggctggatcagacagcctcctggcaaaggactggaatggatcggccacatctactacagcggcgtgacctactacaaccccagcctgaagtccagagtgaccatcagcgtggacaccagccggaaccagttctccctgaagctgtctagcgtgacagccgccgataccgccgtgtactactgcaccagagaggacagcagcaactggcggagtagaggccagggaacactggtcacagttagctctctcgagagcggcggaggcggatctttcgaagtgcagctgcttgaaagtggcggcggactgattcagcctggcggatctctgagactgagctgtgccgccagcggcttcaccttttctagccacgccatgacctgggtccgacaggcacctggaaaagggcttgaatgggtgtccgccatcagcggctctggcgattacacacactacgccgacagcgtgaagggcagattcaccatcagcagagacaacagcaagaacaccgtgtacctccagatgaacagcctgagagccgaggacagcgccgtgtattattgcgccaaggatgaggatggcggcagcctgcttggacacagaggacaaggcaccctggtcaccgtttcttccacgcgtgagcagaaactgatctcggaagaggatgggagcggcatccagaaccctgatcctgccgtgtaccagctgcgggatagcaagagcagcgacaagagcgtgtgtctgttcaccgacttcgacagccagaccaacgtgtcccagagcaaggactccgacgtgtacatcaccgataagtgcgtgctggacatgcggagcatggacttcaagagcaactccgccgtggcctggtccaacaagtccgatttcgcctgcgccaacgccttcaacaacagcattatccccgaggacacattcttcccaagcagcgacgtgccctgcgacgtgaagctggtggaaaagagcttcgagacagacaccaacctgaacttccagaacctgagcgtgatcggcttcagaatcctgctgctgaaagtggccggctttaacctgctgatgaccctgcggctgtggtccagccgcgccaagagaagcggatctggcgtgaagcagaccctgaatttcgacctgctgaagctggctggcgacgtggaatccaacccaggcccttctagaggccatatgaccgagtacaagcccacggtgcgcctcgccacccgcgacgacgtccccagggccgtacgcaccctcgccgccgcgttcgccgactaccccgccacgcgccacaccgtcgatccggaccgccacatcgagcgggtcaccgagctgcaagaactcttcctcacgcgcgtcgggctcgacatcggcaaggtgtgggtcgcggacgacggcgccgcggtggcggtctggaccacgccggagagcgtcgaagcgggggcggtgttcgccgagatcggcccgcgcatggccgagttgagcggttcccggctggccgcgcagcaacagatggaaggcctcctggcgccgcaccggcccaaggagcccgcgtggttcctggccaccgtcggcgtctcgcccgaccaccagggcaagggtctgggcagcgccgtcgtgctccccggagtggaggcggccgagcgcgccggggtgcccgccttcctggagacctccgcgccccgcaacctccccttctacgagcggctcggcttcaccgtcaccgccgacgtcgaggtgcccgaaggaccgcgcacctggtgcatgacccgcaagcccggtgcctga

SEQ ID NO: 6769 - DNA, 2712 bp, Artificial Sequence
  Synthetic Polynucloetide
atggccttaccagtgaccgccttgctcctgccgctggccttgctgctccacgccgccaggccgctcgagcagaaactgatctcggaagaggatctgggctccggcgatcgccctgatcctgccgtgtaccagctgcgggatagcaagagcagcgacaagagcgtgtgtctgttcaccgacttcgacagccagaccaacgtgtcccagagcaaggactccgacgtgtacatcaccgataagtgcgtgctggacatgcggagcatggacttcaagagcaactccgccgtggcctggtccaacaagtccgatttcgcctgcgccaacgccttcaacaacagcattatccccgaggacacattcttcccaagccccgagagcagctgcgacgtgaagctggtggaaaagagcttcgagacagacaccaacctgaacttccagaacctgagcgtgatcggcttcagaatcctgctgctgaaagtggccggctttaacctgctgatgaccctgcggctgtggtccagctctagtcgcgccaagagaagcggatctggcgtgaagcagaccctgaatttcgacctgctgaagctggctggcgacgtggaatccaacccaggccccactagcatggccttaccagtgaccgccttgctcctgccgctggccttgctgctccacgccgccaggccgcagctccagctgcaagagtctggacctggcctggtcaagcctagcgagacactgagcctgacctgtaccgtgtccggcgatagcatcagcagcggcgattactactggggctggatcagacagcctcctggcaaaggactggaatggatcggccacatctactacagcggcgtgacctactacaaccccagcctgaagtccagagtgaccatcagcgtggacaccagccggaaccagttctccctgaagctgtctagcgtgacagccgccgataccgccgtgtactactgcaccagagaggacagcagcaactggcggagtagaggccagggaacactggtcacagttagctctctcgagagcggcggaggcggatctttcgaagtgcagctgcttgaaagtggcggcggactgattcagcctggcggatctctgagactgagctgtgccgccagcggcttcaccttttctagccacgccatgacctgggtccgacaggcacctggaaaagggcttgaatgggtgtccgccatcagcggctctggcgattacacacactacgccgacagcgtgaagggcagattcaccatcagcagagacaacagcaagaacaccgtgtacctccagatgaacagcctgagagccgaggacagcgccgtgtattattgcgccaaggatgaggatggcggcagcctgcttggacacagaggacaaggcaccctggtcaccgtttcttccacgcgtgggaaaccaattcccaaccctcttctgggactggattcaaccggcagcggcgaggacctgaagaacgtgttcccacctgaggtggccgtgttcgagcctagcgaggccgagatcagccacacccagaaagccaccctcgtgtgcctggctaccggcttctaccccgaccatgtggaactgtcttggtgggtcaacggcaaagaggtgcacagcggcgtgtgtaccgacccccagccactgaaagaacagcccgccctgaacgacagccggtactgcctgagcagcagactgagagtgtccgccaccttctggcagaacccccggaaccacttcagatgccaggtgcagttctacggcctgagcgagaacgacgagtggacccaggacagagccaagcccgtgacccagatcgtgtctgccgaagcctggggcagagccgattgcggctttaccagcgagagctaccagcagggcgtgctgagcgccaccatcctgtacgagatcctgctgggcaaggccaccctgtacgccgtgctggtgtctgccctggtgctgatggctatggtcaagcggaaggacagccggggaagggccaagcgatctggatctggagcaacaaacttctcactactcaaacaagcaggtgacgtggaggagaatcccgggccttctagaggccatatgaccgagtacaagcccacggtgcgcctcgccacccgcgacgacgtccccagggccgtacgcaccctcgccgccgcgttcgccgactaccccgccacgcgccacaccgtcgatccggaccgccacatcgagcgggtcaccgagctgcaagaactcttcctcacgcgcgtcgggctcgacatcggcaaggtgtgggtcgcggacgacggcgccgcggtggcggtctggaccacgccggagagcgtcgaagcgggggcggtgttcgccgagatcggcccgcgcatggccgagttgagcggttcccggctggccgcgcagcaacagatggaaggcctcctggcgccgcaccggcccaaggagcccgcgtggttcctggccaccgtcggcgtctcgcccgaccaccagggcaagggtctgggcagcgccgtcgtgctccccggagtggaggcggccgagcgcgccggggtgcccgccttcctggagacctccgcgccccgcaacctccccttctacgagcggctcggcttcaccgtcaccgccgacgtcgaggtgcccgaaggaccgcgcacctggtgcatgacccgcaagcccggtgcctga

SEQ ID NO: 6770 - DNA, 2589 bp, Artificial Sequence
  Synthetic Polynucloetide
atggccttaccagtgaccgccttgctcctgccgctggccttgctgctccacgccgccaggccgcagctccagctgcaagagtctggacctggcctggtcaagcctagcgagacactgagcctgacctgtaccgtgtccggcgatagcatcagcagcggcgattactactggggctggatcagacagcctcctggcaaaggactggaatggatcggccacatctactacagcggcgtgacctactacaaccccagcctgaagtccagagtgaccatcagcgtggacaccagccggaaccagttctccctgaagctgtctagcgtgacagccgccgataccgccgtgtactactgcaccagagaggacagcagcaactggcggagtagaggccagggaacactggtcacagttagctctctcgaggacctgaagaacgtgttcccacctgaggtggccgtgttcgagcctagcgaggccgagatcagccacacccagaaagccaccctcgtgtgcctggctaccggcttctaccccgaccatgtggaactgtcttggtgggtcaacggcaaagaggtgcacagcggcgtgtctaccgacccccagccactgaaagaacagcccgccctgaacgacagccggtactgcctgagcagcagactgagagtgtccgccaccttctggcagaacccccggaaccacttcagatgccaggtgcagttctacggcctgagcgagaacgacgagtggacccaggacagagccaagcccgtgacccagatcgtgtctgccgaagcctggggcagagccgattgcggctttaccagcgagagctaccagcagggcgtgctgagcgccaccatcctgtacgagatcctgctgggcaaggccaccctgtacgccgtgctggtgtctgccctggtgctgatggctatggtcaagcggaaggacagccggggaagggccaagcgatctggatctggagcaacaaacttctcactactcaaacaagcaggtgacgtggaggagaatcccgggcctactagtatggactggatttggcgcatccttttccttgtcggcgctgctaccggcgcgcattccttcgaagtgcagctgcttgaaagtggcggcggactgattcagcctggcggatctctgagactgagctgtgccgccagcggcttcaccttttctagccacgccatgacctgggtccgacaggcacctggaaaagggcttgaatgggtgtccgccatcagcggctctggcgattacacacactacgccgacagcgtgaagggcagattcaccatcagcagagacaacagcaagaacaccgtgtacctccagatgaacagcctgagagccgaggacagcgccgtgtattattgcgccaaggatgaggatggcggcagcctgcttggacacagaggacaaggcaccctggtcaccgtttcttccacgcgtatccagaaccctgatcctgccgtgtaccagctgcgggatagcaagagcagcgacaagagcgtgtgtctgttcaccgacttcgacagccagaccaacgtgtcccagagcaaggactccgacgtgtacatcaccgataagaccgtgctggacatgcggagcatggacttcaagagcaactccgccgtggcctggtccaacaagtccgatttcgcctgcgccaacgccttcaacaacagcattatccccgaggacacattcttcccaagccccgagagcagctgcgacgtgaagctggtggaaaagagcttcgagacagacaccaacctgaacttccagaacctgagcgtgatcggcttcagaatcctgctgctgaaagtggccggctttaacctgctgatgaccctgcggctgtggtccagccgcgccaagagaagcggatctggcgtgaagcagaccctgaatttcgacctgctgaagctggctggcgacgtggaatccaacccaggcccttctagaggccatatgaccgagtacaagcccacggtgcgcctcgccacccgcgacgacgtccccagggccgtacgcaccctcgccgccgcgttcgccgactaccccgccacgcgccacaccgtcgatccggaccgccacatcgagcgggtcaccgagctgcaagaactcttcctcacgcgcgtcgggctcgacatcggcaaggtgtgggtcgcggacgacggcgccgcggtggcggtctggaccacgccggagagcgtcgaagcgggggcggtgttcgccgagatcggcccgcgcatggccgagttgagcggttcccggctggccgcgcagcaacagatggaaggcctcctggcgccgcaccggcccaaggagcccgcgtggttcctggccaccgtcggcgtctcgcccgaccaccagggcaagggtctgggcagcgccgtcgtgctccccggagtggaggcggccgagcgcgccggggtgcccgccttcctggagacctccgcgccccgcaacctccccttctacgagcggctcggcttcaccgtcaccgccgacgtcgaggtgcccgaaggaccgcgcacctggtgcatgacccgcaagcccggtgcctga

SEQ ID NO: 6771 - DNA, 2835 bp, Artificial Sequence
  Synthetic Polynucloetide
atggccttaccagtgaccgccttgctcctgccgctggccttgctgctccacgccgccaggccgcagctccagctgcaagagtctggacctggcctggtcaagcctagcgagacactgagcctgacctgtaccgtgtccggcgatagcatcagcagcggcgattactactggggctggatcagacagcctcctggcaaaggactggaatggatcggccacatctactacagcggcgtgacctactacaaccccagcctgaagtccagagtgaccatcagcgtggacaccagccggaaccagttctccctgaagctgtctagcgtgacagccgccgataccgccgtgtactactgcaccagagaggacagcagcaactggcggagtagaggccagggaacactggtcacagttagctctctcgaggacctgaagaacgtgttcccacctgaggtggccgtgttcgagcctagcgaggccgagatcagccacacccagaaagccaccctcgtgtgcctggctaccggcttctaccccgaccatgtggaactgtcttggtgggtcaacggcaaagaggtgcacagcggcgtgtctaccgacccccagccactgaaagaacagcccgccctgaacgacagccggtactgcctgagcagcagactgagagtgtccgccaccttctggcagaacccccggaaccacttcagatgccaggtgcagttctacggcctgagcgagaacgacgagtggacccaggacagagccaagcccgtgacccagatcgtgtctgccgaagcctggggcagagccgattgcggctttaccagcgagagctaccagcagggcgtgctgagcgccaccatcctgtacgagatcctgctgggcaaggccaccctgtacgccgtgctggtgtctgccctggtgctgatggctatggtcaagcggaaggacagccggggaagggccaagcgatctggatctggagcaacaaacttctcactactcaaacaagcaggtgacgtggaggagaatcccgggcctactagtatggactggatttggcgcatccttttccttgtcggcgctgctaccggcgcgcattccttcgaagtgcagctgcttgaaagtggcggcggactgattcagcctggcggatctctgagactgagctgtgccgccagcggcttcaccttttctagccacgccatgacctgggtccgacaggcacctggaaaagggcttgaatgggtgtccgccatcagcggctctggcgattacacacactacgccgacagcgtgaagggcagattcaccatcagcagagacaacagcaagaacaccgtgtacctccagatgaacagcctgagagccgaggacagcgccgtgtattattgcgccaaggatgaggatggcggcagcctgcttggacacagaggacaaggcaccctggtcaccgtttcttccacgcgtgagcagaaactgatctcggaagaggatgggagcggcaccccattcccttctctggcccctcccatcatgctgctggtggacggcaagcagcagatggtggtcgtgtgcctggtgctggatgtggccccacctggactggacagccccatctggtttagcgccggcaatggctctgccctggacgcctttacctacggcccaagccctgccaccgatggcacctggacaaatctggcccacctgagcctgcccagcgaggaactggcttcttgggagcctctcgtgtgccacacaggacctggcgctgagggacacagcagatccacccagcctatgcacctgtctggcgaggccagcaccgccagaacctgtcctcaggaacctctgagaggcacccctggcggagcactgtggctgggagtgctgagactgctgctgttcaagctgctgctgtttgacctgctgctgacctgctcctgtctgtgcgatcctgccggccctctgccttctcctgccaccaccacaagactgagagccctgggcagccacagactgcaccctgccacagagacaggcggcagagaggccacaagcagccctagaccccagcccagagacagaagatggggcgataccccccctggcagaaagcctggatctccagtccgcgccaagagaagcggatctggcgtgaagcagaccctgaatttcgacctgctgaagctggctggcgacgtggaatccaacccaggcccttctagaggccatatgaccgagtacaagcccacggtgcgcctcgccacccgcgacgacgtccccagggccgtacgcaccctcgccgccgcgttcgccgactaccccgccacgcgccacaccgtcgatccggaccgccacatcgagcgggtcaccgagctgcaagaactcttcctcacgcgcgtcgggctcgacatcggcaaggtgtgggtcgcggacgacggcgccgcggtggcggtctggaccacgccggagagcgtcgaagcgggggcggtgttcgccgagatcggcccgcgcatggccgagttgagcggttcccggctggccgcgcagcaacagatggaaggcctcctggcgccgcaccggcccaaggagcccgcgtggttcctggccaccgtcggcgtctcgcccgaccaccagggcaagggtctgggcagcgccgtcgtgctccccggagtggaggcggccgagcgcgccggggtgcccgccttcctggagacctccgcgccccgcaacctccccttctacgagcggctcggcttcaccgtcaccgccgacgtcgaggtgcccgaaggaccgcgcacctggtgcatgacccgcaagcccggtgcctga

SEQ ID NO: 6772 - DNA, 2874 bp, Artificial Sequence
  Synthetic Polynucloetide
atggccttaccagtgaccgccttgctcctgccgctggccttgctgctccacgccgccaggccgctcgaggacctgaagaacgtgttcccacctgaggtggccgtgttcgagcctagcgaggccgagatcagccacacccagaaagccaccctcgtgtgcctggctaccggcttctaccccgaccatgtggaactgtcttggtgggtcaacggcaaagaggtgcacagcggcgtgtctaccgacccccagccactgaaagaacagcccgccctgaacgacagccggtactgcctgagcagcagactgagagtgtccgccaccttctggcagaacccccggaaccacttcagatgccaggtgcagttctacggcctgagcgagaacgacgagtggacccaggacagagccaagcccgtgacccagatcgtgtctgccgaagcctggggcagagccgattgcggctttaccagcgagagctaccagcagggcgtgctgagcgccaccatcctgtacgagatcctgctgggcaaggccaccctgtacgccgtgctggtgtctgccctggtgctgatggctatggtcaagcggaaggacagccggggaagggccaagcgatctggatctggagcaacaaacttctcactactcaaacaagcaggtgacgtggaggagaatcccgggcctactagcatggccttaccagtgaccgccttgctcctgccgctggccttgctgctccacgccgccaggccgcagctccagctgcaagagtctggacctggcctggtcaagcctagcgagacactgagcctgacctgtaccgtgtccggcgatagcatcagcagcggcgattactactggggctggatcagacagcctcctggcaaaggactggaatggatcggccacatctactacagcggcgtgacctactacaaccccagcctgaagtccagagtgaccatcagcgtggacaccagccggaaccagttctccctgaagctgtctagcgtgacagccgccgataccgccgtgtactactgcaccagagaggacagcagcaactggcggagtagaggccagggaacactggtcacagttagctctctcgagagcggcggaggcggatctttcgaagtgcagctgcttgaaagtggcggcggactgattcagcctggcggatctctgagactgagctgtgccgccagcggcttcaccttttctagccacgccatgacctgggtccgacaggcacctggaaaagggcttgaatgggtgtccgccatcagcggctctggcgattacacacactacgccgacagcgtgaagggcagattcaccatcagcagagacaacagcaagaacaccgtgtacctccagatgaacagcctgagagccgaggacagcgccgtgtattattgcgccaaggatgaggatggcggcagcctgcttggacacagaggacaaggcaccctggtcaccgtttcttccacgcgtgagcagaaactgatctcggaagaggatctggggagcggcaccccattcccttctctggcccctcccatcatgctgctggtggacggcaagcagcagatggtggtcgtgtgcctggtgctggatgtggccccacctggactggacagccccatctggtttagcgccggcaatggctctgccctggacgcctttacctacggcccaagccctgccaccgatggcacctggacaaatctggcccacctgagcctgcccagcgaggaactggcttcttgggagcctctcgtgtgccacacaggacctggcgctgagggacacagcagatccacccagcctatgcacctgtctggcgaggccagcaccgccagaacctgtcctcaggaacctctgagaggcacccctggcggagcactgtggctgggagtgctgagactgctgctgttcaagctgctgctgtttgacctgctgctgacctgctcctgtctgtgcgatcctgccggccctctgccttctcctgccaccaccacaagactgagagccctgggcagccacagactgcaccctgccacagagacaggcggcagagaggccacaagcagccctagaccccagcccagagacagaagatggggcgataccccccctggcagaaagcctggatctccagtccgcgccaagagaagcggatctggcgtgaagcagaccctgaatttcgacctgctgaagctggctggcgacgtggaatccaacccaggcccttctagatctagaggccatatgaccgagtacaagcccacggtgcgcctcgccacccgcgacgacgtccccagggccgtacgcaccctcgccgccgcgttcgccgactaccccgccacgcgccacaccgtcgatccggaccgccacatcgagcgggtcaccgagctgcaagaactcttcctcacgcgcgtcgggctcgacatcggcaaggtgtgggtcgcggacgacggcgccgcggtggcggtctggaccacgccggagagcgtcgaagcgggggcggtgttcgccgagatcggcccgcgcatggccgagttgagcggttcccggctggccgcgcagcaacagatggaaggcctcctggcgccgcaccggcccaaggagcccgcgtggttcctggccaccgtcggcgtctcgcccgaccaccagggcaagggtctgggcagcgccgtcgtgctccccggagtggaggcggccgagcgcgccggggtgcccgccttcctggagacctccgcgccccgcaacctccccttctacgagcggctcggcttcaccgtcaccgccgacgtcgaggtgcccgaaggaccgcgcacctggtgcatgacccgcaagcccggtgcctga

SEQ ID NO: 6773 - DNA, 2700 bp, Artificial Sequence
  Synthetic Polynucloetide
atggccttaccagtgaccgccttgctcctgccgctggccttgctgctccacgccgccaggccgcagctccagctgcaagagtctggacctggcctggtcaagcctagcgagacactgagcctgacctgtaccgtgtccggcgatagcatcagcagcggcgattactactggggctggatcagacagcctcctggcaaaggactggaatggatcggccacatctactacagcggcgtgacctactacaaccccagcctgaagtccagagtgaccatcagcgtggacaccagccggaaccagttctccctgaagctgtctagcgtgacagccgccgataccgccgtgtactactgcaccagagaggacagcagcaactggcggagtagaggccagggaacactggtcacagttagctctctcgaggggaaaccaattcccaaccctcttctgggactggattcaaccggcagcggcgacaagcagctggacgccgacgtgtcccccaagcctaccatcttcctgccctctatcgccgagacaaagctccagaaggccggcacctacctgtgcctgctggaaaagttcttcccagatgtgattaagatccactggcaggaaaagaagtccaacaccatcctgggcagccaggaaggcaacaccatgaagaccaacgacacctacatgaagttcagctggctgaccgtgcccgagaagtccctggacaaagaacacagatgcatcgtgcggcacgaaaacaacaagaacggcgtggaccaggaaatcatcttcccacccatcaagaccgatgtgattacaatggaccccaaggacaactgctccaaggacgccaacgataccctgctgctccagctgaccaacaccagcgcctactacatgtacttgttgctgctgctgaagtccgtggtgtacttcgccatcatcacatgctgcctgctgcggagaaccgccttctgctgcaacggcgagaagtctagggccaagcgatctggatctggagcaacaaacttctcactactcaaacaagcaggtgacgtggaggagaatcccgggcctactagtatggactggatttggcgcatccttttccttgtcggcgctgctaccggcgcgcattccttcgaagtgcagctgcttgaaagtggcggcggactgattcagcctggcggatctctgagactgagctgtgccgccagcggcttcaccttttctagccacgccatgacctgggtccgacaggcacctggaaaagggcttgaatgggtgtccgccatcagcggctctggcgattacacacactacgccgacagcgtgaagggcagattcaccatcagcagagacaacagcaagaacaccgtgtacctccagatgaacagcctgagagccgaggacagcgccgtgtattattgcgccaaggatgaggatggcggcagcctgcttggacacagaggacaaggcaccctggtcaccgtttcttccacgcgtgagcagaaactgatctcggaagaggatgggagcggcagccagcctcacaccaagcccagcgtgttcgtgatgaagaacggcaccaacgtggcctgcctcgtgaaagagttctaccccaaggacatcaggatcaacctggtgtccagcaagaagatcaccgagttcgaccccgccatcgtgatctcccccagcggcaagtacaacgccgtgaagctggggaagtacgaggacagcaacagcgtgacctgctccgtgcagcacgacaacaagaccgtgcacagcaccgactttgaagtgaaaaccgactccaccgaccacgtgaagcccaaagagacagagaacaccaagcagcccagcaagagctgccacaagcccaaggccatcgtgcacaccgagaaagtgaacatgatgagcctgaccgtgctgggcctgcggatgctgttcgccaaaaccgtggccgtgaacttcctgctgaccgccaagctgttcttcctccgcgccaagagaagcggatctggcgtgaagcagaccctgaatttcgacctgctgaagctggctggcgacgtggaatccaacccaggcccttctagaggccatatgaccgagtacaagcccacggtgcgcctcgccacccgcgacgacgtccccagggccgtacgcaccctcgccgccgcgttcgccgactaccccgccacgcgccacaccgtcgatccggaccgccacatcgagcgggtcaccgagctgcaagaactcttcctcacgcgcgtcgggctcgacatcggcaaggtgtgggtcgcggacgacggcgccgcggtggcggtctggaccacgccggagagcgtcgaagcgggggcggtgttcgccgagatcggcccgcgcatggccgagttgagcggttcccggctggccgcgcagcaacagatggaaggcctcctggcgccgcaccggcccaaggagcccgcgtggttcctggccaccgtcggcgtctcgcccgaccaccagggcaagggtctgggcagcgccgtcgtgctccccggagtggaggcggccgagcgcgccggggtgcccgccttcctggagacctccgcgccccgcaacctccccttctacgagcggctcggcttcaccgtcaccgccgacgtcgaggtgcccgaaggaccgcgcacctggtgcatgacccgcaagcccggtgcctga

SEQ ID NO: 6774 - DNA, 1911 bp, Artificial Sequence
  Synthetic Polynucloetide
atggccttaccagtgaccgccttgctcctgccgctggccttgctgctccacgccgccaggccgcagctccagctgcaagagtctggacctggcctggtcaagcctagcgagacactgagcctgacctgtaccgtgtccggcgatagcatcagcagcggcgattactactggggctggatcagacagcctcctggcaaaggactggaatggatcggccacatctactacagcggcgtgacctactacaaccccagcctgaagtccagagtgaccatcagcgtggacaccagccggaaccagttctccctgaagctgtctagcgtgacagccgccgataccgccgtgtactactgcaccagagaggacagcagcaactggcggagtagaggccagggaacactggtcacagttagctctctcgagagccagcctcacaccaagcccagcgtgttcgtgatgaagaacggcaccaacgtggcctgcctcgtgaaagagttctaccccaaggacatcaggatcaacctggtgtccagcaagaagatcaccgagttcgaccccgccatcgtgatctcccccagcggcaagtacaacgccgtgaagctggggaagtacgaggacagcaacagcgtgacctgctccgtgcagcacgacaacaagaccgtgcacagcaccgactttgaagtgaaaaccgactccaccgaccacgtgaagcccaaagagacagagaacaccaagcagcccagcaagagctgccacaagcccaaggccatcgtgcacaccgagaaagtgaacatgatgagcctgaccgtgctgggcctgcggatgctgttcgccaaaaccgtggccgtgaacttcctgctgaccgccaagctgttcttcctcagggccaagcgatctggatctggagcaacaaacttctcactactcaaacaagcaggtgacgtggaggagaatcccgggcctactagtatggactggatttggcgcatccttttccttgtcggcgctgctaccggcgcgcattccttcgaagtgcagctgcttgaaagtggcggcggactgattcagcctggcggatctctgagactgagctgtgccgccagcggcttcaccttttctagccacgccatgacctgggtccgacaggcacctggaaaagggcttgaatgggtgtccgccatcagcggctctggcgattacacacactacgccgacagcgtgaagggcagattcaccatcagcagagacaacagcaagaacaccgtgtacctccagatgaacagcctgagagccgaggacagcgccgtgtattattgcgccaaggatgaggatggcggcagcctgcttggacacagaggacaaggcaccctggtcaccgtttcttccacgcgtgacaagcagctggacgccgacgtgtcccccaagcctaccatcttcctgccctctatcgccgagacaaagctccagaaggccggcacctacctgtgcctgctggaaaagttcttcccagatgtgattaagatccactggcaggaaaagaagtccaacaccatcctgggcagccaggaaggcaacaccatgaagaccaacgacacctacatgaagttcagctggctgaccgtgcccgagaagtccctggacaaagaacacagatgcatcgtgcggcacgaaaacaacaagaacggcgtggaccaggaaatcatcttcccacccatcaagaccgatgtgattacaatggaccccaaggacaactgctccaaggacgccaacgataccctgctgctccagctgaccaacaccagcgcctactacatgtacttgttgctgctgctgaagtccgtggtgtacttcgccatcatcacatgctgcctgctgcggagaaccgccttctgctgcaacggcgagaagtct

SEQ ID NO: 6775 - DNA, 2730 bp, Artificial Sequence
  Synthetic Polynucloetide
atggccttaccagtgaccgccttgctcctgccgctggccttgctgctccacgccgccaggccgctcgaggggaaaccaattcccaaccctcttctgggactggattcaaccggcagcggcgacaagcagctggacgccgacgtgtcccccaagcctaccatcttcctgccctctatcgccgagacaaagctccagaaggccggcacctacctgtgcctgctggaaaagttcttcccagatgtgattaagatccactggcaggaaaagaagtccaacaccatcctgggcagccaggaaggcaacaccatgaagaccaacgacacctacatgaagttcagctggctgaccgtgcccgagaagtccctggacaaagaacacagatgcatcgtgcggcacgaaaacaacaagaacggcgtggaccaggaaatcatcttcccacccatcaagaccgatgtgattacaatggaccccaaggacaactgctccaaggacgccaacgataccctgctgctccagctgaccaacaccagcgcctactacatgtacttgttgctgctgctgaagtccgtggtgtacttcgccatcatcacatgctgcctgctgcggagaaccgccttctgctgcaacggcgagaagtctagggccaagcgatctggatctggagcaacaaacttctcactactcaaacaagcaggtgacgtggaggagaatcccgggcctactagcatggccttaccagtgaccgccttgctcctgccgctggccttgctgctccacgccgccaggccgcagctccagctgcaagagtctggacctggcctggtcaagcctagcgagacactgagcctgacctgtaccgtgtccggcgatagcatcagcagcggcgattactactggggctggatcagacagcctcctggcaaaggactggaatggatcggccacatctactacagcggcgtgacctactacaaccccagcctgaagtccagagtgaccatcagcgtggacaccagccggaaccagttctccctgaagctgtctagcgtgacagccgccgataccgccgtgtactactgcaccagagaggacagcagcaactggcggagtagaggccagggaacactggtcacagttagctctctcgagagcggcggaggcggatctttcgaagtgcagctgcttgaaagtggcggcggactgattcagcctggcggatctctgagactgagctgtgccgccagcggcttcaccttttctagccacgccatgacctgggtccgacaggcacctggaaaagggcttgaatgggtgtccgccatcagcggctctggcgattacacacactacgccgacagcgtgaagggcagattcaccatcagcagagacaacagcaagaacaccgtgtacctccagatgaacagcctgagagccgaggacagcgccgtgtattattgcgccaaggatgaggatggcggcagcctgcttggacacagaggacaaggcaccctggtcaccgtttcttccacgcgtgagcagaaactgatctcggaagaggatgggagcggcagccagcctcacaccaagcccagcgtgttcgtgatgaagaacggcaccaacgtggcctgcctcgtgaaagagttctaccccaaggacatcaggatcaacctggtgtccagcaagaagatcaccgagttcgaccccgccatcgtgatctcccccagcggcaagtacaacgccgtgaagctggggaagtacgaggacagcaacagcgtgacctgctccgtgcagcacgacaacaagaccgtgcacagcaccgactttgaagtgaaaaccgactccaccgaccacgtgaagcccaaagagacagagaacaccaagcagcccagcaagagctgccacaagcccaaggccatcgtgcacaccgagaaagtgaacatgatgagcctgaccgtgctgggcctgcggatgctgttcgccaaaaccgtggccgtgaacttcctgctgaccgccaagctgttcttcctccgcgccaagagaagcggatctggcgtgaagcagaccctgaatttcgacctgctgaagctggctggcgacgtggaatccaacccaggcccttctagaggccatatgaccgagtacaagcccacggtgcgcctcgccacccgcgacgacgtccccagggccgtacgcaccctcgccgccgcgttcgccgactaccccgccacgcgccacaccgtcgatccggaccgccacatcgagcgggtcaccgagctgcaagaactcttcctcacgcgcgtcgggctcgacatcggcaaggtgtgggtcgcggacgacggcgccgcggtggcggtctggaccacgccggagagcgtcgaagcgggggcggtgttcgccgagatcggcccgcgcatggccgagttgagcggttcccggctggccgcgcagcaacagatggaaggcctcctggcgccgcaccggcccaaggagcccgcgtggttcctggccaccgtcggcgtctcgcccgaccaccagggcaagggtctgggcagcgccgtcgtgctccccggagtggaggcggccgagcgcgccggggtgcccgccttcctggagacctccgcgccccgcaacctccccttctacgagcggctcggcttcaccgtcaccgccgacgtcgaggtgcccgaaggaccgcgcacctggtgcatgacccgcaagcccggtgcctga

SEQ ID NO: 6776 - DNA, 3120 bp, Artificial Sequence
  Synthetic Polynucloetide
atggccttaccagtgaccgccttgctcctgccgctggccttgctgctccacgccgccaggccgcagctccagctgcaagagtctggacctggcctggtcaagcctagcgagacactgagcctgacctgtaccgtgtccggcgatagcatcagcagcggcgattactactggggctggatcagacagcctcctggcaaaggactggaatggatcggccacatctactacagcggcgtgacctactacaaccccagcctgaagtccagagtgaccatcagcgtggacaccagccggaaccagttctccctgaagctgtctagcgtgacagccgccgataccgccgtgtactactgcaccagagaggacagcagcaactggcggagtagaggccagggaacactggtcacagttagctctggacagcctaaggccaatcctaccgtgacactgttccctccaagcagcgaagaactccaggccaacaaggccacacttgtgtgcctgatctccgacttctaccctggggctgtgacagtggcttggaaggccgatggatctcctgtgaaagccggcgtggaaaccaccaagccatccaagcagagcaacaacaaatacgccgccagctcctacctgagcctgacacctgagcagtggaagtcccacagatcctacagctgccaagtgacccacgaaggcagcaccgtggaaaagacagtggcccctacagagtgcagcggatcccagagcttcggcctgctggaccccaagctgtgctacctgctggatggcatcctgttcatctacggcgtgatcctgaccgccctgttcctgagagtgaagttcagcagaagcgccgacgcccctgcctaccagcagggacagaaccaactgtacaacgagctgaacctgggcagacgggaagagtacgacgtgctggacaagcggagaggcagggaccctgagatgggcggaaagccccagcggagaaagaacccccaggaaggactgtataacgaactccagaaagacaagatggccgaagcctacagcgagatcggcatgaagggcgagcggagaagaggcaagggccacgatggcctgtaccagggcctgagcaccgccaccaaggacacctatgacgccctgcacatgcaggccctgcctccaagaagggccaagcgatctggatctggagcaacaaacttctcactactcaaacaagcaggtgacgtggaggagaatcccgggcctactagtatggactggatttggcgcatccttttccttgtcggcgctgctaccggcgcgcattccttcgaagtgcagctgcttgaaagtggcggcggactgattcagcctggcggatctctgagactgagctgtgccgccagcggcttcaccttttctagccacgccatgacctgggtccgacaggcacctggaaaagggcttgaatgggtgtccgccatcagcggctctggcgattacacacactacgccgacagcgtgaagggcagattcaccatcagcagagacaacagcaagaacaccgtgtacctccagatgaacagcctgagagccgaggacagcgccgtgtattattgcgccaaggatgaggatggcggcagcctgcttggacacagaggacaaggcaccctggtcaccgtttcttccgcctctacaaagggaccctccgtgtttcctctggctcccagcagcaagtctacaagcggaggaacagccgctctgggctgcctggtcaaggattactttcccgagcctgtgaccgtgtcctggaatagcggagcactgacaagcggcgtgcacacctttccagccgtgctgcaaagcagcggcctgtactctctgagcagcgtggtcacagtgcctagctctagcctgggcacccagacctacatctgcaatgtgaaccacaagcctagcaacaccaaggtggacaagagagtggaacccaagagctgtggtacccagagttttgggttgttggaccctaaattgtgctatctgttggacggaatcctgttcatttacggagtgatcctgaccgcattgttcctgcgggttaagttttccagatccgcagacgcacccgcttaccaacaagggcagaaccaactctacaatgaacttaatttggggcggagggaagagtacgacgttctggacaaaaggaggggacgagatcccgagatgggcggaaagcctcagcgaaggaagaatccgcaagaggggctttataacgaactccagaaagataaaatggcagaagcctatagtgagattgggatgaagggagaaaggaggaggggtaaaggtcacgatgggttgtaccaaggattgagcacagccactaaagatacctatgatgcgctccacatgcaggccctgccgccaagacgcgccaagagaagcggatctggcgtgaagcagaccctgaatttcgacctgctgaagctggctggcgacgtggaatccaacccaggcccttctagaggccatatgaccgagtacaagcccacggtgcgcctcgccacccgcgacgacgtccccagggccgtacgcaccctcgccgccgcgttcgccgactaccccgccacgcgccacaccgtcgatccggaccgccacatcgagcgggtcaccgagctgcaagaactcttcctcacgcgcgtcgggctcgacatcggcaaggtgtgggtcgcggacgacggcgccgcggtggcggtctggaccacgccggagagcgtcgaagcgggggcggtgttcgccgagatcggcccgcgcatggccgagttgagcggttcccggctggccgcgcagcaacagatggaaggcctcctggcgccgcaccggcccaaggagcccgcgtggttcctggccaccgtcggcgtctcgcccgaccaccagggcaagggtctgggcagcgccgtcgtgctccccggagtggaggcggccgagcgcgccggggtgcccgccttcctggagacctccgcgccccgcaacctccccttctacgagcggctcggcttcaccgtcaccgccgacgtcgaggtgcccgaaggaccgcgcacctggtgcatgacccgcaagcccggtgcctga

SEQ ID NO: 6777 - DNA, 2475 bp, Artificial Sequence
  Synthetic Polynucloetide
atggccttaccagtgaccgccttgctcctgccgctggccttgctgctccacgccgccaggccgcagctccagctgcaagagtctggacctggcctggtcaagcctagcgagacactgagcctgacctgtaccgtgtccggcgatagcatcagcagcggcgattactactggggctggatcagacagcctcctggcaaaggactggaatggatcggccacatctactacagcggcgtgacctactacaaccccagcctgaagtccagagtgaccatcagcgtggacaccagccggaaccagttctccctgaagctgtctagcgtgacagccgccgataccgccgtgtactactgcaccagagaggacagcagcaactggcggagtagaggccagggaacactggtcacagttagctctctcgaggacctgaagaacgtgttcccacctgaggtggccgtgttcgagcctagcgaggccgagatcagccacacccagaaagccaccctcgtgtgcctggctaccggcttctaccccgaccatgtggaactgtcttggtgggtcaacggcaaagaggtgcacagcggcgtgtctaccgacccccagccactgaaagaacagcccgccctgaacgacagccggtactgcctgagcagcagactgagagtgtccgccaccttctggcagaacccccggaaccacttcagatgccaggtgcagttctacggcctgagcgagaacgacgagtggacccaggacagagccaagcccgtgacccagatcgtgtctgccgaagcctggggcagagccgattgcggatcccagagcttcggcctgctggaccccaagctgtgctacctgctggatggcatcctgttcatctacggcgtgatcctgaccgccctgttcctgagagtgaagttcagcagaagcgccgacgcccctgcctaccagcagggacagaaccaactgtacaacgagctgaacctgggcagacgggaagagtacgacgtgctggacaagcggagaggcagggaccctgagatgggcggaaagccccagcggagaaagaacccccaggaaggactgtataacgaactccagaaagacaagatggccgaagcctacagcgagatcggcatgaagggcgagcggagaagaggcaagggccacgatggcctgtaccagggcctgagcaccgccaccaaggacacctatgacgccctgcacatgcaggccctgcctccaagaagggccaagcgatctggatctggagcaacaaacttctcactactcaaacaagcaggtgacgtggaggagaatcccgggcctactagtatggactggatttggcgcatccttttccttgtcggcgctgctaccggcgcgcattccttcgaagtgcagctgcttgaaagtggcggcggactgattcagcctggcggatctctgagactgagctgtgccgccagcggcttcaccttttctagccacgccatgacctgggtccgacaggcacctggaaaagggcttgaatgggtgtccgccatcagcggctctggcgattacacacactacgccgacagcgtgaagggcagattcaccatcagcagagacaacagcaagaacaccgtgtacctccagatgaacagcctgagagccgaggacagcgccgtgtattattgcgccaaggatgaggatggcggcagcctgcttggacacagaggacaaggcaccctggtcaccgtttcttccacgcgtatccagaaccctgatcctgccgtgtaccagctgcgggatagcaagagcagcgacaagagcgtgtgtctgttcaccgacttcgacagccagaccaacgtgtcccagagcaaggactccgacgtgtacatcaccgataagaccgtgctggacatgcggagcatggacttcaagagcaactccgccgtggcctggtccaacaagtccgatttcgcctgcgccaacgccttcaacaacagcattatccccgaggacacattcttcccaagccccgagagcagctgcggtacccagagttttgggttgttggaccctaaattgtgctatctgttggacggaatcctgttcatttacggagtgatcctgaccgcattgttcctgcgggttaagttttccagatccgcagacgcacccgcttaccaacaagggcagaaccaactctacaatgaacttaatttggggcggagggaagagtacgacgttctggacaaaaggaggggacgagatcccgagatgggcggaaagcctcagcgaaggaagaatccgcaagaggggctttataacgaactccagaaagataaaatggcagaagcctatagtgagattgggatgaagggagaaaggaggaggggtaaaggtcacgatgggttgtaccaaggattgagcacagccactaaagatacctatgatgcgctccacatgcaggccctgccgccaaga

SEQ ID NO: 6778 - DNA, 2475 bp, Artificial Sequence
  Synthetic Polynucloetide
atggccttaccagtgaccgccttgctcctgccgctggccttgctgctccacgccgccaggccgcagctccagctgcaagagtctggacctggcctggtcaagcctagcgagacactgagcctgacctgtaccgtgtccggcgatagcatcagcagcggcgattactactggggctggatcagacagcctcctggcaaaggactggaatggatcggccacatctactacagcggcgtgacctactacaaccccagcctgaagtccagagtgaccatcagcgtggacaccagccggaaccagttctccctgaagctgtctagcgtgacagccgccgataccgccgtgtactactgcaccagagaggacagcagcaactggcggagtagaggccagggaacactggtcacagttagctctctcgaggacctgaagaacgtgttcccacctgaggtggccgtgttcgagcctagcaaggccgagatcgcccacacccagaaagccaccctcgtgtgcctggctaccggcttctaccccgaccatgtggaactgtcttggtgggtcaacggcaaagaggtgcacagcggcgtgtgtaccgacccccagccactgaaagaacagcccgccctgaacgacagccggtactgcctgagcagcagactgagagtgtccgccaccttctggcagaacccccggaaccacttcagatgccaggtgcagttctacggcctgagcgagaacgacgagtggacccaggacagagccaagcccgtgacccagatcgtgtctgccgaagcctggggcagagccgattgcggatcccagagcttcggcctgctggaccccaagctgtgctacctgctggatggcatcctgttcatctacggcgtgatcctgaccgccctgttcctgagagtgaagttcagcagaagcgccgacgcccctgcctaccagcagggacagaaccaactgtacaacgagctgaacctgggcagacgggaagagtacgacgtgctggacaagcggagaggcagggaccctgagatgggcggaaagccccagcggagaaagaacccccaggaaggactgtataacgaactccagaaagacaagatggccgaagcctacagcgagatcggcatgaagggcgagcggagaagaggcaagggccacgatggcctgtaccagggcctgagcaccgccaccaaggacacctatgacgccctgcacatgcaggccctgcctccaagaagggccaagcgatctggatctggagcaacaaacttctcactactcaaacaagcaggtgacgtggaggagaatcccgggcctactagtatggactggatttggcgcatccttttccttgtcggcgctgctaccggcgcgcattccttcgaagtgcagctgcttgaaagtggcggcggactgattcagcctggcggatctctgagactgagctgtgccgccagcggcttcaccttttctagccacgccatgacctgggtccgacaggcacctggaaaagggcttgaatgggtgtccgccatcagcggctctggcgattacacacactacgccgacagcgtgaagggcagattcaccatcagcagagacaacagcaagaacaccgtgtacctccagatgaacagcctgagagccgaggacagcgccgtgtattattgcgccaaggatgaggatggcggcagcctgcttggacacagaggacaaggcaccctggtcaccgtttcttccacgcgtatccagaaccctgatcctgccgtgtaccagctgcgggatagcaagagcagcgacaagagcgtgtgtctgttcaccgacttcgacagccagaccaacgtgtcccagagcaaggactccgacgtgtacatcaccgataagtgcgtgctggacatgcggagcatggacttcaagagcaactccgccgtggcctggtccaacaagtccgatttcgcctgcgccaacgccttcaacaacagcattatccccgaggacacattcttcccaagcagcgacgtgccctgcggtacccagagttttgggttgttggaccctaaattgtgctatctgttggacggaatcctgttcatttacggagtgatcctgaccgcattgttcctgcgggttaagttttccagatccgcagacgcacccgcttaccaacaagggcagaaccaactctacaatgaacttaatttggggcggagggaagagtacgacgttctggacaaaaggaggggacgagatcccgagatgggcggaaagcctcagcgaaggaagaatccgcaagaggggctttataacgaactccagaaagataaaatggcagaagcctatagtgagattgggatgaagggagaaaggaggaggggtaaaggtcacgatgggttgtaccaaggattgagcacagccactaaagatacctatgatgcgctccacatgcaggccctgccgccaaga

SEQ ID NO: 6779 - DNA, 2688 bp, Artificial Sequence
  Synthetic Polynucloetide
atggccttaccagtgaccgccttgctcctgccgctggccttgctgctccacgccgccaggccgcagctccagctgcaagagtctggacctggcctggtcaagcctagcgagacactgagcctgacctgtaccgtgtccggcgatagcatcagcagcggcgattactactggggctggatcagacagcctcctggcaaaggactggaatggatcggccacatctactacagcggcgtgacctactacaaccccagcctgaagtccagagtgaccatcagcgtggacaccagccggaaccagttctccctgaagctgtctagcgtgacagccgccgataccgccgtgtactactgcaccagagaggacagcagcaactggcggagtagaggccagggaacactggtcacagttagctctctcgaggggaaaccaattcccaaccctcttctgggactggattcaaccggcagcggcgaggacctgaagaacgtgttcccacctgaggtggccgtgttcgagcctagcgaggccgagatcagccacacccagaaagccaccctcgtgtgcctggctaccggcttctaccccgaccatgtggaactgtcttggtgggtcaacggcaaagaggtgcacagcggcgtgtctaccgacccccagccactgaaagaacagcccgccctgaacgacagccggtactgcctgagcagcagactgagagtgtccgccaccttctggcagaacccccggaaccacttcagatgccaggtgcagttctacggcctgagcgagaacgacgagtggacccaggacagagccaagcccgtgacccagatcgtgtctgccgaagcctggggcagagccgattgcggatcccagagcttcggcctgctggaccccaagctgtgctacctgctggatggcatcctgttcatctacggcgtgatcctgaccgccctgttcctgagagtgaagttcagcagaagcgccgacgcccctgcctaccagcagggacagaaccaactgtacaacgagctgaacctgggcagacgggaagagtacgacgtgctggacaagcggagaggcagggaccctgagatgggcggaaagccccagcggagaaagaacccccaggaaggactgtataacgaactccagaaagacaagatggccgaagcctacagcgagatcggcatgaagggcgagcggagaagaggcaagggccacgatggcctgtaccagggcctgagcaccgccaccaaggacacctatgacgccctgcacatgcaggccctgcctccaagaagggccaagcgatctggatctggagcaacaaacttctcactactcaaacaagcaggtgacgtggaggagaatcccgggcctactagtatggactggatttggcgcatccttttccttgtcggcgctgctaccggcgcgcattccttcgaagtgcagctgcttgaaagtggcggcggactgattcagcctggcggatctctgagactgagctgtgccgccagcggcttcaccttttctagccacgccatgacctgggtccgacaggcacctggaaaagggcttgaatgggtgtccgccatcagcggctctggcgattacacacactacgccgacagcgtgaagggcagattcaccatcagcagagacaacagcaagaacaccgtgtacctccagatgaacagcctgagagccgaggacagcgccgtgtattattgcgccaaggatgaggatggcggcagcctgcttggacacagaggacaaggcaccctggtcaccgtttcttccacgcgtgagcagaaactgatctcggaagaggatgggagcggcatccagaaccctgatcctgccgtgtaccagctgcgggatagcaagagcagcgacaagagcgtgtgtctgttcaccgacttcgacagccagaccaacgtgtcccagagcaaggactccgacgtgtacatcaccgataagaccgtgctggacatgcggagcatggacttcaagagcaactccgccgtggcctggtccaacaagtccgatttcgcctgcgccaacgccttcaacaacagcattatccccgaggacacattcttcccaagccccgagagcagctgcggtacccagagttttgggttgttggaccctaaattgtgctatctgttggacggaatcctgttcatttacggagtgatcctgaccgcattgttcctgaggagcaagcggtcacggctgctccacagcgattacatgaatatgacaccacgaagaccgggtcctactcgcaaacactaccaaccctacgcacctccccgcgactttgcagcgtaccgatctcgggttaagttttccagatccgcagacgcacccgcttaccaacaagggcagaaccaactctacaatgaacttaatttggggcggagggaagagtacgacgttctggacaaaaggaggggacgagatcccgagatgggcggaaagcctcagcgaaggaagaatccgcaagaggggctttataacgaactccagaaagataaaatggcagaagcctatagtgagattgggatgaagggagaaaggaggaggggtaaaggtcacgatgggttgtaccaaggattgagcacagccactaaagatacctatgatgcgctccacatgcaggccctgccgccaaga

SEQ ID NO: 6780 - DNA, 2811 bp, Artificial Sequence
  Synthetic Polynucloetide
atggccttaccagtgaccgccttgctcctgccgctggccttgctgctccacgccgccaggccgcagctccagctgcaagagtctggacctggcctggtcaagcctagcgagacactgagcctgacctgtaccgtgtccggcgatagcatcagcagcggcgattactactggggctggatcagacagcctcctggcaaaggactggaatggatcggccacatctactacagcggcgtgacctactacaaccccagcctgaagtccagagtgaccatcagcgtggacaccagccggaaccagttctccctgaagctgtctagcgtgacagccgccgataccgccgtgtactactgcaccagagaggacagcagcaactggcggagtagaggccagggaacactggtcacagttagctctctcgaggggaaaccaattcccaaccctcttctgggactggattcaaccggcagcggcgaggacctgaagaacgtgttcccacctgaggtggccgtgttcgagcctagcgaggccgagatcagccacacccagaaagccaccctcgtgtgcctggctaccggcttctaccccgaccatgtggaactgtcttggtgggtcaacggcaaagaggtgcacagcggcgtgtctaccgacccccagccactgaaagaacagcccgccctgaacgacagccggtactgcctgagcagcagactgagagtgtccgccaccttctggcagaacccccggaaccacttcagatgccaggtgcagttctacggcctgagcgagaacgacgagtggacccaggacagagccaagcccgtgacccagatcgtgtctgccgaagcctggggcagagccgattgcggatcccagagcttcggcctgctggaccccaagctgtgctacctgctggatggcatcctgttcatctacggcgtgatcctgaccgccctgttcctgaggagtaagaggagcaggctcctgcacagtgactacatgaacatgactccacgccgccccggacccacccgcaagcattaccagccctatgccccaccacgcgacttcgcagcctatcgctccagagtgaagttcagcagaagcgccgacgcccctgcctaccagcagggacagaaccaactgtacaacgagctgaacctgggcagacgggaagagtacgacgtgctggacaagcggagaggcagggaccctgagatgggcggaaagccccagcggagaaagaacccccaggaaggactgtataacgaactccagaaagacaagatggccgaagcctacagcgagatcggcatgaagggcgagcggagaagaggcaagggccacgatggcctgtaccagggcctgagcaccgccaccaaggacacctatgacgccctgcacatgcaggccctgcctccaagaagggccaagcgatctggatctggagcaacaaacttctcactactcaaacaagcaggtgacgtggaggagaatcccgggcctactagtatggactggatttggcgcatccttttccttgtcggcgctgctaccggcgcgcattccttcgaagtgcagctgcttgaaagtggcggcggactgattcagcctggcggatctctgagactgagctgtgccgccagcggcttcaccttttctagccacgccatgacctgggtccgacaggcacctggaaaagggcttgaatgggtgtccgccatcagcggctctggcgattacacacactacgccgacagcgtgaagggcagattcaccatcagcagagacaacagcaagaacaccgtgtacctccagatgaacagcctgagagccgaggacagcgccgtgtattattgcgccaaggatgaggatggcggcagcctgcttggacacagaggacaaggcaccctggtcaccgtttcttccacgcgtgagcagaaactgatctcggaagaggatgggagcggcatccagaaccctgatcctgccgtgtaccagctgcgggatagcaagagcagcgacaagagcgtgtgtctgttcaccgacttcgacagccagaccaacgtgtcccagagcaaggactccgacgtgtacatcaccgataagaccgtgctggacatgcggagcatggacttcaagagcaactccgccgtggcctggtccaacaagtccgatttcgcctgcgccaacgccttcaacaacagcattatccccgaggacacattcttcccaagccccgagagcagctgcggtacccagagttttgggttgttggaccctaaattgtgctatctgttggacggaatcctgttcatttacggagtgatcctgaccgcattgttcctgaggagcaagcggtcacggctgctccacagcgattacatgaatatgacaccacgaagaccgggtcctactcgcaaacactaccaaccctacgcacctccccgcgactttgcagcgtaccgatctcgggttaagttttccagatccgcagacgcacccgcttaccaacaagggcagaaccaactctacaatgaacttaatttggggcggagggaagagtacgacgttctggacaaaaggaggggacgagatcccgagatgggcggaaagcctcagcgaaggaagaatccgcaagaggggctttataacgaactccagaaagataaaatggcagaagcctatagtgagattgggatgaagggagaaaggaggaggggtaaaggtcacgatgggttgtaccaaggattgagcacagccactaaagatacctatgatgcgctccacatgcaggccctgccgccaaga

SEQ ID NO: 6781 - DNA, 2694 bp, Artificial Sequence
  Synthetic Polynucloetide
atggccttaccagtgaccgccttgctcctgccgctggccttgctgctccacgccgccaggccgcagctccagctgcaagagtctggacctggcctggtcaagcctagcgagacactgagcctgacctgtaccgtgtccggcgatagcatcagcagcggcgattactactggggctggatcagacagcctcctggcaaaggactggaatggatcggccacatctactacagcggcgtgacctactacaaccccagcctgaagtccagagtgaccatcagcgtggacaccagccggaaccagttctccctgaagctgtctagcgtgacagccgccgataccgccgtgtactactgcaccagagaggacagcagcaactggcggagtagaggccagggaacactggtcacagttagctctctcgaggggaaaccaattcccaaccctcttctgggactggattcaaccggcagcggcgaggacctgaagaacgtgttcccacctgaggtggccgtgttcgagcctagcgaggccgagatcagccacacccagaaagccaccctcgtgtgcctggctaccggcttctaccccgaccatgtggaactgtcttggtgggtcaacggcaaagaggtgcacagcggcgtgtctaccgacccccagccactgaaagaacagcccgccctgaacgacagccggtactgcctgagcagcagactgagagtgtccgccaccttctggcagaacccccggaaccacttcagatgccaggtgcagttctacggcctgagcgagaacgacgagtggacccaggacagagccaagcccgtgacccagatcgtgtctgccgaagcctggggcagagccgattgcggatcccagagcttcggcctgctggaccccaagctgtgctacctgctggatggcatcctgttcatctacggcgtgatcctgaccgccctgttcctgagagtgaagttcagcagaagcgccgacgcccctgcctaccagcagggacagaaccaactgtacaacgagctgaacctgggcagacgggaagagtacgacgtgctggacaagcggagaggcagggaccctgagatgggcggaaagccccagcggagaaagaacccccaggaaggactgtataacgaactccagaaagacaagatggccgaagcctacagcgagatcggcatgaagggcgagcggagaagaggcaagggccacgatggcctgtaccagggcctgagcaccgccaccaaggacacctatgacgccctgcacatgcaggccctgcctccaagaagggccaagcgatctggatctggagcaacaaacttctcactactcaaacaagcaggtgacgtggaggagaatcccgggcctactagtatggactggatttggcgcatccttttccttgtcggcgctgctaccggcgcgcattccttcgaagtgcagctgcttgaaagtggcggcggactgattcagcctggcggatctctgagactgagctgtgccgccagcggcttcaccttttctagccacgccatgacctgggtccgacaggcacctggaaaagggcttgaatgggtgtccgccatcagcggctctggcgattacacacactacgccgacagcgtgaagggcagattcaccatcagcagagacaacagcaagaacaccgtgtacctccagatgaacagcctgagagccgaggacagcgccgtgtattattgcgccaaggatgaggatggcggcagcctgcttggacacagaggacaaggcaccctggtcaccgtttcttccacgcgtgagcagaaactgatctcggaagaggatctggggagcggcatccagaaccctgatcctgccgtgtaccagctgcgggatagcaagagcagcgacaagagcgtgtgtctgttcaccgacttcgacagccagaccaacgtgtcccagagcaaggactccgacgtgtacatcaccgataagaccgtgctggacatgcggagcatggacttcaagagcaactccgccgtggcctggtccaacaagtccgatttcgcctgcgccaacgccttcaacaacagcattatccccgaggacacattcttcccaagccccgagagcagctgcggtacccagagttttgggttgttggaccctaaattgtgctatctgttggacggaatcctgttcatttacggagtgatcctgaccgcattgttcctgaagagaggccggaagaagctgctgtacatcttcaagcagcctttcatgcggcccgtgcagaccacccaggaagaggacggctgctcctgccggttccccgaggaagaagaaggcggctgcgagctgcgggttaagttttccagatccgcagacgcacccgcttaccaacaagggcagaaccaactctacaatgaacttaatttggggcggagggaagagtacgacgttctggacaaaaggaggggacgagatcccgagatgggcggaaagcctcagcgaaggaagaatccgcaagaggggctttataacgaactccagaaagataaaatggcagaagcctatagtgagattgggatgaagggagaaaggaggaggggtaaaggtcacgatgggttgtaccaaggattgagcacagccactaaagatacctatgatgcgctccacatgcaggccctgccgccaaga

SEQ ID NO: 6782 - DNA, 2820 bp, Artificial Sequence
  Synthetic Polynucloetide
atggccttaccagtgaccgccttgctcctgccgctggccttgctgctccacgccgccaggccgcagctccagctgcaagagtctggacctggcctggtcaagcctagcgagacactgagcctgacctgtaccgtgtccggcgatagcatcagcagcggcgattactactggggctggatcagacagcctcctggcaaaggactggaatggatcggccacatctactacagcggcgtgacctactacaaccccagcctgaagtccagagtgaccatcagcgtggacaccagccggaaccagttctccctgaagctgtctagcgtgacagccgccgataccgccgtgtactactgcaccagagaggacagcagcaactggcggagtagaggccagggaacactggtcacagttagctctctcgaggggaaaccaattcccaaccctcttctgggactggattcaaccggcagcggcgaggacctgaagaacgtgttcccacctgaggtggccgtgttcgagcctagcgaggccgagatcagccacacccagaaagccaccctcgtgtgcctggctaccggcttctaccccgaccatgtggaactgtcttggtgggtcaacggcaaagaggtgcacagcggcgtgtctaccgacccccagccactgaaagaacagcccgccctgaacgacagccggtactgcctgagcagcagactgagagtgtccgccaccttctggcagaacccccggaaccacttcagatgccaggtgcagttctacggcctgagcgagaacgacgagtggacccaggacagagccaagcccgtgacccagatcgtgtctgccgaagcctggggcagagccgattgcggatcccagagcttcggcctgctggaccccaagctgtgctacctgctggatggcatcctgttcatctacggcgtgatcctgaccgccctgttcctgaaacggggcagaaagaaactcctgtatatattcaaacaaccatttatgagaccagtacaaactactcaagaggaagatggctgtagctgccgatttccagaagaagaagaaggaggatgtgaactgagagtgaagttcagcagaagcgccgacgcccctgcctaccagcagggacagaaccaactgtacaacgagctgaacctgggcagacgggaagagtacgacgtgctggacaagcggagaggcagggaccctgagatgggcggaaagccccagcggagaaagaacccccaggaaggactgtataacgaactccagaaagacaagatggccgaagcctacagcgagatcggcatgaagggcgagcggagaagaggcaagggccacgatggcctgtaccagggcctgagcaccgccaccaaggacacctatgacgccctgcacatgcaggccctgcctccaagaagggccaagcgatctggatctggagcaacaaacttctcactactcaaacaagcaggtgacgtggaggagaatcccgggcctactagtatggactggatttggcgcatccttttccttgtcggcgctgctaccggcgcgcattccttcgaagtgcagctgcttgaaagtggcggcggactgattcagcctggcggatctctgagactgagctgtgccgccagcggcttcaccttttctagccacgccatgacctgggtccgacaggcacctggaaaagggcttgaatgggtgtccgccatcagcggctctggcgattacacacactacgccgacagcgtgaagggcagattcaccatcagcagagacaacagcaagaacaccgtgtacctccagatgaacagcctgagagccgaggacagcgccgtgtattattgcgccaaggatgaggatggcggcagcctgcttggacacagaggacaaggcaccctggtcaccgtttcttccacgcgtgagcagaaactgatctcggaagaggatctggggagcggcatccagaaccctgatcctgccgtgtaccagctgcgggatagcaagagcagcgacaagagcgtgtgtctgttcaccgacttcgacagccagaccaacgtgtcccagagcaaggactccgacgtgtacatcaccgataagaccgtgctggacatgcggagcatggacttcaagagcaactccgccgtggcctggtccaacaagtccgatttcgcctgcgccaacgccttcaacaacagcattatccccgaggacacattcttcccaagccccgagagcagctgcggtacccagagttttgggttgttggaccctaaattgtgctatctgttggacggaatcctgttcatttacggagtgatcctgaccgcattgttcctgaagagaggccggaagaagctgctgtacatcttcaagcagcctttcatgcggcccgtgcagaccacccaggaagaggacggctgctcctgccggttccccgaggaagaagaaggcggctgcgagctgcgggttaagttttccagatccgcagacgcacccgcttaccaacaagggcagaaccaactctacaatgaacttaatttggggcggagggaagagtacgacgttctggacaaaaggaggggacgagatcccgagatgggcggaaagcctcagcgaaggaagaatccgcaagaggggctttataacgaactccagaaagataaaatggcagaagcctatagtgagattgggatgaagggagaaaggaggaggggtaaaggtcacgatgggttgtaccaaggattgagcacagccactaaagatacctatgatgcgctccacatgcaggccctgccgccaaga

SEQ ID NO: 6783 - DNA, 2493 bp, Artificial Sequence
  Synthetic Polynucloetide
atggccttaccagtgaccgccttgctcctgccgctggccttgctgctccacgccgccaggccgcagctccagctgcaagagtctggacctggcctggtcaagcctagcgagacactgagcctgacctgtaccgtgtccggcgatagcatcagcagcggcgattactactggggctggatcagacagcctcctggcaaaggactggaatggatcggccacatctactacagcggcgtgacctactacaaccccagcctgaagtccagagtgaccatcagcgtggacaccagccggaaccagttctccctgaagctgtctagcgtgacagccgccgataccgccgtgtactactgcaccagagaggacagcagcaactggcggagtagaggccagggaacactggtcacagttagctctctcgagcagagcttcggcctgctggaccccaagctgtgctacctgctggatggcatcctgttcatctacggcgtgatcctgaccgccctgttcctgagagtgaagttcagcagaagcgccgacgcccctgcctaccagcagggacagaaccaactgtacaacgagctgaacctgggcagacgggaagagtacgacgtgctggacaagcggagaggcagggaccctgagatgggcggaaagccccagcggagaaagaacccccaggaaggactgtataacgaactccagaaagacaagatggccgaagcctacagcgagatcggcatgaagggcgagcggagaagaggcaagggccacgatggcctgtaccagggcctgagcaccgccaccaaggacacctatgacgccctgcacatgcaggccctgcctccaagaagggccaagcgatctggatctggagcaacaaacttctcactactcaaacaagcaggtgacgtggaggagaatcccgggcctactagtatggactggatttggcgcatccttttccttgtcggcgctgctaccggcgcgcattccttcgaagtgcagctgcttgaaagtggcggcggactgattcagcctggcggatctctgagactgagctgtgccgccagcggcttcaccttttctagccacgccatgacctgggtccgacaggcacctggaaaagggcttgaatgggtgtccgccatcagcggctctggcgattacacacactacgccgacagcgtgaagggcagattcaccatcagcagagacaacagcaagaacaccgtgtacctccagatgaacagcctgagagccgaggacagcgccgtgtattattgcgccaaggatgaggatggcggcagcctgcttggacacagaggacaaggcaccctggtcaccgtttcttccacgcgtcagagttttgggttgttggaccctaaattgtgctatctgttggacggaatcctgttcatttacggagtgatcctgaccgcattgttcctgcgggttaagttttccagatccgcagacgcacccgcttaccaacaagggcagaaccaactctacaatgaacttaatttggggcggagggaagagtacgacgttctggacaaaaggaggggacgagatcccgagatgggcggaaagcctcagcgaaggaagaatccgcaagaggggctttataacgaactccagaaagataaaatggcagaagcctatagtgagattgggatgaagggagaaaggaggaggggtaaaggtcacgatgggttgtaccaaggattgagcacagccactaaagatacctatgatgcgctccacatgcaggccctgccgccaagacgcgccaagagaagcggatctggcgtgaagcagaccctgaatttcgacctgctgaagctggctggcgacgtggaatccaacccaggcccttctagaggccatatgaccgagtacaagcccacggtgcgcctcgccacccgcgacgacgtccccagggccgtacgcaccctcgccgccgcgttcgccgactaccccgccacgcgccacaccgtcgatccggaccgccacatcgagcgggtcaccgagctgcaagaactcttcctcacgcgcgtcgggctcgacatcggcaaggtgtgggtcgcggacgacggcgccgcggtggcggtctggaccacgccggagagcgtcgaagcgggggcggtgttcgccgagatcggcccgcgcatggccgagttgagcggttcccggctggccgcgcagcaacagatggaaggcctcctggcgccgcaccggcccaaggagcccgcgtggttcctggccaccgtcggcgtctcgcccgaccaccagggcaagggtctgggcagcgccgtcgtgctccccggagtggaggcggccgagcgcgccggggtgcccgccttcctggagacctccgcgccccgcaacctccccttctacgagcggctcggcttcaccgtcaccgccgacgtcgaggtgcccgaaggaccgcgcacctggtgcatgacccgcaagcccggtgcctga

SEQ ID NO: 6784 - DNA, 1965 bp, Artificial Sequence
  Synthetic Polynucloetide
atggccttaccagtgaccgccttgctcctgccgctggccttgctgctccacgccgccaggccgcagctccagctgcaagagtctggacctggcctggtcaagcctagcgagacactgagcctgacctgtaccgtgtccggcgatagcatcagcagcggcgattactactggggctggatcagacagcctcctggcaaaggactggaatggatcggccacatctactacagcggcgtgacctactacaaccccagcctgaagtccagagtgaccatcagcgtggacaccagccggaaccagttctccctgaagctgtctagcgtgacagccgccgataccgccgtgtactactgcaccagagaggacagcagcaactggcggagtagaggccagggaacactggtcacagttagctctctcgagggacagcctaaggccaatcctaccgtgacactgttccctccaagcagcgaagaactccaggccaacaaggccacacttgtgtgcctgatctccgacttctaccctggggctgtgacagtggcttggaaggccgatggatctcctgtgaaagccggcgtggaaaccaccaagccatccaagcagagcaacaacaaatacgccgccagctcctacctgagcctgacacctgagcagtggaagtcccacagatcctacagctgccaagtgacccacgaaggcagcaccgtggaaaagacagtggcccctacagagtgcagccccatcaagaccgatgtgattacaatggaccccaaggacaactgctccaaggacgccaacgataccctgctgctccagctgaccaacaccagcgcctactacatgtacttgttgctgctgctgaagtccgtggtgtacttcgccatcatcacatgctgcctgctgcggagaaccgccttctgctgcaacggcgagaagtctagggccaagcgatctggatctggagcaacaaacttctcactactcaaacaagcaggtgacgtggaggagaatcccgggcctactagtatggactggatttggcgcatccttttccttgtcggcgctgctaccggcgcgcattccttcgaagtgcagctgcttgaaagtggcggcggactgattcagcctggcggatctctgagactgagctgtgccgccagcggcttcaccttttctagccacgccatgacctgggtccgacaggcacctggaaaagggcttgaatgggtgtccgccatcagcggctctggcgattacacacactacgccgacagcgtgaagggcagattcaccatcagcagagacaacagcaagaacaccgtgtacctccagatgaacagcctgagagccgaggacagcgccgtgtattattgcgccaaggatgaggatggcggcagcctgcttggacacagaggacaaggcaccctggtcaccgtttcttccacgcgtgcctctacaaagggaccctccgtgtttcctctggctcccagcagcaagtctacaagcggaggaacagccgctctgggctgcctggtcaaggattactttcccgagcctgtgaccgtgtcctggaatagcggagcactgacaagcggcgtgcacacctttccagccgtgctgcaaagcagcggcctgtactctctgagcagcgtggtcacagtgcctagctctagcctgggcacccagacctacatctgcaatgtgaaccacaagcctagcaacaccaaggtggacaagagagtggaacccaagagctgtgaagtgaaaaccgactccaccgaccacgtgaagcccaaagagacagagaacaccaagcagcccagcaagagctgccacaagcccaaggccatcgtgcacaccgagaaagtgaacatgatgagcctgaccgtgctgggcctgcggatgctgttcgccaaaaccgtggccgtgaacttcctgctgaccgccaagctgttcttcctc

SEQ ID NO: 6785 - DNA, 1899 bp, Artificial Sequence
  Synthetic Polynucloetide
atggccttaccagtgaccgccttgctcctgccgctggccttgctgctccacgccgccaggccgcagctccagctgcaagagtctggacctggcctggtcaagcctagcgagacactgagcctgacctgtaccgtgtccggcgatagcatcagcagcggcgattactactggggctggatcagacagcctcctggcaaaggactggaatggatcggccacatctactacagcggcgtgacctactacaaccccagcctgaagtccagagtgaccatcagcgtggacaccagccggaaccagttctccctgaagctgtctagcgtgacagccgccgataccgccgtgtactactgcaccagagaggacagcagcaactggcggagtagaggccagggaacactggtcacagttagctctctcgagggacagcctaaggccaatcctaccgtgacactgttccctccaagcagcgaagaactccaggccaacaaggccacacttgtgtgcctgatctccgacttctaccctggggctgtgacagtggcttggaaggccgatggatctcctgtgaaagccggcgtggaaaccaccaagccatccaagcagagcaacaacaaatacgccgccagctcctacctgagcctgacacctgagcagtggaagtcccacagatcctacagctgccaagtgacccacgaaggcagcaccgtggaaaagacagtggcccctacagagtgcagcggcagagccgattgcggcatcaccagcgccagctaccaccagggcgtgctgagcgccaccatcctgtacgagatcctgctgggcaaggccaccctgtacgccgtgctggtgtctgccctggtgctgatggctatggtcaagcggaaggacagccggggaagggccaagcgatctggatctggagcaacaaacttctcactactcaaacaagcaggtgacgtggaggagaatcccgggcctactagtatggactggatttggcgcatccttttccttgtcggcgctgctaccggcgcgcattccttcgaagtgcagctgcttgaaagtggcggcggactgattcagcctggcggatctctgagactgagctgtgccgccagcggcttcaccttttctagccacgccatgacctgggtccgacaggcacctggaaaagggcttgaatgggtgtccgccatcagcggctctggcgattacacacactacgccgacagcgtgaagggcagattcaccatcagcagagacaacagcaagaacaccgtgtacctccagatgaacagcctgagagccgaggacagcgccgtgtattattgcgccaaggatgaggatggcggcagcctgcttggacacagaggacaaggcaccctggtcaccgtttcttccacgcgtgcctctacaaagggaccctccgtgtttcctctggctcccagcagcaagtctacaagcggaggaacagccgctctgggctgcctggtcaaggattactttcccgagcctgtgaccgtgtcctggaatagcggagcactgacaagcggcgtgcacacctttccagccgtgctgcaaagcagcggcctgtactctctgagcagcgtggtcacagtgcctagctctagcctgggcacccagacctacatctgcaatgtgaaccacaagcctagcaacaccaaggtggacaagagagtggaacccaagagctgtatccccgaggacacattcttcccaagcagcgacgtgccctgcgacgtgaagctggtggaaaagagcttcgagacagacaccaacctgaacttccagaacctgagcgtgatcggcttcagaatcctgctgctgaaagtggccggctttaacctgctgatgaccctgcggctgtggtccagc

SEQ ID NO: 6786 - DNA, 1899 bp, Artificial Sequence
  Synthetic Polynucloetide
atggccttaccagtgaccgccttgctcctgccgctggccttgctgctccacgccgccaggccgcagctccagctgcaagagtctggacctggcctggtcaagcctagcgagacactgagcctgacctgtaccgtgtccggcgatagcatcagcagcggcgattactactggggctggatcagacagcctcctggcaaaggactggaatggatcggccacatctactacagcggcgtgacctactacaaccccagcctgaagtccagagtgaccatcagcgtggacaccagccggaaccagttctccctgaagctgtctagcgtgacagccgccgataccgccgtgtactactgcaccagagaggacagcagcaactggcggagtagaggccagggaacactggtcacagttagctctctcgagggacagcctaaggccaatcctaccgtgacactgttccctccaagcagcgaagaactccaggccaacaaggccacacttgtgtgcctgatctccgacttctaccctggggctgtgacagtggcttggaaggccgatggatctcctgtgaaagccggcgtggaaaccaccaagccatccaagcagagcaacaacaaatacgccgccagctcctacctgagcctgacacctgagcagtggaagtcccacagatcctacagctgccaagtgacccacgaaggcagcaccgtggaaaagacagtggcccctacagagtgcagcggcagagccgattgcggctttaccagcgagagctaccagcagggcgtgctgagcgccaccatcctgtacgagatcctgctgggcaaggccaccctgtacgccgtgctggtgtctgccctggtgctgatggctatggtcaagcggaaggacagccggggaagggccaagcgatctggatctggagcaacaaacttctcactactcaaacaagcaggtgacgtggaggagaatcccgggcctactagtatggactggatttggcgcatccttttccttgtcggcgctgctaccggcgcgcattccttcgaagtgcagctgcttgaaagtggcggcggactgattcagcctggcggatctctgagactgagctgtgccgccagcggcttcaccttttctagccacgccatgacctgggtccgacaggcacctggaaaagggcttgaatgggtgtccgccatcagcggctctggcgattacacacactacgccgacagcgtgaagggcagattcaccatcagcagagacaacagcaagaacaccgtgtacctccagatgaacagcctgagagccgaggacagcgccgtgtattattgcgccaaggatgaggatggcggcagcctgcttggacacagaggacaaggcaccctggtcaccgtttcttccacgcgtgcctctacaaagggaccctccgtgtttcctctggctcccagcagcaagtctacaagcggaggaacagccgctctgggctgcctggtcaaggattactttcccgagcctgtgaccgtgtcctggaatagcggagcactgacaagcggcgtgcacacctttccagccgtgctgcaaagcagcggcctgtactctctgagcagcgtggtcacagtgcctagctctagcctgggcacccagacctacatctgcaatgtgaaccacaagcctagcaacaccaaggtggacaagagagtggaacccaagagctgtatccccgaggacacattcttcccaagccccgagagcagctgcgacgtgaagctggtggaaaagagcttcgagacagacaccaacctgaacttccagaacctgagcgtgatcggcttcagaatcctgctgctgaaagtggccggctttaacctgctgatgaccctgcggctgtggtccagc

SEQ ID NO: 6787 - DNA, 1362 bp, Artificial Sequence
  Synthetic Polynucloetide
atggccttaccagtgaccgccttgctcctgccgctggccttgctgctccacgccgccaggccgcagctccagctgcaagagtctggacctggcctggtcaagcctagcgagacactgagcctgacctgtaccgtgtccggcgatagcatcagcagcggcgattactactggggctggatcagacagcctcctggcaaaggactggaatggatcggccacatctactacagcggcgtgacctactacaaccccagcctgaagtccagagtgaccatcagcgtggacaccagccggaaccagttctccctgaagctgtctagcgtgacagccgccgataccgccgtgtactactgcaccagagaggacagcagcaactggcggagtagaggccagggaacactggtcacagttagctctctcgagagcggcggaggcggatctttcgaagtgcagctgcttgaaagtggcggcggactgattcagcctggcggatctctgagactgagctgtgccgccagcggcttcaccttttctagccacgccatgacctgggtccgacaggcacctggaaaagggcttgaatgggtgtccgccatcagcggctctggcgattacacacactacgccgacagcgtgaagggcagattcaccatcagcagagacaacagcaagaacaccgtgtacctccagatgaacagcctgagagccgaggacagcgccgtgtattattgcgccaaggatgaggatggcggcagcctgcttggacacagaggacaaggcaccctggtcaccgtttcttccacgcgtgacggtaacgaggagatgggaggaatcactcaaaccccttacaaagtctcaatttcaggaacaactgttatccttacatgtccccagtatcctggcagcgagatcctttggcagcataacgacaagaatatagggggagatgaagacgataagaatatcggatctgacgaggatcacttgagcctgaaagagttctccgagcttgaacaaagcggatattatgtgtgctatccgcgcgggtcaaagccggaagacgctaacttttacctttatctccgagccagagtgtgcgaaaattgcatggaaatggacgttatgtccgttgctacaatagttatcgtagatatatgcatcacgggtggactgcttctgctggtttattattggtccaagaatagaaaggccaaagctaaacccgtgaccagaggcgctggcgcaggcggaaggcaaaggggacaaaacaaagaacggccaccaccagtgccaaatccagattatgagcctattcggaaaggacagagggacctgtactctggcctgaatcagagaagaatc

SEQ ID NO: 6788 - DNA, 1257 bp, Artificial Sequence
  Synthetic Polynucloetide
atggccttaccagtgaccgccttgctcctgccgctggccttgctgctccacgccgccaggccgcagctccagctgcaagagtctggacctggcctggtcaagcctagcgagacactgagcctgacctgtaccgtgtccggcgatagcatcagcagcggcgattactactggggctggatcagacagcctcctggcaaaggactggaatggatcggccacatctactacagcggcgtgacctactacaaccccagcctgaagtccagagtgaccatcagcgtggacaccagccggaaccagttctccctgaagctgtctagcgtgacagccgccgataccgccgtgtactactgcaccagagaggacagcagcaactggcggagtagaggccagggaacactggtcacagttagctctctcgagagcggcggaggcggatctttcgaagtgcagctgcttgaaagtggcggcggactgattcagcctggcggatctctgagactgagctgtgccgccagcggcttcaccttttctagccacgccatgacctgggtccgacaggcacctggaaaagggcttgaatgggtgtccgccatcagcggctctggcgattacacacactacgccgacagcgtgaagggcagattcaccatcagcagagacaacagcaagaacaccgtgtacctccagatgaacagcctgagagccgaggacagcgccgtgtattattgcgccaaggatgaggatggcggcagcctgcttggacacagaggacaaggcaccctggtcaccgtttcttccacgcgtttcaagatccccatcgaggaactggaagatcgggtgttcgtgaactgcaacacctctatcacctgggtggaaggcaccgtgggaacactgctgagcgacatcaccagactggacctcggcaagcggattctggaccctcggggcatctacagatgcaacggcaccgacatctacaaggacaaagaaagcaccgtgcaggtccactacagaatgtgccagtcctgcgtggaactggaccctgctacagtggccggcatcatcgtgaccgatgtgatcgctactctgctgctggctctgggagtgttctgcttcgccggacacgaaacaggcagactgtctggcgctgccgatacacaggccctgctgagaaacgaccaagtgtatcagcccctgcgcgacagagatgatgcccagtattctcacctcggcggcaactgggctagaaacaag

SEQ ID NO: 6789 - DNA, 1287 bp, Artificial Sequence
  Synthetic Polynucloetide
atggccttaccagtgaccgccttgctcctgccgctggccttgctgctccacgccgccaggccgcagctccagctgcaagagtctggacctggcctggtcaagcctagcgagacactgagcctgacctgtaccgtgtccggcgatagcatcagcagcggcgattactactggggctggatcagacagcctcctggcaaaggactggaatggatcggccacatctactacagcggcgtgacctactacaaccccagcctgaagtccagagtgaccatcagcgtggacaccagccggaaccagttctccctgaagctgtctagcgtgacagccgccgataccgccgtgtactactgcaccagagaggacagcagcaactggcggagtagaggccagggaacactggtcacagttagctctctcgagagcggcggaggcggatctttcgaagtgcagctgcttgaaagtggcggcggactgattcagcctggcggatctctgagactgagctgtgccgccagcggcttcaccttttctagccacgccatgacctgggtccgacaggcacctggaaaagggcttgaatgggtgtccgccatcagcggctctggcgattacacacactacgccgacagcgtgaagggcagattcaccatcagcagagacaacagcaagaacaccgtgtacctccagatgaacagcctgagagccgaggacagcgccgtgtattattgcgccaaggatgaggatggcggcagcctgcttggacacagaggacaaggcaccctggtcaccgtttcttccacgcgtcagagcatcaagggcaaccacctggtcaaggtgtacgactaccaagaggacggcagcgtgctgctgacatgtgatgccgaggccaagaacatcacctggtttaaggacggcaagatgatcggcttcctgaccgaggacaagaagaagtggaacctgggcagcaacgctaaggaccccagaggcatgtatcagtgcaagggcagccagaacaagagcaagcccctccaggtgtactaccggatgtgccagaactgcatcgagctgaacgccgctaccatcagcggctttctgttcgccgagatcgtgtccatcttcgtgctggccgtgggcgtgtactttatcgctggacaggatggcgtgcggcagagcagagcttccgataagcaaaccctgctgcctaacgaccagctgtaccagcctctgaaggacagagaggacgaccagtacagccacctccagggcaatcagctgagaagaaac

SEQ ID NO: 6790 - DNA, 1236 bp, Artificial Sequence
  Synthetic Polynucloetide
atggccttaccagtgaccgccttgctcctgccgctggccttgctgctccacgccgccaggccgcagctccagctgcaagagtctggacctggcctggtcaagcctagcgagacactgagcctgacctgtaccgtgtccggcgatagcatcagcagcggcgattactactggggctggatcagacagcctcctggcaaaggactggaatggatcggccacatctactacagcggcgtgacctactacaaccccagcctgaagtccagagtgaccatcagcgtggacaccagccggaaccagttctccctgaagctgtctagcgtgacagccgccgataccgccgtgtactactgcaccagagaggacagcagcaactggcggagtagaggccagggaacactggtcacagttagctctctcgagagcggcggaggcggatctttcgaagtgcagctgcttgaaagtggcggcggactgattcagcctggcggatctctgagactgagctgtgccgccagcggcttcaccttttctagccacgccatgacctgggtccgacaggcacctggaaaagggcttgaatgggtgtccgccatcagcggctctggcgattacacacactacgccgacagcgtgaagggcagattcaccatcagcagagacaacagcaagaacaccgtgtacctccagatgaacagcctgagagccgaggacagcgccgtgtattattgcgccaaggatgaggatggcggcagcctgcttggacacagaggacaaggcaccctggtcaccgtttcttccacgcgtcagagttttgggttgttggaccctaaattgtgctatctgttggacggaatcctgttcatttacggagtgatcctgaccgcattgttcctgcgggttaagttttccagatccgcagacgcacccgcttaccaacaagggcagaaccaactctacaatgaacttaatttggggcggagggaagagtacgacgttctggacaaaaggaggggacgagatcccgagatgggcggaaagcctcagcgaaggaagaatccgcaagaggggctttataacgaactccagaaagataaaatggcagaagcctatagtgagattgggatgaagggagaaaggaggaggggtaaaggtcacgatgggttgtaccaaggattgagcacagccactaaagatacctatgatgcgctccacatgcaggccctgccgccaaga

SEQ ID NO: 6791 - DNA, 1365 bp, Artificial Sequence
  Synthetic Polynucloetide
atggccttaccagtgaccgccttgctcctgccgctggccttgctgctccacgccgccaggccggaagtgcagctgcttgaaagtggcggcggactgattcagcctggcggatctctgagactgagctgtgccgccagcggcttcaccttttctagccacgccatgacctgggtccgacaggcacctggaaaagggcttgaatgggtgtccgccatcagcggctctggcgattacacacactacgccgacagcgtgaagggcagattcaccatcagcagagacaacagcaagaacaccgtgtacctccagatgaacagcctgagagccgaggacagcgccgtgtattattgcgccaaggatgaggatggcggcagcctgcttggacacagaggacaaggcaccctggtcaccgtttcttccctcgagagcggcggaggcggatctttcgaacagctccagctgcaagagtctggacctggcctggtcaagcctagcgagacactgagcctgacctgtaccgtgtccggcgatagcatcagcagcggcgattactactggggctggatcagacagcctcctggcaaaggactggaatggatcggccacatctactacagcggcgtgacctactacaaccccagcctgaagtccagagtgaccatcagcgtggacaccagccggaaccagttctccctgaagctgtctagcgtgacagccgccgataccgccgtgtactactgcaccagagaggacagcagcaactggcggagtagaggccagggaacactggtcacagttagctctacgcgtgacggtaacgaggagatgggaggaatcactcaaaccccttacaaagtctcaatttcaggaacaactgttatccttacatgtccccagtatcctggcagcgagatcctttggcagcataacgacaagaatatagggggagatgaagacgataagaatatcggatctgacgaggatcacttgagcctgaaagagttctccgagcttgaacaaagcggatattatgtgtgctatccgcgcgggtcaaagccggaagacgctaacttttacctttatctccgagccagagtgtgcgaaaattgcatggaaatggacgttatgtccgttgctacaatagttatcgtagatatatgcatcacgggtggactgcttctgctggtttattattggtccaagaatagaaaggccaaagctaaacccgtgaccagaggcgctggcgcaggcggaaggcaaaggggacaaaacaaagaacggccaccaccagtgccaaatccagattatgagcctattcggaaaggacagagggacctgtactctggcctgaatcagagaagaatc

SEQ ID NO: 6792 - DNA, 1260 bp, Artificial Sequence
  Synthetic Polynucloetide
atggccttaccagtgaccgccttgctcctgccgctggccttgctgctccacgccgccaggccggaagtgcagctgcttgaaagtggcggcggactgattcagcctggcggatctctgagactgagctgtgccgccagcggcttcaccttttctagccacgccatgacctgggtccgacaggcacctggaaaagggcttgaatgggtgtccgccatcagcggctctggcgattacacacactacgccgacagcgtgaagggcagattcaccatcagcagagacaacagcaagaacaccgtgtacctccagatgaacagcctgagagccgaggacagcgccgtgtattattgcgccaaggatgaggatggcggcagcctgcttggacacagaggacaaggcaccctggtcaccgtttcttccctcgagagcggcggaggcggatctttcgaacagctccagctgcaagagtctggacctggcctggtcaagcctagcgagacactgagcctgacctgtaccgtgtccggcgatagcatcagcagcggcgattactactggggctggatcagacagcctcctggcaaaggactggaatggatcggccacatctactacagcggcgtgacctactacaaccccagcctgaagtccagagtgaccatcagcgtggacaccagccggaaccagttctccctgaagctgtctagcgtgacagccgccgataccgccgtgtactactgcaccagagaggacagcagcaactggcggagtagaggccagggaacactggtcacagttagctctacgcgtttcaagatccccatcgaggaactggaagatcgggtgttcgtgaactgcaacacctctatcacctgggtggaaggcaccgtgggaacactgctgagcgacatcaccagactggacctcggcaagcggattctggaccctcggggcatctacagatgcaacggcaccgacatctacaaggacaaagaaagcaccgtgcaggtccactacagaatgtgccagtcctgcgtggaactggaccctgctacagtggccggcatcatcgtgaccgatgtgatcgctactctgctgctggctctgggagtgttctgcttcgccggacacgaaacaggcagactgtctggcgctgccgatacacaggccctgctgagaaacgaccaagtgtatcagcccctgcgcgacagagatgatgcccagtattctcacctcggcggcaactgggctagaaacaag

SEQ ID NO: 6793 - DNA, 1290 bp, Artificial Sequence
  Synthetic Polynucloetide
atggccttaccagtgaccgccttgctcctgccgctggccttgctgctccacgccgccaggccggaagtgcagctgcttgaaagtggcggcggactgattcagcctggcggatctctgagactgagctgtgccgccagcggcttcaccttttctagccacgccatgacctgggtccgacaggcacctggaaaagggcttgaatgggtgtccgccatcagcggctctggcgattacacacactacgccgacagcgtgaagggcagattcaccatcagcagagacaacagcaagaacaccgtgtacctccagatgaacagcctgagagccgaggacagcgccgtgtattattgcgccaaggatgaggatggcggcagcctgcttggacacagaggacaaggcaccctggtcaccgtttcttccctcgagagcggcggaggcggatctttcgaacagctccagctgcaagagtctggacctggcctggtcaagcctagcgagacactgagcctgacctgtaccgtgtccggcgatagcatcagcagcggcgattactactggggctggatcagacagcctcctggcaaaggactggaatggatcggccacatctactacagcggcgtgacctactacaaccccagcctgaagtccagagtgaccatcagcgtggacaccagccggaaccagttctccctgaagctgtctagcgtgacagccgccgataccgccgtgtactactgcaccagagaggacagcagcaactggcggagtagaggccagggaacactggtcacagttagctctacgcgtcagagcatcaagggcaaccacctggtcaaggtgtacgactaccaagaggacggcagcgtgctgctgacatgtgatgccgaggccaagaacatcacctggtttaaggacggcaagatgatcggcttcctgaccgaggacaagaagaagtggaacctgggcagcaacgctaaggaccccagaggcatgtatcagtgcaagggcagccagaacaagagcaagcccctccaggtgtactaccggatgtgccagaactgcatcgagctgaacgccgctaccatcagcggctttctgttcgccgagatcgtgtccatcttcgtgctggccgtgggcgtgtactttatcgctggacaggatggcgtgcggcagagcagagcttccgataagcaaaccctgctgcctaacgaccagctgtaccagcctctgaaggacagagaggacgaccagtacagccacctccagggcaatcagctgagaagaaac

SEQ ID NO: 6794 - DNA, 1239 bp, Artificial Sequence
  Synthetic Polynucloetide
atggccttaccagtgaccgccttgctcctgccgctggccttgctgctccacgccgccaggccggaagtgcagctgcttgaaagtggcggcggactgattcagcctggcggatctctgagactgagctgtgccgccagcggcttcaccttttctagccacgccatgacctgggtccgacaggcacctggaaaagggcttgaatgggtgtccgccatcagcggctctggcgattacacacactacgccgacagcgtgaagggcagattcaccatcagcagagacaacagcaagaacaccgtgtacctccagatgaacagcctgagagccgaggacagcgccgtgtattattgcgccaaggatgaggatggcggcagcctgcttggacacagaggacaaggcaccctggtcaccgtttcttccctcgagagcggcggaggcggatctttcgaacagctccagctgcaagagtctggacctggcctggtcaagcctagcgagacactgagcctgacctgtaccgtgtccggcgatagcatcagcagcggcgattactactggggctggatcagacagcctcctggcaaaggactggaatggatcggccacatctactacagcggcgtgacctactacaaccccagcctgaagtccagagtgaccatcagcgtggacaccagccggaaccagttctccctgaagctgtctagcgtgacagccgccgataccgccgtgtactactgcaccagagaggacagcagcaactggcggagtagaggccagggaacactggtcacagttagctctacgcgtcagagttttgggttgttggaccctaaattgtgctatctgttggacggaatcctgttcatttacggagtgatcctgaccgcattgttcctgcgggttaagttttccagatccgcagacgcacccgcttaccaacaagggcagaaccaactctacaatgaacttaatttggggcggagggaagagtacgacgttctggacaaaaggaggggacgagatcccgagatgggcggaaagcctcagcgaaggaagaatccgcaagaggggctttataacgaactccagaaagataaaatggcagaagcctatagtgagattgggatgaagggagaaaggaggaggggtaaaggtcacgatgggttgtaccaaggattgagcacagccactaaagatacctatgatgcgctccacatgcaggccctgccgccaaga

SEQ ID NO: 6795 - DNA, 1938 bp, Artificial Sequence
  Synthetic Polynucloetide
atggccttaccagtgaccgccttgctcctgccgctggccttgctgctccacgccgccaggccgcagctccagctgcaagagtctggacctggcctggtcaagcctagcgagacactgagcctgacctgtaccgtgtccggcgatagcatcagcagcggcgattactactggggctggatcagacagcctcctggcaaaggactggaatggatcggccacatctactacagcggcgtgacctactacaaccccagcctgaagtccagagtgaccatcagcgtggacaccagccggaaccagttctccctgaagctgtctagcgtgacagccgccgataccgccgtgtactactgcaccagagaggacagcagcaactggcggagtagaggccagggaacactggtcacagttagctctctcgagagcggcggaggcggatctttcgaagtgcagctgcttgaaagtggcggcggactgattcagcctggcggatctctgagactgagctgtgccgccagcggcttcaccttttctagccacgccatgacctgggtccgacaggcacctggaaaagggcttgaatgggtgtccgccatcagcggctctggcgattacacacactacgccgacagcgtgaagggcagattcaccatcagcagagacaacagcaagaacaccgtgtacctccagatgaacagcctgagagccgaggacagcgccgtgtattattgcgccaaggatgaggatggcggcagcctgcttggacacagaggacaaggcaccctggtcaccgtttcttccacgcgtgggagcggcatccagaaccctgatcctgccgtgtaccagctgcgggatagcaagagcagcgacaagagcgtgtgtctgttcaccgacttcgacagccagaccaacgtgtcccagagcaaggactccgacgtgtacatcaccgataagaccgtgctggacatgcggagcatggacttcaagagcaactccgccgtggcctggtccaacaagtccgatttcgcctgcgccaacgccttcaacaacagcattatccccgaggacacattcttcccaagccccgagagcagctgcgacgtgaagctggtggaaaagagcttcgagacagacaccaacctgaacttccagaacctgagcgtgatcggcttcagaatcctgctgctgaaagtggccggctttaacctgctgatgaccctgcggctgtggtccagccgcgccaagagaagcggatctggcgtgaagcagaccctgaatttcgacctgctgaagctggctggcgacgtggaatccaacccaggcccttctagaggccatatgaccgagtacaagcccacggtgcgcctcgccacccgcgacgacgtccccagggccgtacgcaccctcgccgccgcgttcgccgactaccccgccacgcgccacaccgtcgatccggaccgccacatcgagcgggtcaccgagctgcaagaactcttcctcacgcgcgtcgggctcgacatcggcaaggtgtgggtcgcggacgacggcgccgcggtggcggtctggaccacgccggagagcgtcgaagcgggggcggtgttcgccgagatcggcccgcgcatggccgagttgagcggttcccggctggccgcgcagcaacagatggaaggcctcctggcgccgcaccggcccaaggagcccgcgtggttcctggccaccgtcggcgtctcgcccgaccaccagggcaagggtctgggcagcgccgtcgtgctccccggagtggaggcggccgagcgcgccggggtgcccgccttcctggagacctccgcgccccgcaacctccccttctacgagcggctcggcttcaccgtcaccgccgacgtcgaggtgcccgaaggaccgcgcacctggtgcatgacccgcaagcccggtgcctga

SEQ ID NO: 6796 - DNA, 2034 bp, Artificial Sequence
  Synthetic Polynucloetide
atggccttaccagtgaccgccttgctcctgccgctggccttgctgctccacgccgccaggccgcagctccagctgcaagagtctggacctggcctggtcaagcctagcgagacactgagcctgacctgtaccgtgtccggcgatagcatcagcagcggcgattactactggggctggatcagacagcctcctggcaaaggactggaatggatcggccacatctactacagcggcgtgacctactacaaccccagcctgaagtccagagtgaccatcagcgtggacaccagccggaaccagttctccctgaagctgtctagcgtgacagccgccgataccgccgtgtactactgcaccagagaggacagcagcaactggcggagtagaggccagggaacactggtcacagttagctctctcgagagcggcggaggcggatctttcgaagtgcagctgcttgaaagtggcggcggactgattcagcctggcggatctctgagactgagctgtgccgccagcggcttcaccttttctagccacgccatgacctgggtccgacaggcacctggaaaagggcttgaatgggtgtccgccatcagcggctctggcgattacacacactacgccgacagcgtgaagggcagattcaccatcagcagagacaacagcaagaacaccgtgtacctccagatgaacagcctgagagccgaggacagcgccgtgtattattgcgccaaggatgaggatggcggcagcctgcttggacacagaggacaaggcaccctggtcaccgtttcttccctcgaggacctgaagaacgtgttcccacctgaggtggccgtgttcgagcctagcgaggccgagatcagccacacccagaaagccaccctcgtgtgcctggctaccggcttctaccccgaccatgtggaactgtcttggtgggtcaacggcaaagaggtgcacagcggcgtgtctaccgacccccagccactgaaagaacagcccgccctgaacgacagccggtactgcctgagcagcagactgagagtgtccgccaccttctggcagaacccccggaaccacttcagatgccaggtgcagttctacggcctgagcgagaacgacgagtggacccaggacagagccaagcccgtgacccagatcgtgtctgccgaagcctggggcagagccgattgcggctttaccagcgagagctaccagcagggcgtgctgagcgccaccatcctgtacgagatcctgctgggcaaggccaccctgtacgccgtgctggtgtctgccctggtgctgatggctatggtcaagcggaaggacagccggggaagggccaagcgatctggatctggagcaacaaacttctcactactcaaacaagcaggtgacgtggaggagaatcccgggcctactagaggccatatgaccgagtacaagcccacggtgcgcctcgccacccgcgacgacgtccccagggccgtacgcaccctcgccgccgcgttcgccgactaccccgccacgcgccacaccgtcgatccggaccgccacatcgagcgggtcaccgagctgcaagaactcttcctcacgcgcgtcgggctcgacatcggcaaggtgtgggtcgcggacgacggcgccgcggtggcggtctggaccacgccggagagcgtcgaagcgggggcggtgttcgccgagatcggcccgcgcatggccgagttgagcggttcccggctggccgcgcagcaacagatggaaggcctcctggcgccgcaccggcccaaggagcccgcgtggttcctggccaccgtcggcgtctcgcccgaccaccagggcaagggtctgggcagcgccgtcgtgctccccggagtggaggcggccgagcgcgccggggtgcccgccttcctggagacctccgcgccccgcaacctccccttctacgagcggctcggcttcaccgtcaccgccgacgtcgaggtgcccgaaggaccgcgcacctggtgcatgacccgcaagcccggtgcctga

SEQ ID NO: 6797 - DNA, 2184 bp, Artificial Sequence
  Synthetic Polynucloetide
atggccttaccagtgaccgccttgctcctgccgctggccttgctgctccacgccgccaggccgcagctccagctgcaagagtctggacctggcctggtcaagcctagcgagacactgagcctgacctgtaccgtgtccggcgatagcatcagcagcggcgattactactggggctggatcagacagcctcctggcaaaggactggaatggatcggccacatctactacagcggcgtgacctactacaaccccagcctgaagtccagagtgaccatcagcgtggacaccagccggaaccagttctccctgaagctgtctagcgtgacagccgccgataccgccgtgtactactgcaccagagaggacagcagcaactggcggagtagaggccagggaacactggtcacagttagctctctcgagagcggcggaggcggatctttcgaagtgcagctgcttgaaagtggcggcggactgattcagcctggcggatctctgagactgagctgtgccgccagcggcttcaccttttctagccacgccatgacctgggtccgacaggcacctggaaaagggcttgaatgggtgtccgccatcagcggctctggcgattacacacactacgccgacagcgtgaagggcagattcaccatcagcagagacaacagcaagaacaccgtgtacctccagatgaacagcctgagagccgaggacagcgccgtgtattattgcgccaaggatgaggatggcggcagcctgcttggacacagaggacaaggcaccctggtcaccgtttcttccacgcgtgagcagaaactgatctcggaagaggatctggggagcggcaccccattcccttctctggcccctcccatcatgctgctggtggacggcaagcagcagatggtggtcgtgtgcctggtgctggatgtggccccacctggactggacagccccatctggtttagcgccggcaatggctctgccctggacgcctttacctacggcccaagccctgccaccgatggcacctggacaaatctggcccacctgagcctgcccagcgaggaactggcttcttgggagcctctcgtgtgccacacaggacctggcgctgagggacacagcagatccacccagcctatgcacctgtctggcgaggccagcaccgccagaacctgtcctcaggaacctctgagaggcacccctggcggagcactgtggctgggagtgctgagactgctgctgttcaagctgctgctgtttgacctgctgctgacctgctcctgtctgtgcgatcctgccggccctctgccttctcctgccaccaccacaagactgagagccctgggcagccacagactgcaccctgccacagagacaggcggcagagaggccacaagcagccctagaccccagcccagagacagaagatggggcgataccccccctggcagaaagcctggatctccagtccgcgccaagagaagcggatctggcgtgaagcagaccctgaatttcgacctgctgaagctggctggcgacgtggaatccaacccaggcccttctagatctagaggccatatgaccgagtacaagcccacggtgcgcctcgccacccgcgacgacgtccccagggccgtacgcaccctcgccgccgcgttcgccgactaccccgccacgcgccacaccgtcgatccggaccgccacatcgagcgggtcaccgagctgcaagaactcttcctcacgcgcgtcgggctcgacatcggcaaggtgtgggtcgcggacgacggcgccgcggtggcggtctggaccacgccggagagcgtcgaagcgggggcggtgttcgccgagatcggcccgcgcatggccgagttgagcggttcccggctggccgcgcagcaacagatggaaggcctcctggcgccgcaccggcccaaggagcccgcgtggttcctggccaccgtcggcgtctcgcccgaccaccagggcaagggtctgggcagcgccgtcgtgctccccggagtggaggcggccgagcgcgccggggtgcccgccttcctggagacctccgcgccccgcaacctccccttctacgagcggctcggcttcaccgtcaccgccgacgtcgaggtgcccgaaggaccgcgcacctggtgcatgacccgcaagcccggtgcctga

SEQ ID NO: 6798 - DNA, 1650 bp, Artificial Sequence; identical to SEQ ID NO: 6506
  Synthetic Polynucloetide

SEQ ID NO: 6799 - DNA, 957 bp, Artificial Sequence; identical to SEQ ID NO: 6507
  Synthetic Polynucloetide

SEQ ID NO: 6800 - DNA, 1344 bp, Artificial Sequence
  Synthetic Polynucloetide
atggactggatttggcgcatccttttccttgtcggcgctgctaccggcgcgcattccttcgaagtgcagctgcttgaaagtggcggcggactgattcagcctggcggatctctgagactgagctgtgccgccagcggcttcaccttttctagccacgccatgacctgggtccgacaggcacctggaaaagggcttgaatgggtgtccgccatcagcggctctggcgattacacacactacgccgacagcgtgaagggcagattcaccatcagcagagacaacagcaagaacaccgtgtacctccagatgaacagcctgagagccgaggacagcgccgtgtattattgcgccaaggatgaggatggcggcagcctgcttggacacagaggacaaggcaccctggtcaccgtttcttccacgcgtatccagaaccctgatcctgccgtgtaccagctgcgggatagcaagagcagcgacaagagcgtgtgtctgttcaccgacttcgacagccagaccaacgtgtcccagagcaaggactccgacgtgtacatcaccgataagaccgtgctggacatgcggagcatggacttcaagagcaactccgccgtggcctggtccaacaagtccgatttcgcctgcgccaacgccttcaacaacagcattatccccgaggacacattcttcccaagccccgagagcagctgcgacgtgaagctggtggaaaagagcttcgagacagacaccaacctgaacttccagaacctgagcgtgatcggcttcagaatcctgctgctgaaagtggccggctttaacctgctgatgaccctgcggctgtggtccagccgcgccaagagaagcggatctggcgtgaagcagaccctgaatttcgacctgctgaagctggctggcgacgtggaatccaacccaggcccttctagaggccatatggccaagcctttgtctcaagaagaatccaccctcattgaaagagcaacggctacaatcaacagcatccccatctctgaagactacagcgtcgccagcgcagctctctctagcgacggccgcatcttcactggtgtcaatgtatatcattttactgggggaccttgtgcagaactcgtggtgctgggcactgctgctgctgcggcagctggcaacctgacttgtatcgtcgcgatcggaaatgagaacaggggcatcttgagcccctgcggacggtgccgacaggtgcttctcgatctgcatcctgggatcaaagccatagtgaaggacagtgatggacagccgacggcagttgggattcgtgaattgctgccctctggttatgtgtgggagggctga

SEQ ID NO: 6801 - DNA, 843 bp, Artificial Sequence
  Synthetic Polynucloetide
atggactggatttggcgcatccttttccttgtcggcgctgctaccggcgcgcattccttcgaagtgcagctgcttgaaagtggcggcggactgattcagcctggcggatctctgagactgagctgtgccgccagcggcttcaccttttctagccacgccatgacctgggtccgacaggcacctggaaaagggcttgaatgggtgtccgccatcagcggctctggcgattacacacactacgccgacagcgtgaagggcagattcaccatcagcagagacaacagcaagaacaccgtgtacctccagatgaacagcctgagagccgaggacagcgccgtgtattattgcgccaaggatgaggatggcggcagcctgcttggacacagaggacaaggcaccctggtcaccgtttcttccacgcgtatccagaaccctgatcctgccgtgtaccagctgcgggatagcaagagcagcgacaagagcgtgtgtctgttcaccgacttcgacagccagaccaacgtgtcccagagcaaggactccgacgtgtacatcaccgataagaccgtgctggacatgcggagcatggacttcaagagcaactccgccgtggcctggtccaacaagtccgatttcgcctgcgccaacgccttcaacaacagcattatccccgaggacacattcttcccaagccccgagagcagctgcgacgtgaagctggtggaaaagagcttcgagacagacaccaacctgaacttccagaacctgagcgtgatcggcttcagaatcctgctgctgaaagtggccggctttaacctgctgatgaccctgcggctgtggtccagc

SEQ ID NO: 6802 - DNA, 1704 bp, Artificial Sequence; identical to SEQ ID NO: 6510
  Synthetic Polynucloetide

SEQ ID NO: 6803 - DNA, 1014 bp, Artificial Sequence; identical to SEQ ID NO: 6511
  Synthetic Polynucloetide

SEQ ID NO: 6804 - DNA, 1380 bp, Artificial Sequence
  Synthetic Polynucloetide
atggactggatttggcgcatccttttccttgtcggcgctgctaccggcgcgcattccttcgaagtgcagctgcttgaaagtggcggcggactgattcagcctggcggatctctgagactgagctgtgccgccagcggcttcaccttttctagccacgccatgacctgggtccgacaggcacctggaaaagggcttgaatgggtgtccgccatcagcggctctggcgattacacacactacgccgacagcgtgaagggcagattcaccatcagcagagacaacagcaagaacaccgtgtacctccagatgaacagcctgagagccgaggacagcgccgtgtattattgcgccaaggatgaggatggcggcagcctgcttggacacagaggacaaggcaccctggtcaccgtttcttccacgcgtgagcagaaactgatctcggaagaggatgggagcggcatccagaaccctgatcctgccgtgtaccagctgcgggatagcaagagcagcgacaagagcgtgtgtctgttcaccgacttcgacagccagaccaacgtgtcccagagcaaggactccgacgtgtacatcaccgataagtgcgtgctggacatgcggagcatggacttcaagagcaactccgccgtggcctggtccaacaagtccgatttcgcctgcgccaacgccttcaacaacagcattatccccgaggacacattcttcccaagccccgagagcagctgcgacgtgaagctggtggaaaagagcttcgagacagacaccaacctgaacttccagaacctgagcgtgatcggcttcagaatcctgctgctgaaagtggccggctttaacctgctgatgaccctgcggctgtggtccagccgcgccaagagaagcggatctggcgtgaagcagaccctgaatttcgacctgctgaagctggctggcgacgtggaatccaacccaggcccttctagaggccatatggccaagcctttgtctcaagaagaatccaccctcattgaaagagcaacggctacaatcaacagcatccccatctctgaagactacagcgtcgccagcgcagctctctctagcgacggccgcatcttcactggtgtcaatgtatatcattttactgggggaccttgtgcagaactcgtggtgctgggcactgctgctgctgcggcagctggcaacctgacttgtatcgtcgcgatcggaaatgagaacaggggcatcttgagcccctgcggacggtgccgacaggtgcttctcgatctgcatcctgggatcaaagccatagtgaaggacagtgatggacagccgacggcagttgggattcgtgaattgctgccctctggttatgtgtgggagggctga

SEQ ID NO: 6805 - DNA, 882 bp, Artificial Sequence
  Synthetic Polynucloetide
atggactggatttggcgcatccttttccttgtcggcgctgctaccggcgcgcattccttcgaagtgcagctgcttgaaagtggcggcggactgattcagcctggcggatctctgagactgagctgtgccgccagcggcttcaccttttctagccacgccatgacctgggtccgacaggcacctggaaaagggcttgaatgggtgtccgccatcagcggctctggcgattacacacactacgccgacagcgtgaagggcagattcaccatcagcagagacaacagcaagaacaccgtgtacctccagatgaacagcctgagagccgaggacagcgccgtgtattattgcgccaaggatgaggatggcggcagcctgcttggacacagaggacaaggcaccctggtcaccgtttcttccacgcgtgagcagaaactgatctcggaagaggatgggagcggcatccagaaccctgatcctgccgtgtaccagctgcgggatagcaagagcagcgacaagagcgtgtgtctgttcaccgacttcgacagccagaccaacgtgtcccagagcaaggactccgacgtgtacatcaccgataagtgcgtgctggacatgcggagcatggacttcaagagcaactccgccgtggcctggtccaacaagtccgatttcgcctgcgccaacgccttcaacaacagcattatccccgaggacacattcttcccaagccccgagagcagctgcgacgtgaagctggtggaaaagagcttcgagacagacaccaacctgaacttccagaacctgagcgtgatcggcttcagaatcctgctgctgaaagtggccggctttaacctgctgatgaccctgcggctgtggtccagctga

SEQ ID NO: 6806 - DNA, 1938 bp, Artificial Sequence
  Synthetic Polynucloetide
atggccttaccagtgaccgccttgctcctgccgctggccttgctgctccacgccgccaggccgcagctccagctgcaagagtctggacctggcctggtcaagcctagcgagacactgagcctgacctgtaccgtgtccggcgatagcatcagcagcggcgattactactggggctggatcagacagcctcctggcaaaggactggaatggatcggccacatctactacagcggcgtgacctactacaaccccagcctgaagtccagagtgaccatcagcgtggacaccagccggaaccagttctccctgaagctgtctagcgtgacagccgccgataccgccgtgtactactgcaccagagaggacagcagcaactggcggagtagaggccagggaacactggtcacagttagctctctcgagagcggcggaggcggatctttcgaagtgcagctgcttgaaagtggcggcggactgattcagcctggcggatctctgagactgagctgtgccgccagcggcttcaccttttctagccacgccatgacctgggtccgacaggcacctggaaaagggcttgaatgggtgtccgccatcagcggctctggcgattacacacactacgccgacagcgtgaagggcagattcaccatcagcagagacaacagcaagaacaccgtgtacctccagatgaacagcctgagagccgaggacagcgccgtgtattattgcgccaaggatgaggatggcggcagcctgcttggacacagaggacaaggcaccctggtcaccgtttcttccacgcgtgggagcggcatccagaaccctgatcctgccgtgtaccagctgcgggatagcaagagcagcgacaagagcgtgtgtctgttcaccgacttcgacagccagaccaacgtgtcccagagcaaggactccgacgtgtacatcaccgataagaccgtgctggacatgcggagcatggacttcaagagcaactccgccgtggcctggtccaacaagtccgatttcgcctgcgccaacgccttcaacaacagcattatccccgaggacacattcttcccaagcagcgacgtgccctgcgacgtgaagctggtggaaaagagcttcgagacagacaccaacctgaacttccagaacctgagcgtgatcggcttcagaatcctgctgctgaaagtggccggctttaacctgctgatgaccctgcggctgtggtccagccgcgccaagagaagcggatctggcgtgaagcagaccctgaatttcgacctgctgaagctggctggcgacgtggaatccaacccaggcccttctagaggccatatgaccgagtacaagcccacggtgcgcctcgccacccgcgacgacgtccccagggccgtacgcaccctcgccgccgcgttcgccgactaccccgccacgcgccacaccgtcgatccggaccgccacatcgagcgggtcaccgagctgcaagaactcttcctcacgcgcgtcgggctcgacatcggcaaggtgtgggtcgcggacgacggcgccgcggtggcggtctggaccacgccggagagcgtcgaagcgggggcggtgttcgccgagatcggcccgcgcatggccgagttgagcggttcccggctggccgcgcagcaacagatggaaggcctcctggcgccgcaccggcccaaggagcccgcgtggttcctggccaccgtcggcgtctcgcccgaccaccagggcaagggtctgggcagcgccgtcgtgctccccggagtggaggcggccgagcgcgccggggtgcccgccttcctggagacctccgcgccccgcaacctccccttctacgagcggctcggcttcaccgtcaccgccgacgtcgaggtgcccgaaggaccgcgcacctggtgcatgacccgcaagcccggtgcctga

SEQ ID NO: 6807 - DNA, 2034 bp, Artificial Sequence
  Synthetic Polynucloetide
atggccttaccagtgaccgccttgctcctgccgctggccttgctgctccacgccgccaggccgcagctccagctgcaagagtctggacctggcctggtcaagcctagcgagacactgagcctgacctgtaccgtgtccggcgatagcatcagcagcggcgattactactggggctggatcagacagcctcctggcaaaggactggaatggatcggccacatctactacagcggcgtgacctactacaaccccagcctgaagtccagagtgaccatcagcgtggacaccagccggaaccagttctccctgaagctgtctagcgtgacagccgccgataccgccgtgtactactgcaccagagaggacagcagcaactggcggagtagaggccagggaacactggtcacagttagctctctcgagagcggcggaggcggatctttcgaagtgcagctgcttgaaagtggcggcggactgattcagcctggcggatctctgagactgagctgtgccgccagcggcttcaccttttctagccacgccatgacctgggtccgacaggcacctggaaaagggcttgaatgggtgtccgccatcagcggctctggcgattacacacactacgccgacagcgtgaagggcagattcaccatcagcagagacaacagcaagaacaccgtgtacctccagatgaacagcctgagagccgaggacagcgccgtgtattattgcgccaaggatgaggatggcggcagcctgcttggacacagaggacaaggcaccctggtcaccgtttcttccctcgaggacctgaagaacgtgttcccacctgaggtggccgtgttcgagcctagcaaggccgagatcgcccacacccagaaagccaccctcgtgtgcctggctaccggcttctaccccgaccatgtggaactgtcttggtgggtcaacggcaaagaggtgcacagcggcgtgtctaccgacccccagccactgaaagaacagcccgccctgaacgacagccggtactgcctgagcagcagactgagagtgtccgccaccttctggcagaacccccggaaccacttcagatgccaggtgcagttctacggcctgagcgagaacgacgagtggacccaggacagagccaagcccgtgacccagatcgtgtctgccgaagcctggggcagagccgattgcggcatcaccagcgccagctaccaccagggcgtgctgagcgccaccatcctgtacgagatcctgctgggcaaggccaccctgtacgccgtgctggtgtctgccctggtgctgatggctatggtcaagcggaaggacagccggggaagggccaagcgatctggatctggagcaacaaacttctcactactcaaacaagcaggtgacgtggaggagaatcccgggcctactagaggccatatgaccgagtacaagcccacggtgcgcctcgccacccgcgacgacgtccccagggccgtacgcaccctcgccgccgcgttcgccgactaccccgccacgcgccacaccgtcgatccggaccgccacatcgagcgggtcaccgagctgcaagaactcttcctcacgcgcgtcgggctcgacatcggcaaggtgtgggtcgcggacgacggcgccgcggtggcggtctggaccacgccggagagcgtcgaagcgggggcggtgttcgccgagatcggcccgcgcatggccgagttgagcggttcccggctggccgcgcagcaacagatggaaggcctcctggcgccgcaccggcccaaggagcccgcgtggttcctggccaccgtcggcgtctcgcccgaccaccagggcaagggtctgggcagcgccgtcgtgctccccggagtggaggcggccgagcgcgccggggtgcccgccttcctggagacctccgcgccccgcaacctccccttctacgagcggctcggcttcaccgtcaccgccgacgtcgaggtgcccgaaggaccgcgcacctggtgcatgacccgcaagcccggtgcctga

SEQ ID NO: 6808 - DNA, 2103 bp, Artificial Sequence
  Synthetic Polynucloetide
atggccttaccagtgaccgccttgctcctgccgctggccttgctgctccacgccgccaggccgcagctccagctgcaagagtctggacctggcctggtcaagcctagcgagacactgagcctgacctgtaccgtgtccggcgatagcatcagcagcggcgattactactggggctggatcagacagcctcctggcaaaggactggaatggatcggccacatctactacagcggcgtgacctactacaaccccagcctgaagtccagagtgaccatcagcgtggacaccagccggaaccagttctccctgaagctgtctagcgtgacagccgccgataccgccgtgtactactgcaccagagaggacagcagcaactggcggagtagaggccagggaacactggtcacagttagctctctcgagagcggcggaggcggatctttcgaagtgcagctgcttgaaagtggcggcggactgattcagcctggcggatctctgagactgagctgtgccgccagcggcttcaccttttctagccacgccatgacctgggtccgacaggcacctggaaaagggcttgaatgggtgtccgccatcagcggctctggcgattacacacactacgccgacagcgtgaagggcagattcaccatcagcagagacaacagcaagaacaccgtgtacctccagatgaacagcctgagagccgaggacagcgccgtgtattattgcgccaaggatgaggatggcggcagcctgcttggacacagaggacaaggcaccctggtcaccgtttcttccacgcgtgggtctggaggcggaggcagcggcggaggcgggagcggcgacggtaacgaggagatgggaggaatcactcaaaccccttacaaagtctcaatttcaggaacaactgttatccttacatgtccccagtatcctggcagcgagatcctttggcagcataacgacaagaatatagggggagatgaagacgataagaatatcggatctgacgaggatcacttgagcctgaaagagttctccgagcttgaacaaagcggatattatgtgtgctatccgcgcgggtcaaagccggaagacgctaacttttacctttatctccgagccagagtgtgcgaaaattgcatggaaatggacgttatgtccgttgctacaatagttatcgtagatatatgcatcacgggtggactgcttctgctggtttattattggtccaagaatagaaaggccaaagctaaacccgtgaccagaggcgctggcgcaggcggaaggcaaaggggacaaaacaaagaacggccaccaccagtgccaaatccagattatgagcctattcggaaaggacagagggacctgtactctggcctgaatcagagaagaatccgcgccaagagaagcggatctggcgtgaagcagaccctgaatttcgacctgctgaagctggctggcgacgtggaatccaacccaggcccttctagaggccatatgaccgagtacaagcccacggtgcgcctcgccacccgcgacgacgtccccagggccgtacgcaccctcgccgccgcgttcgccgactaccccgccacgcgccacaccgtcgatccggaccgccacatcgagcgggtcaccgagctgcaagaactcttcctcacgcgcgtcgggctcgacatcggcaaggtgtgggtcgcggacgacggcgccgcggtggcggtctggaccacgccggagagcgtcgaagcgggggcggtgttcgccgagatcggcccgcgcatggccgagttgagcggttcccggctggccgcgcagcaacagatggaaggcctcctggcgccgcaccggcccaaggagcccgcgtggttcctggccaccgtcggcgtctcgcccgaccaccagggcaagggtctgggcagcgccgtcgtgctccccggagtggaggcggccgagcgcgccggggtgcccgccttcctggagacctccgcgccccgcaacctccccttctacgagcggctcggcttcaccgtcaccgccgacgtcgaggtgcccgaaggaccgcgcacctggtgcatgacccgcaagcccggtgcctga

SEQ ID NO: 6809 - DNA, 1998 bp, Artificial Sequence
  Synthetic Polynucloetide
atggccttaccagtgaccgccttgctcctgccgctggccttgctgctccacgccgccaggccgcagctccagctgcaagagtctggacctggcctggtcaagcctagcgagacactgagcctgacctgtaccgtgtccggcgatagcatcagcagcggcgattactactggggctggatcagacagcctcctggcaaaggactggaatggatcggccacatctactacagcggcgtgacctactacaaccccagcctgaagtccagagtgaccatcagcgtggacaccagccggaaccagttctccctgaagctgtctagcgtgacagccgccgataccgccgtgtactactgcaccagagaggacagcagcaactggcggagtagaggccagggaacactggtcacagttagctctctcgagagcggcggaggcggatctttcgaagtgcagctgcttgaaagtggcggcggactgattcagcctggcggatctctgagactgagctgtgccgccagcggcttcaccttttctagccacgccatgacctgggtccgacaggcacctggaaaagggcttgaatgggtgtccgccatcagcggctctggcgattacacacactacgccgacagcgtgaagggcagattcaccatcagcagagacaacagcaagaacaccgtgtacctccagatgaacagcctgagagccgaggacagcgccgtgtattattgcgccaaggatgaggatggcggcagcctgcttggacacagaggacaaggcaccctggtcaccgtttcttccacgcgtgggtctggaggcggaggcagcggcggaggcgggagcggcttcaagatccccatcgaggaactggaagatcgggtgttcgtgaactgcaacacctctatcacctgggtggaaggcaccgtgggaacactgctgagcgacatcaccagactggacctcggcaagcggattctggaccctcggggcatctacagatgcaacggcaccgacatctacaaggacaaagaaagcaccgtgcaggtccactacagaatgtgccagtcctgcgtggaactggaccctgctacagtggccggcatcatcgtgaccgatgtgatcgctactctgctgctggctctgggagtgttctgcttcgccggacacgaaacaggcagactgtctggcgctgccgatacacaggccctgctgagaaacgaccaagtgtatcagcccctgcgcgacagagatgatgcccagtattctcacctcggcggcaactgggctagaaacaagcgcgccaagagaagcggatctggcgtgaagcagaccctgaatttcgacctgctgaagctggctggcgacgtggaatccaacccaggcccttctagaggccatatgaccgagtacaagcccacggtgcgcctcgccacccgcgacgacgtccccagggccgtacgcaccctcgccgccgcgttcgccgactaccccgccacgcgccacaccgtcgatccggaccgccacatcgagcgggtcaccgagctgcaagaactcttcctcacgcgcgtcgggctcgacatcggcaaggtgtgggtcgcggacgacggcgccgcggtggcggtctggaccacgccggagagcgtcgaagcgggggcggtgttcgccgagatcggcccgcgcatggccgagttgagcggttcccggctggccgcgcagcaacagatggaaggcctcctggcgccgcaccggcccaaggagcccgcgtggttcctggccaccgtcggcgtctcgcccgaccaccagggcaagggtctgggcagcgccgtcgtgctccccggagtggaggcggccgagcgcgccggggtgcccgccttcctggagacctccgcgccccgcaacctccccttctacgagcggctcggcttcaccgtcaccgccgacgtcgaggtgcccgaaggaccgcgcacctggtgcatgacccgcaagcccggtgcctga

SEQ ID NO: 6810 - DNA, 2028 bp, Artificial Sequence
  Synthetic Polynucloetide
atggccttaccagtgaccgccttgctcctgccgctggccttgctgctccacgccgccaggccgcagctccagctgcaagagtctggacctggcctggtcaagcctagcgagacactgagcctgacctgtaccgtgtccggcgatagcatcagcagcggcgattactactggggctggatcagacagcctcctggcaaaggactggaatggatcggccacatctactacagcggcgtgacctactacaaccccagcctgaagtccagagtgaccatcagcgtggacaccagccggaaccagttctccctgaagctgtctagcgtgacagccgccgataccgccgtgtactactgcaccagagaggacagcagcaactggcggagtagaggccagggaacactggtcacagttagctctctcgagagcggcggaggcggatctttcgaagtgcagctgcttgaaagtggcggcggactgattcagcctggcggatctctgagactgagctgtgccgccagcggcttcaccttttctagccacgccatgacctgggtccgacaggcacctggaaaagggcttgaatgggtgtccgccatcagcggctctggcgattacacacactacgccgacagcgtgaagggcagattcaccatcagcagagacaacagcaagaacaccgtgtacctccagatgaacagcctgagagccgaggacagcgccgtgtattattgcgccaaggatgaggatggcggcagcctgcttggacacagaggacaaggcaccctggtcaccgtttcttccacgcgtgggtctggaggcggaggcagcggcggaggcgggagcggccagagcatcaagggcaaccacctggtcaaggtgtacgactaccaagaggacggcagcgtgctgctgacatgtgatgccgaggccaagaacatcacctggtttaaggacggcaagatgatcggcttcctgaccgaggacaagaagaagtggaacctgggcagcaacgctaaggaccccagaggcatgtatcagtgcaagggcagccagaacaagagcaagcccctccaggtgtactaccggatgtgccagaactgcatcgagctgaacgccgctaccatcagcggctttctgttcgccgagatcgtgtccatcttcgtgctggccgtgggcgtgtactttatcgctggacaggatggcgtgcggcagagcagagcttccgataagcaaaccctgctgcctaacgaccagctgtaccagcctctgaaggacagagaggacgaccagtacagccacctccagggcaatcagctgagaagaaaccgcgccaagagaagcggatctggcgtgaagcagaccctgaatttcgacctgctgaagctggctggcgacgtggaatccaacccaggcccttctagaggccatatgaccgagtacaagcccacggtgcgcctcgccacccgcgacgacgtccccagggccgtacgcaccctcgccgccgcgttcgccgactaccccgccacgcgccacaccgtcgatccggaccgccacatcgagcgggtcaccgagctgcaagaactcttcctcacgcgcgtcgggctcgacatcggcaaggtgtgggtcgcggacgacggcgccgcggtggcggtctggaccacgccggagagcgtcgaagcgggggcggtgttcgccgagatcggcccgcgcatggccgagttgagcggttcccggctggccgcgcagcaacagatggaaggcctcctggcgccgcaccggcccaaggagcccgcgtggttcctggccaccgtcggcgtctcgcccgaccaccagggcaagggtctgggcagcgccgtcgtgctccccggagtggaggcggccgagcgcgccggggtgcccgccttcctggagacctccgcgccccgcaacctccccttctacgagcggctcggcttcaccgtcaccgccgacgtcgaggtgcccgaaggaccgcgcacctggtgcatgacccgcaagcccggtgcctga

SEQ ID NO: 6811 - DNA, 1977 bp, Artificial Sequence
  Synthetic Polynucloetide
atggccttaccagtgaccgccttgctcctgccgctggccttgctgctccacgccgccaggccgcagctccagctgcaagagtctggacctggcctggtcaagcctagcgagacactgagcctgacctgtaccgtgtccggcgatagcatcagcagcggcgattactactggggctggatcagacagcctcctggcaaaggactggaatggatcggccacatctactacagcggcgtgacctactacaaccccagcctgaagtccagagtgaccatcagcgtggacaccagccggaaccagttctccctgaagctgtctagcgtgacagccgccgataccgccgtgtactactgcaccagagaggacagcagcaactggcggagtagaggccagggaacactggtcacagttagctctctcgagagcggcggaggcggatctttcgaagtgcagctgcttgaaagtggcggcggactgattcagcctggcggatctctgagactgagctgtgccgccagcggcttcaccttttctagccacgccatgacctgggtccgacaggcacctggaaaagggcttgaatgggtgtccgccatcagcggctctggcgattacacacactacgccgacagcgtgaagggcagattcaccatcagcagagacaacagcaagaacaccgtgtacctccagatgaacagcctgagagccgaggacagcgccgtgtattattgcgccaaggatgaggatggcggcagcctgcttggacacagaggacaaggcaccctggtcaccgtttcttccacgcgtgggtctggaggcggaggcagcggcggaggcgggagcggccagagttttgggttgttggaccctaaattgtgctatctgttggacggaatcctgttcatttacggagtgatcctgaccgcattgttcctgcgggttaagttttccagatccgcagacgcacccgcttaccaacaagggcagaaccaactctacaatgaacttaatttggggcggagggaagagtacgacgttctggacaaaaggaggggacgagatcccgagatgggcggaaagcctcagcgaaggaagaatccgcaagaggggctttataacgaactccagaaagataaaatggcagaagcctatagtgagattgggatgaagggagaaaggaggaggggtaaaggtcacgatgggttgtaccaaggattgagcacagccactaaagatacctatgatgcgctccacatgcaggccctgccgccaagacgcgccaagagaagcggatctggcgtgaagcagaccctgaatttcgacctgctgaagctggctggcgacgtggaatccaacccaggcccttctagaggccatatgaccgagtacaagcccacggtgcgcctcgccacccgcgacgacgtccccagggccgtacgcaccctcgccgccgcgttcgccgactaccccgccacgcgccacaccgtcgatccggaccgccacatcgagcgggtcaccgagctgcaagaactcttcctcacgcgcgtcgggctcgacatcggcaaggtgtgggtcgcggacgacggcgccgcggtggcggtctggaccacgccggagagcgtcgaagcgggggcggtgttcgccgagatcggcccgcgcatggccgagttgagcggttcccggctggccgcgcagcaacagatggaaggcctcctggcgccgcaccggcccaaggagcccgcgtggttcctggccaccgtcggcgtctcgcccgaccaccagggcaagggtctgggcagcgccgtcgtgctccccggagtggaggcggccgagcgcgccggggtgcccgccttcctggagacctccgcgccccgcaacctccccttctacgagcggctcggcttcaccgtcaccgccgacgtcgaggtgcccgaaggaccgcgcacctggtgcatgacccgcaagcccggtgcctga

SEQ ID NO: 6812 - DNA, 2601 bp, Artificial Sequence
  Synthetic Polynucloetide
atggccttaccagtgaccgccttgctcctgccgctggccttgctgctccacgccgccaggccgcagctccagctgcaagagtctggacctggcctggtcaagcctagcgagacactgagcctgacctgtaccgtgtccggcgatagcatcagcagcggcgattactactggggctggatcagacagcctcctggcaaaggactggaatggatcggccacatctactacagcggcgtgacctactacaaccccagcctgaagtccagagtgaccatcagcgtggacaccagccggaaccagttctccctgaagctgtctagcgtgacagccgccgataccgccgtgtactactgcaccagagaggacagcagcaactggcggagtagaggccagggaacactggtcacagttagctctctcgagggacagcctaaggccaatcctaccgtgacactgttccctccaagcagcgaagaactccaggccaacaaggccacacttgtgtgcctgatctccgacttctaccctggggctgtgacagtggcttggaaggccgatggatctcctgtgaaagccggcgtggaaaccaccaagccatccaagcagagcaacaacaaatacgccgccagctcctacctgagcctgacacctgagcagtggaagtcccacagatcctacagctgccaagtgacccacgaaggcagcaccgtggaaaagacagtggcccctacagagtgcagcggcagagccgattgcggctttaccagcgagagctaccagcagggcgtgctgagcgccaccatcctgtacgagatcctgctgggcaaggccaccctgtacgccgtgctggtgtctgccctggtgctgatggctatggtcaagcggaaggacagccggggaagggccaagcgatctggatctggagcaacaaacttctcactactcaaacaagcaggtgacgtggaggagaatcccgggcctactagtatggactggatttggcgcatccttttccttgtcggcgctgctaccggcgcgcattccttcgaagtgcagctgcttgaaagtggcggcggactgattcagcctggcggatctctgagactgagctgtgccgccagcggcttcaccttttctagccacgccatgacctgggtccgacaggcacctggaaaagggcttgaatgggtgtccgccatcagcggctctggcgattacacacactacgccgacagcgtgaagggcagattcaccatcagcagagacaacagcaagaacaccgtgtacctccagatgaacagcctgagagccgaggacagcgccgtgtattattgcgccaaggatgaggatggcggcagcctgcttggacacagaggacaaggcaccctggtcaccgtttcttccacgcgtgcctctacaaagggaccctccgtgtttcctctggctcccagcagcaagtctacaagcggaggaacagccgctctgggctgcctggtcaaggattactttcccgagcctgtgaccgtgtcctggaatagcggagcactgacaagcggcgtgcacacctttccagccgtgctgcaaagcagcggcctgtactctctgagcagcgtggtcacagtgcctagctctagcctgggcacccagacctacatctgcaatgtgaaccacaagcctagcaacaccaaggtggacaagagagtggaacccaagagctgtatccccgaggacacattcttcccaagccccgagagcagctgcgacgtgaagctggtggaaaagagcttcgagacagacaccaacctgaacttccagaacctgagcgtgatcggcttcagaatcctgctgctgaaagtggccggctttaacctgctgatgaccctgcggctgtggtccagccgcgccaagagaagcggatctggcgtgaagcagaccctgaatttcgacctgctgaagctggctggcgacgtggaatccaacccaggcccttctagaggccatatgaccgagtacaagcccacggtgcgcctcgccacccgcgacgacgtccccagggccgtacgcaccctcgccgccgcgttcgccgactaccccgccacgcgccacaccgtcgatccggaccgccacatcgagcgggtcaccgagctgcaagaactcttcctcacgcgcgtcgggctcgacatcggcaaggtgtgggtcgcggacgacggcgccgcggtggcggtctggaccacgccggagagcgtcgaagcgggggcggtgttcgccgagatcggcccgcgcatggccgagttgagcggttcccggctggccgcgcagcaacagatggaaggcctcctggcgccgcaccggcccaaggagcccgcgtggttcctggccaccgtcggcgtctcgcccgaccaccagggcaagggtctgggcagcgccgtcgtgctccccggagtggaggcggccgagcgcgccggggtgcccgccttcctggagacctccgcgccccgcaacctccccttctacgagcggctcggcttcaccgtcaccgccgacgtcgaggtgcccgaaggaccgcgcacctggtgcatgacccgcaagcccggtgcctga

SEQ ID NO: 6813 - DNA, 1899 bp, Artificial Sequence; identical to SEQ ID NO: 6786
  Synthetic Polynucloetide

SEQ ID NO: 6814 - DNA, 1986 bp, Artificial Sequence
  Synthetic Polynucloetide
atggccttaccagtgaccgccttgctcctgccgctggccttgctgctccacgccgccaggccgcagctccagctgcaagagtctggacctggcctggtcaagcctagcgagacactgagcctgacctgtaccgtgtccggcgatagcatcagcagcggcgattactactggggctggatcagacagcctcctggcaaaggactggaatggatcggccacatctactacagcggcgtgacctactacaaccccagcctgaagtccagagtgaccatcagcgtggacaccagccggaaccagttctccctgaagctgtctagcgtgacagccgccgataccgccgtgtactactgcaccagagaggacagcagcaactggcggagtagaggccagggaacactggtcacagttagctctctcgagggatctggcagagccgattgcggctttaccagcgagagctaccagcagggcgtgctgagcgccaccatcctgtacgagatcctgctgggcaaggccaccctgtacgccgtgctggtgtctgccctggtgctgatggctatggtcaagcggaaggacagccggggaagggccaagcgatctggatctggagcaacaaacttctcactactcaaacaagcaggtgacgtggaggagaatcccgggcctactagtatggactggatttggcgcatccttttccttgtcggcgctgctaccggcgcgcattccttcgaagtgcagctgcttgaaagtggcggcggactgattcagcctggcggatctctgagactgagctgtgccgccagcggcttcaccttttctagccacgccatgacctgggtccgacaggcacctggaaaagggcttgaatgggtgtccgccatcagcggctctggcgattacacacactacgccgacagcgtgaagggcagattcaccatcagcagagacaacagcaagaacaccgtgtacctccagatgaacagcctgagagccgaggacagcgccgtgtattattgcgccaaggatgaggatggcggcagcctgcttggacacagaggacaaggcaccctggtcaccgtttcttccacgcgtggcagcatccccgaggacacattcttcccaagccccgagagcagctgcgacgtgaagctggtggaaaagagcttcgagacagacaccaacctgaacttccagaacctgagcgtgatcggcttcagaatcctgctgctgaaagtggccggctttaacctgctgatgaccctgcggctgtggtccagccgcgccaagagaagcggatctggcgtgaagcagaccctgaatttcgacctgctgaagctggctggcgacgtggaatccaacccaggcccttctagaggccatatgaccgagtacaagcccacggtgcgcctcgccacccgcgacgacgtccccagggccgtacgcaccctcgccgccgcgttcgccgactaccccgccacgcgccacaccgtcgatccggaccgccacatcgagcgggtcaccgagctgcaagaactcttcctcacgcgcgtcgggctcgacatcggcaaggtgtgggtcgcggacgacggcgccgcggtggcggtctggaccacgccggagagcgtcgaagcgggggcggtgttcgccgagatcggcccgcgcatggccgagttgagcggttcccggctggccgcgcagcaacagatggaaggcctcctggcgccgcaccggcccaaggagcccgcgtggttcctggccaccgtcggcgtctcgcccgaccaccagggcaagggtctgggcagcgccgtcgtgctccccggagtggaggcggccgagcgcgccggggtgcccgccttcctggagacctccgcgccccgcaacctccccttctacgagcggctcggcttcaccgtcaccgccgacgtcgaggtgcccgaaggaccgcgcacctggtgcatgacccgcaagcccggtgcctga

SEQ ID NO: 6815 - DNA, 1284 bp, Artificial Sequence
  Synthetic Polynucloetide
atggccttaccagtgaccgccttgctcctgccgctggccttgctgctccacgccgccaggccgcagctccagctgcaagagtctggacctggcctggtcaagcctagcgagacactgagcctgacctgtaccgtgtccggcgatagcatcagcagcggcgattactactggggctggatcagacagcctcctggcaaaggactggaatggatcggccacatctactacagcggcgtgacctactacaaccccagcctgaagtccagagtgaccatcagcgtggacaccagccggaaccagttctccctgaagctgtctagcgtgacagccgccgataccgccgtgtactactgcaccagagaggacagcagcaactggcggagtagaggccagggaacactggtcacagttagctctctcgagggatctggcagagccgattgcggctttaccagcgagagctaccagcagggcgtgctgagcgccaccatcctgtacgagatcctgctgggcaaggccaccctgtacgccgtgctggtgtctgccctggtgctgatggctatggtcaagcggaaggacagccggggaagggccaagcgatctggatctggagcaacaaacttctcactactcaaacaagcaggtgacgtggaggagaatcccgggcctactagtatggactggatttggcgcatccttttccttgtcggcgctgctaccggcgcgcattccttcgaagtgcagctgcttgaaagtggcggcggactgattcagcctggcggatctctgagactgagctgtgccgccagcggcttcaccttttctagccacgccatgacctgggtccgacaggcacctggaaaagggcttgaatgggtgtccgccatcagcggctctggcgattacacacactacgccgacagcgtgaagggcagattcaccatcagcagagacaacagcaagaacaccgtgtacctccagatgaacagcctgagagccgaggacagcgccgtgtattattgcgccaaggatgaggatggcggcagcctgcttggacacagaggacaaggcaccctggtcaccgtttcttccacgcgtggcagcatccccgaggacacattcttcccaagccccgagagcagctgcgacgtgaagctggtggaaaagagcttcgagacagacaccaacctgaacttccagaacctgagcgtgatcggcttcagaatcctgctgctgaaagtggccggctttaacctgctgatgaccctgcggctgtggtccagc

SEQ ID NO: 6816 - DNA, 2013 bp, Artificial Sequence
  Synthetic Polynucloetide
atggccttaccagtgaccgccttgctcctgccgctggccttgctgctccacgccgccaggccgcagctccagctgcaagagtctggacctggcctggtcaagcctagcgagacactgagcctgacctgtaccgtgtccggcgatagcatcagcagcggcgattactactggggctggatcagacagcctcctggcaaaggactggaatggatcggccacatctactacagcggcgtgacctactacaaccccagcctgaagtccagagtgaccatcagcgtggacaccagccggaaccagttctccctgaagctgtctagcgtgacagccgccgataccgccgtgtactactgcaccagagaggacagcagcaactggcggagtagaggccagggaacactggtcacagttagctctctcgaggacaaaactcacacatgcccaccgtgcccagcaggcagagccgattgcggctttaccagcgagagctaccagcagggcgtgctgagcgccaccatcctgtacgagatcctgctgggcaaggccaccctgtacgccgtgctggtgtctgccctggtgctgatggctatggtcaagcggaaggacagccggggaagggccaagcgatctggatctggagcaacaaacttctcactactcaaacaagcaggtgacgtggaggagaatcccgggcctactagtatggactggatttggcgcatccttttccttgtcggcgctgctaccggcgcgcattccttcgaagtgcagctgcttgaaagtggcggcggactgattcagcctggcggatctctgagactgagctgtgccgccagcggcttcaccttttctagccacgccatgacctgggtccgacaggcacctggaaaagggcttgaatgggtgtccgccatcagcggctctggcgattacacacactacgccgacagcgtgaagggcagattcaccatcagcagagacaacagcaagaacaccgtgtacctccagatgaacagcctgagagccgaggacagcgccgtgtattattgcgccaaggatgaggatggcggcagcctgcttggacacagaggacaaggcaccctggtcaccgtttcttccacgcgtggcagcatccccgaggacacattcttcccaagccccgagagcagctgcgacgtgaagctggtggaaaagagcttcgagacagacaccaacctgaacttccagaacctgagcgtgatcggcttcagaatcctgctgctgaaagtggccggctttaacctgctgatgaccctgcggctgtggtccagccgcgccaagagaagcggatctggcgtgaagcagaccctgaatttcgacctgctgaagctggctggcgacgtggaatccaacccaggcccttctagaggccatatgaccgagtacaagcccacggtgcgcctcgccacccgcgacgacgtccccagggccgtacgcaccctcgccgccgcgttcgccgactaccccgccacgcgccacaccgtcgatccggaccgccacatcgagcgggtcaccgagctgcaagaactcttcctcacgcgcgtcgggctcgacatcggcaaggtgtgggtcgcggacgacggcgccgcggtggcggtctggaccacgccggagagcgtcgaagcgggggcggtgttcgccgagatcggcccgcgcatggccgagttgagcggttcccggctggccgcgcagcaacagatggaaggcctcctggcgccgcaccggcccaaggagcccgcgtggttcctggccaccgtcggcgtctcgcccgaccaccagggcaagggtctgggcagcgccgtcgtgctccccggagtggaggcggccgagcgcgccggggtgcccgccttcctggagacctccgcgccccgcaacctccccttctacgagcggctcggcttcaccgtcaccgccgacgtcgaggtgcccgaaggaccgcgcacctggtgcatgacccgcaagcccggtgcctga

SEQ ID NO: 6817 - DNA, 2013 bp, Artificial Sequence
  Synthetic Polynucloetide
atggccttaccagtgaccgccttgctcctgccgctggccttgctgctccacgccgccaggccgcagctccagctgcaagagtctggacctggcctggtcaagcctagcgagacactgagcctgacctgtaccgtgtccggcgatagcatcagcagcggcgattactactggggctggatcagacagcctcctggcaaaggactggaatggatcggccacatctactacagcggcgtgacctactacaaccccagcctgaagtccagagtgaccatcagcgtggacaccagccggaaccagttctccctgaagctgtctagcgtgacagccgccgataccgccgtgtactactgcaccagagaggacagcagcaactggcggagtagaggccagggaacactggtcacagttagctctctcgagggatctggcagagccgattgcggctttaccagcgagagctaccagcagggcgtgctgagcgccaccatcctgtacgagatcctgctgggcaaggccaccctgtacgccgtgctggtgtctgccctggtgctgatggctatggtcaagcggaaggacagccggggaagggccaagcgatctggatctggagcaacaaacttctcactactcaaacaagcaggtgacgtggaggagaatcccgggcctactagtatggactggatttggcgcatccttttccttgtcggcgctgctaccggcgcgcattccttcgaagtgcagctgcttgaaagtggcggcggactgattcagcctggcggatctctgagactgagctgtgccgccagcggcttcaccttttctagccacgccatgacctgggtccgacaggcacctggaaaagggcttgaatgggtgtccgccatcagcggctctggcgattacacacactacgccgacagcgtgaagggcagattcaccatcagcagagacaacagcaagaacaccgtgtacctccagatgaacagcctgagagccgaggacagcgccgtgtattattgcgccaaggatgaggatggcggcagcctgcttggacacagaggacaaggcaccctggtcaccgtttcttccacgcgtgataaaactcatacctgtccgccatgcccggcaatccccgaggacacattcttcccaagccccgagagcagctgcgacgtgaagctggtggaaaagagcttcgagacagacaccaacctgaacttccagaacctgagcgtgatcggcttcagaatcctgctgctgaaagtggccggctttaacctgctgatgaccctgcggctgtggtccagccgcgccaagagaagcggatctggcgtgaagcagaccctgaatttcgacctgctgaagctggctggcgacgtggaatccaacccaggcccttctagaggccatatgaccgagtacaagcccacggtgcgcctcgccacccgcgacgacgtccccagggccgtacgcaccctcgccgccgcgttcgccgactaccccgccacgcgccacaccgtcgatccggaccgccacatcgagcgggtcaccgagctgcaagaactcttcctcacgcgcgtcgggctcgacatcggcaaggtgtgggtcgcggacgacggcgccgcggtggcggtctggaccacgccggagagcgtcgaagcgggggcggtgttcgccgagatcggcccgcgcatggccgagttgagcggttcccggctggccgcgcagcaacagatggaaggcctcctggcgccgcaccggcccaaggagcccgcgtggttcctggccaccgtcggcgtctcgcccgaccaccagggcaagggtctgggcagcgccgtcgtgctccccggagtggaggcggccgagcgcgccggggtgcccgccttcctggagacctccgcgccccgcaacctccccttctacgagcggctcggcttcaccgtcaccgccgacgtcgaggtgcccgaaggaccgcgcacctggtgcatgacccgcaagcccggtgcctga

SEQ ID NO: 6818 - DNA, 2040 bp, Artificial Sequence
  Synthetic Polynucloetide
atggccttaccagtgaccgccttgctcctgccgctggccttgctgctccacgccgccaggccgcagctccagctgcaagagtctggacctggcctggtcaagcctagcgagacactgagcctgacctgtaccgtgtccggcgatagcatcagcagcggcgattactactggggctggatcagacagcctcctggcaaaggactggaatggatcggccacatctactacagcggcgtgacctactacaaccccagcctgaagtccagagtgaccatcagcgtggacaccagccggaaccagttctccctgaagctgtctagcgtgacagccgccgataccgccgtgtactactgcaccagagaggacagcagcaactggcggagtagaggccagggaacactggtcacagttagctctctcgaggacaaaactcacacatgcccaccgtgcccagcaggcagagccgattgcggctttaccagcgagagctaccagcagggcgtgctgagcgccaccatcctgtacgagatcctgctgggcaaggccaccctgtacgccgtgctggtgtctgccctggtgctgatggctatggtcaagcggaaggacagccggggaagggccaagcgatctggatctggagcaacaaacttctcactactcaaacaagcaggtgacgtggaggagaatcccgggcctactagtatggactggatttggcgcatccttttccttgtcggcgctgctaccggcgcgcattccttcgaagtgcagctgcttgaaagtggcggcggactgattcagcctggcggatctctgagactgagctgtgccgccagcggcttcaccttttctagccacgccatgacctgggtccgacaggcacctggaaaagggcttgaatgggtgtccgccatcagcggctctggcgattacacacactacgccgacagcgtgaagggcagattcaccatcagcagagacaacagcaagaacaccgtgtacctccagatgaacagcctgagagccgaggacagcgccgtgtattattgcgccaaggatgaggatggcggcagcctgcttggacacagaggacaaggcaccctggtcaccgtttcttccacgcgtgataaaactcatacctgtccgccatgcccggcaatccccgaggacacattcttcccaagccccgagagcagctgcgacgtgaagctggtggaaaagagcttcgagacagacaccaacctgaacttccagaacctgagcgtgatcggcttcagaatcctgctgctgaaagtggccggctttaacctgctgatgaccctgcggctgtggtccagccgcgccaagagaagcggatctggcgtgaagcagaccctgaatttcgacctgctgaagctggctggcgacgtggaatccaacccaggcccttctagaggccatatgaccgagtacaagcccacggtgcgcctcgccacccgcgacgacgtccccagggccgtacgcaccctcgccgccgcgttcgccgactaccccgccacgcgccacaccgtcgatccggaccgccacatcgagcgggtcaccgagctgcaagaactcttcctcacgcgcgtcgggctcgacatcggcaaggtgtgggtcgcggacgacggcgccgcggtggcggtctggaccacgccggagagcgtcgaagcgggggcggtgttcgccgagatcggcccgcgcatggccgagttgagcggttcccggctggccgcgcagcaacagatggaaggcctcctggcgccgcaccggcccaaggagcccgcgtggttcctggccaccgtcggcgtctcgcccgaccaccagggcaagggtctgggcagcgccgtcgtgctccccggagtggaggcggccgagcgcgccggggtgcccgccttcctggagacctccgcgccccgcaacctccccttctacgagcggctcggcttcaccgtcaccgccgacgtcgaggtgcccgaaggaccgcgcacctggtgcatgacccgcaagcccggtgcctga

SEQ ID NO: 6819 - DNA, 1338 bp, Artificial Sequence
  Synthetic Polynucloetide
atggccttaccagtgaccgccttgctcctgccgctggccttgctgctccacgccgccaggccgcagctccagctgcaagagtctggacctggcctggtcaagcctagcgagacactgagcctgacctgtaccgtgtccggcgatagcatcagcagcggcgattactactggggctggatcagacagcctcctggcaaaggactggaatggatcggccacatctactacagcggcgtgacctactacaaccccagcctgaagtccagagtgaccatcagcgtggacaccagccggaaccagttctccctgaagctgtctagcgtgacagccgccgataccgccgtgtactactgcaccagagaggacagcagcaactggcggagtagaggccagggaacactggtcacagttagctctctcgaggacaaaactcacacatgcccaccgtgcccagcaggcagagccgattgcggctttaccagcgagagctaccagcagggcgtgctgagcgccaccatcctgtacgagatcctgctgggcaaggccaccctgtacgccgtgctggtgtctgccctggtgctgatggctatggtcaagcggaaggacagccggggaagggccaagcgatctggatctggagcaacaaacttctcactactcaaacaagcaggtgacgtggaggagaatcccgggcctactagtatggactggatttggcgcatccttttccttgtcggcgctgctaccggcgcgcattccttcgaagtgcagctgcttgaaagtggcggcggactgattcagcctggcggatctctgagactgagctgtgccgccagcggcttcaccttttctagccacgccatgacctgggtccgacaggcacctggaaaagggcttgaatgggtgtccgccatcagcggctctggcgattacacacactacgccgacagcgtgaagggcagattcaccatcagcagagacaacagcaagaacaccgtgtacctccagatgaacagcctgagagccgaggacagcgccgtgtattattgcgccaaggatgaggatggcggcagcctgcttggacacagaggacaaggcaccctggtcaccgtttcttccacgcgtgataaaactcatacctgtccgccatgcccggcaatccccgaggacacattcttcccaagccccgagagcagctgcgacgtgaagctggtggaaaagagcttcgagacagacaccaacctgaacttccagaacctgagcgtgatcggcttcagaatcctgctgctgaaagtggccggctttaacctgctgatgaccctgcggctgtggtccagc

SEQ ID NO: 6820 - DNA, 1311 bp, Artificial Sequence
  Synthetic Polynucloetide
atggccttaccagtgaccgccttgctcctgccgctggccttgctgctccacgccgccaggccgcagctccagctgcaagagtctggacctggcctggtcaagcctagcgagacactgagcctgacctgtaccgtgtccggcgatagcatcagcagcggcgattactactggggctggatcagacagcctcctggcaaaggactggaatggatcggccacatctactacagcggcgtgacctactacaaccccagcctgaagtccagagtgaccatcagcgtggacaccagccggaaccagttctccctgaagctgtctagcgtgacagccgccgataccgccgtgtactactgcaccagagaggacagcagcaactggcggagtagaggccagggaacactggtcacagttagctctctcgagggatctggcagagccgattgcggctttaccagcgagagctaccagcagggcgtgctgagcgccaccatcctgtacgagatcctgctgggcaaggccaccctgtacgccgtgctggtgtctgccctggtgctgatggctatggtcaagcggaaggacagccggggaagggccaagcgatctggatctggagcaacaaacttctcactactcaaacaagcaggtgacgtggaggagaatcccgggcctactagtatggactggatttggcgcatccttttccttgtcggcgctgctaccggcgcgcattccttcgaagtgcagctgcttgaaagtggcggcggactgattcagcctggcggatctctgagactgagctgtgccgccagcggcttcaccttttctagccacgccatgacctgggtccgacaggcacctggaaaagggcttgaatgggtgtccgccatcagcggctctggcgattacacacactacgccgacagcgtgaagggcagattcaccatcagcagagacaacagcaagaacaccgtgtacctccagatgaacagcctgagagccgaggacagcgccgtgtattattgcgccaaggatgaggatggcggcagcctgcttggacacagaggacaaggcaccctggtcaccgtttcttccacgcgtgataaaactcatacctgtccgccatgcccggcaatccccgaggacacattcttcccaagccccgagagcagctgcgacgtgaagctggtggaaaagagcttcgagacagacaccaacctgaacttccagaacctgagcgtgatcggcttcagaatcctgctgctgaaagtggccggctttaacctgctgatgaccctgcggctgtggtccagc

SEQ ID NO: 6821 - DNA, 2667 bp, Artificial Sequence
  Synthetic Polynucloetide
atggccttaccagtgaccgccttgctcctgccgctggccttgctgctccacgccgccaggccgcagctccagctgcaagagtctggacctggcctggtcaagcctagcgagacactgagcctgacctgtaccgtgtccggcgatagcatcagcagcggcgattactactggggctggatcagacagcctcctggcaaaggactggaatggatcggccacatctactacagcggcgtgacctactacaaccccagcctgaagtccagagtgaccatcagcgtggacaccagccggaaccagttctccctgaagctgtctagcgtgacagccgccgataccgccgtgtactactgcaccagagaggacagcagcaactggcggagtagaggccagggaacactggtcacagttagctctctcgagggacagcctaaggccaatcctaccgtgacactgttccctccaagcagcgaagaactccaggccaacaaggccacacttgtgtgcctgatctccgacttctaccctggggctgtgacagtggcttggaaggccgatggatctcctgtgaaagccggcgtggaaaccaccaagccatccaagcagagcaacaacaaatacgccgccagctcctacctgagcctgacacctgagcagtggaagtcccacagatcctacagctgccaagtgacccacgaaggcagcaccgtggaaaagacagtggcccctacagagtgcagccccatcaagaccgatgtgattacaatggaccccaaggacaactgctccaaggacgccaacgataccctgctgctccagctgaccaacaccagcgcctactacatgtacttgttgctgctgctgaagtccgtggtgtacttcgccatcatcacatgctgcctgctgcggagaaccgccttctgctgcaacggcgagaagtctagggccaagcgatctggatctggagcaacaaacttctcactactcaaacaagcaggtgacgtggaggagaatcccgggcctactagtatggactggatttggcgcatccttttccttgtcggcgctgctaccggcgcgcattccttcgaagtgcagctgcttgaaagtggcggcggactgattcagcctggcggatctctgagactgagctgtgccgccagcggcttcaccttttctagccacgccatgacctgggtccgacaggcacctggaaaagggcttgaatgggtgtccgccatcagcggctctggcgattacacacactacgccgacagcgtgaagggcagattcaccatcagcagagacaacagcaagaacaccgtgtacctccagatgaacagcctgagagccgaggacagcgccgtgtattattgcgccaaggatgaggatggcggcagcctgcttggacacagaggacaaggcaccctggtcaccgtttcttccacgcgtgcctctacaaagggaccctccgtgtttcctctggctcccagcagcaagtctacaagcggaggaacagccgctctgggctgcctggtcaaggattactttcccgagcctgtgaccgtgtcctggaatagcggagcactgacaagcggcgtgcacacctttccagccgtgctgcaaagcagcggcctgtactctctgagcagcgtggtcacagtgcctagctctagcctgggcacccagacctacatctgcaatgtgaaccacaagcctagcaacaccaaggtggacaagagagtggaacccaagagctgtgaagtgaaaaccgactccaccgaccacgtgaagcccaaagagacagagaacaccaagcagcccagcaagagctgccacaagcccaaggccatcgtgcacaccgagaaagtgaacatgatgagcctgaccgtgctgggcctgcggatgctgttcgccaaaaccgtggccgtgaacttcctgctgaccgccaagctgttcttcctccgcgccaagagaagcggatctggcgtgaagcagaccctgaatttcgacctgctgaagctggctggcgacgtggaatccaacccaggcccttctagaggccatatgaccgagtacaagcccacggtgcgcctcgccacccgcgacgacgtccccagggccgtacgcaccctcgccgccgcgttcgccgactaccccgccacgcgccacaccgtcgatccggaccgccacatcgagcgggtcaccgagctgcaagaactcttcctcacgcgcgtcgggctcgacatcggcaaggtgtgggtcgcggacgacggcgccgcggtggcggtctggaccacgccggagagcgtcgaagcgggggcggtgttcgccgagatcggcccgcgcatggccgagttgagcggttcccggctggccgcgcagcaacagatggaaggcctcctggcgccgcaccggcccaaggagcccgcgtggttcctggccaccgtcggcgtctcgcccgaccaccagggcaagggtctgggcagcgccgtcgtgctccccggagtggaggcggccgagcgcgccggggtgcccgccttcctggagacctccgcgccccgcaacctccccttctacgagcggctcggcttcaccgtcaccgccgacgtcgaggtgcccgaaggaccgcgcacctggtgcatgacccgcaagcccggtgcctga

SEQ ID NO: 6822 - DNA, 1965 bp, Artificial Sequence; identical to SEQ ID NO: 6784
  Synthetic Polynucloetide

SEQ ID NO: 6823 - DNA, 2052 bp, Artificial Sequence
  Synthetic Polynucloetide
atggccttaccagtgaccgccttgctcctgccgctggccttgctgctccacgccgccaggccgcagctccagctgcaagagtctggacctggcctggtcaagcctagcgagacactgagcctgacctgtaccgtgtccggcgatagcatcagcagcggcgattactactggggctggatcagacagcctcctggcaaaggactggaatggatcggccacatctactacagcggcgtgacctactacaaccccagcctgaagtccagagtgaccatcagcgtggacaccagccggaaccagttctccctgaagctgtctagcgtgacagccgccgataccgccgtgtactactgcaccagagaggacagcagcaactggcggagtagaggccagggaacactggtcacagttagctctctcgagggatctcccatcaagaccgatgtgattacaatggaccccaaggacaactgctccaaggacgccaacgataccctgctgctccagctgaccaacaccagcgcctactacatgtacttgttgctgctgctgaagtccgtggtgtacttcgccatcatcacatgctgcctgctgcggagaaccgccttctgctgcaacggcgagaagtctagggccaagcgatctggatctggagcaacaaacttctcactactcaaacaagcaggtgacgtggaggagaatcccgggcctactagtatggactggatttggcgcatccttttccttgtcggcgctgctaccggcgcgcattccttcgaagtgcagctgcttgaaagtggcggcggactgattcagcctggcggatctctgagactgagctgtgccgccagcggcttcaccttttctagccacgccatgacctgggtccgacaggcacctggaaaagggcttgaatgggtgtccgccatcagcggctctggcgattacacacactacgccgacagcgtgaagggcagattcaccatcagcagagacaacagcaagaacaccgtgtacctccagatgaacagcctgagagccgaggacagcgccgtgtattattgcgccaaggatgaggatggcggcagcctgcttggacacagaggacaaggcaccctggtcaccgtttcttccacgcgtggcagcgaagtgaaaaccgactccaccgaccacgtgaagcccaaagagacagagaacaccaagcagcccagcaagagctgccacaagcccaaggccatcgtgcacaccgagaaagtgaacatgatgagcctgaccgtgctgggcctgcggatgctgttcgccaaaaccgtggccgtgaacttcctgctgaccgccaagctgttcttcctccgcgccaagagaagcggatctggcgtgaagcagaccctgaatttcgacctgctgaagctggctggcgacgtggaatccaacccaggcccttctagaggccatatgaccgagtacaagcccacggtgcgcctcgccacccgcgacgacgtccccagggccgtacgcaccctcgccgccgcgttcgccgactaccccgccacgcgccacaccgtcgatccggaccgccacatcgagcgggtcaccgagctgcaagaactcttcctcacgcgcgtcgggctcgacatcggcaaggtgtgggtcgcggacgacggcgccgcggtggcggtctggaccacgccggagagcgtcgaagcgggggcggtgttcgccgagatcggcccgcgcatggccgagttgagcggttcccggctggccgcgcagcaacagatggaaggcctcctggcgccgcaccggcccaaggagcccgcgtggttcctggccaccgtcggcgtctcgcccgaccaccagggcaagggtctgggcagcgccgtcgtgctccccggagtggaggcggccgagcgcgccggggtgcccgccttcctggagacctccgcgccccgcaacctccccttctacgagcggctcggcttcaccgtcaccgccgacgtcgaggtgcccgaaggaccgcgcacctggtgcatgacccgcaagcccggtgcctga

SEQ ID NO: 6824 - DNA, 1350 bp, Artificial Sequence
  Synthetic Polynucloetide
atggccttaccagtgaccgccttgctcctgccgctggccttgctgctccacgccgccaggccgcagctccagctgcaagagtctggacctggcctggtcaagcctagcgagacactgagcctgacctgtaccgtgtccggcgatagcatcagcagcggcgattactactggggctggatcagacagcctcctggcaaaggactggaatggatcggccacatctactacagcggcgtgacctactacaaccccagcctgaagtccagagtgaccatcagcgtggacaccagccggaaccagttctccctgaagctgtctagcgtgacagccgccgataccgccgtgtactactgcaccagagaggacagcagcaactggcggagtagaggccagggaacactggtcacagttagctctctcgagggatctcccatcaagaccgatgtgattacaatggaccccaaggacaactgctccaaggacgccaacgataccctgctgctccagctgaccaacaccagcgcctactacatgtacttgttgctgctgctgaagtccgtggtgtacttcgccatcatcacatgctgcctgctgcggagaaccgccttctgctgcaacggcgagaagtctagggccaagcgatctggatctggagcaacaaacttctcactactcaaacaagcaggtgacgtggaggagaatcccgggcctactagtatggactggatttggcgcatccttttccttgtcggcgctgctaccggcgcgcattccttcgaagtgcagctgcttgaaagtggcggcggactgattcagcctggcggatctctgagactgagctgtgccgccagcggcttcaccttttctagccacgccatgacctgggtccgacaggcacctggaaaagggcttgaatgggtgtccgccatcagcggctctggcgattacacacactacgccgacagcgtgaagggcagattcaccatcagcagagacaacagcaagaacaccgtgtacctccagatgaacagcctgagagccgaggacagcgccgtgtattattgcgccaaggatgaggatggcggcagcctgcttggacacagaggacaaggcaccctggtcaccgtttcttccacgcgtggcagcgaagtgaaaaccgactccaccgaccacgtgaagcccaaagagacagagaacaccaagcagcccagcaagagctgccacaagcccaaggccatcgtgcacaccgagaaagtgaacatgatgagcctgaccgtgctgggcctgcggatgctgttcgccaaaaccgtggccgtgaacttcctgctgaccgccaagctgttcttcctc

SEQ ID NO: 6825 - DNA, 2079 bp, Artificial Sequence
  Synthetic Polynucloetide
atggccttaccagtgaccgccttgctcctgccgctggccttgctgctccacgccgccaggccgcagctccagctgcaagagtctggacctggcctggtcaagcctagcgagacactgagcctgacctgtaccgtgtccggcgatagcatcagcagcggcgattactactggggctggatcagacagcctcctggcaaaggactggaatggatcggccacatctactacagcggcgtgacctactacaaccccagcctgaagtccagagtgaccatcagcgtggacaccagccggaaccagttctccctgaagctgtctagcgtgacagccgccgataccgccgtgtactactgcaccagagaggacagcagcaactggcggagtagaggccagggaacactggtcacagttagctctctcgaggacaaaactcacacatgcccaccgtgcccagcacccatcaagaccgatgtgattacaatggaccccaaggacaactgctccaaggacgccaacgataccctgctgctccagctgaccaacaccagcgcctactacatgtacttgttgctgctgctgaagtccgtggtgtacttcgccatcatcacatgctgcctgctgcggagaaccgccttctgctgcaacggcgagaagtctagggccaagcgatctggatctggagcaacaaacttctcactactcaaacaagcaggtgacgtggaggagaatcccgggcctactagtatggactggatttggcgcatccttttccttgtcggcgctgctaccggcgcgcattccttcgaagtgcagctgcttgaaagtggcggcggactgattcagcctggcggatctctgagactgagctgtgccgccagcggcttcaccttttctagccacgccatgacctgggtccgacaggcacctggaaaagggcttgaatgggtgtccgccatcagcggctctggcgattacacacactacgccgacagcgtgaagggcagattcaccatcagcagagacaacagcaagaacaccgtgtacctccagatgaacagcctgagagccgaggacagcgccgtgtattattgcgccaaggatgaggatggcggcagcctgcttggacacagaggacaaggcaccctggtcaccgtttcttccacgcgtggcagcgaagtgaaaaccgactccaccgaccacgtgaagcccaaagagacagagaacaccaagcagcccagcaagagctgccacaagcccaaggccatcgtgcacaccgagaaagtgaacatgatgagcctgaccgtgctgggcctgcggatgctgttcgccaaaaccgtggccgtgaacttcctgctgaccgccaagctgttcttcctccgcgccaagagaagcggatctggcgtgaagcagaccctgaatttcgacctgctgaagctggctggcgacgtggaatccaacccaggcccttctagaggccatatgaccgagtacaagcccacggtgcgcctcgccacccgcgacgacgtccccagggccgtacgcaccctcgccgccgcgttcgccgactaccccgccacgcgccacaccgtcgatccggaccgccacatcgagcgggtcaccgagctgcaagaactcttcctcacgcgcgtcgggctcgacatcggcaaggtgtgggtcgcggacgacggcgccgcggtggcggtctggaccacgccggagagcgtcgaagcgggggcggtgttcgccgagatcggcccgcgcatggccgagttgagcggttcccggctggccgcgcagcaacagatggaaggcctcctggcgccgcaccggcccaaggagcccgcgtggttcctggccaccgtcggcgtctcgcccgaccaccagggcaagggtctgggcagcgccgtcgtgctccccggagtggaggcggccgagcgcgccggggtgcccgccttcctggagacctccgcgccccgcaacctccccttctacgagcggctcggcttcaccgtcaccgccgacgtcgaggtgcccgaaggaccgcgcacctggtgcatgacccgcaagcccggtgcctga

SEQ ID NO: 6826 - DNA, 2079 bp, Artificial Sequence
  Synthetic Polynucloetide
atggccttaccagtgaccgccttgctcctgccgctggccttgctgctccacgccgccaggccgcagctccagctgcaagagtctggacctggcctggtcaagcctagcgagacactgagcctgacctgtaccgtgtccggcgatagcatcagcagcggcgattactactggggctggatcagacagcctcctggcaaaggactggaatggatcggccacatctactacagcggcgtgacctactacaaccccagcctgaagtccagagtgaccatcagcgtggacaccagccggaaccagttctccctgaagctgtctagcgtgacagccgccgataccgccgtgtactactgcaccagagaggacagcagcaactggcggagtagaggccagggaacactggtcacagttagctctctcgagggatctcccatcaagaccgatgtgattacaatggaccccaaggacaactgctccaaggacgccaacgataccctgctgctccagctgaccaacaccagcgcctactacatgtacttgttgctgctgctgaagtccgtggtgtacttcgccatcatcacatgctgcctgctgcggagaaccgccttctgctgcaacggcgagaagtctagggccaagcgatctggatctggagcaacaaacttctcactactcaaacaagcaggtgacgtggaggagaatcccgggcctactagtatggactggatttggcgcatccttttccttgtcggcgctgctaccggcgcgcattccttcgaagtgcagctgcttgaaagtggcggcggactgattcagcctggcggatctctgagactgagctgtgccgccagcggcttcaccttttctagccacgccatgacctgggtccgacaggcacctggaaaagggcttgaatgggtgtccgccatcagcggctctggcgattacacacactacgccgacagcgtgaagggcagattcaccatcagcagagacaacagcaagaacaccgtgtacctccagatgaacagcctgagagccgaggacagcgccgtgtattattgcgccaaggatgaggatggcggcagcctgcttggacacagaggacaaggcaccctggtcaccgtttcttccacgcgtgataaaactcatacctgtccgccatgcccggcagaagtgaaaaccgactccaccgaccacgtgaagcccaaagagacagagaacaccaagcagcccagcaagagctgccacaagcccaaggccatcgtgcacaccgagaaagtgaacatgatgagcctgaccgtgctgggcctgcggatgctgttcgccaaaaccgtggccgtgaacttcctgctgaccgccaagctgttcttcctccgcgccaagagaagcggatctggcgtgaagcagaccctgaatttcgacctgctgaagctggctggcgacgtggaatccaacccaggcccttctagaggccatatgaccgagtacaagcccacggtgcgcctcgccacccgcgacgacgtccccagggccgtacgcaccctcgccgccgcgttcgccgactaccccgccacgcgccacaccgtcgatccggaccgccacatcgagcgggtcaccgagctgcaagaactcttcctcacgcgcgtcgggctcgacatcggcaaggtgtgggtcgcggacgacggcgccgcggtggcggtctggaccacgccggagagcgtcgaagcgggggcggtgttcgccgagatcggcccgcgcatggccgagttgagcggttcccggctggccgcgcagcaacagatggaaggcctcctggcgccgcaccggcccaaggagcccgcgtggttcctggccaccgtcggcgtctcgcccgaccaccagggcaagggtctgggcagcgccgtcgtgctccccggagtggaggcggccgagcgcgccggggtgcccgccttcctggagacctccgcgccccgcaacctccccttctacgagcggctcggcttcaccgtcaccgccgacgtcgaggtgcccgaaggaccgcgcacctggtgcatgacccgcaagcccggtgcctga

SEQ ID NO: 6827 - DNA, 2106 bp, Artificial Sequence
  Synthetic Polynucloetide
atggccttaccagtgaccgccttgctcctgccgctggccttgctgctccacgccgccaggccgcagctccagctgcaagagtctggacctggcctggtcaagcctagcgagacactgagcctgacctgtaccgtgtccggcgatagcatcagcagcggcgattactactggggctggatcagacagcctcctggcaaaggactggaatggatcggccacatctactacagcggcgtgacctactacaaccccagcctgaagtccagagtgaccatcagcgtggacaccagccggaaccagttctccctgaagctgtctagcgtgacagccgccgataccgccgtgtactactgcaccagagaggacagcagcaactggcggagtagaggccagggaacactggtcacagttagctctctcgaggacaaaactcacacatgcccaccgtgcccagcacccatcaagaccgatgtgattacaatggaccccaaggacaactgctccaaggacgccaacgataccctgctgctccagctgaccaacaccagcgcctactacatgtacttgttgctgctgctgaagtccgtggtgtacttcgccatcatcacatgctgcctgctgcggagaaccgccttctgctgcaacggcgagaagtctagggccaagcgatctggatctggagcaacaaacttctcactactcaaacaagcaggtgacgtggaggagaatcccgggcctactagtatggactggatttggcgcatccttttccttgtcggcgctgctaccggcgcgcattccttcgaagtgcagctgcttgaaagtggcggcggactgattcagcctggcggatctctgagactgagctgtgccgccagcggcttcaccttttctagccacgccatgacctgggtccgacaggcacctggaaaagggcttgaatgggtgtccgccatcagcggctctggcgattacacacactacgccgacagcgtgaagggcagattcaccatcagcagagacaacagcaagaacaccgtgtacctccagatgaacagcctgagagccgaggacagcgccgtgtattattgcgccaaggatgaggatggcggcagcctgcttggacacagaggacaaggcaccctggtcaccgtttcttccacgcgtgataaaactcatacctgtccgccatgcccggcagaagtgaaaaccgactccaccgaccacgtgaagcccaaagagacagagaacaccaagcagcccagcaagagctgccacaagcccaaggccatcgtgcacaccgagaaagtgaacatgatgagcctgaccgtgctgggcctgcggatgctgttcgccaaaaccgtggccgtgaacttcctgctgaccgccaagctgttcttcctccgcgccaagagaagcggatctggcgtgaagcagaccctgaatttcgacctgctgaagctggctggcgacgtggaatccaacccaggcccttctagaggccatatgaccgagtacaagcccacggtgcgcctcgccacccgcgacgacgtccccagggccgtacgcaccctcgccgccgcgttcgccgactaccccgccacgcgccacaccgtcgatccggaccgccacatcgagcgggtcaccgagctgcaagaactcttcctcacgcgcgtcgggctcgacatcggcaaggtgtgggtcgcggacgacggcgccgcggtggcggtctggaccacgccggagagcgtcgaagcgggggcggtgttcgccgagatcggcccgcgcatggccgagttgagcggttcccggctggccgcgcagcaacagatggaaggcctcctggcgccgcaccggcccaaggagcccgcgtggttcctggccaccgtcggcgtctcgcccgaccaccagggcaagggtctgggcagcgccgtcgtgctccccggagtggaggcggccgagcgcgccggggtgcccgccttcctggagacctccgcgccccgcaacctccccttctacgagcggctcggcttcaccgtcaccgccgacgtcgaggtgcccgaaggaccgcgcacctggtgcatgacccgcaagcccggtgcctga

SEQ ID NO: 6828 - DNA, 1404 bp, Artificial Sequence
  Synthetic Polynucloetide
atggccttaccagtgaccgccttgctcctgccgctggccttgctgctccacgccgccaggccgcagctccagctgcaagagtctggacctggcctggtcaagcctagcgagacactgagcctgacctgtaccgtgtccggcgatagcatcagcagcggcgattactactggggctggatcagacagcctcctggcaaaggactggaatggatcggccacatctactacagcggcgtgacctactacaaccccagcctgaagtccagagtgaccatcagcgtggacaccagccggaaccagttctccctgaagctgtctagcgtgacagccgccgataccgccgtgtactactgcaccagagaggacagcagcaactggcggagtagaggccagggaacactggtcacagttagctctctcgaggacaaaactcacacatgcccaccgtgcccagcacccatcaagaccgatgtgattacaatggaccccaaggacaactgctccaaggacgccaacgataccctgctgctccagctgaccaacaccagcgcctactacatgtacttgttgctgctgctgaagtccgtggtgtacttcgccatcatcacatgctgcctgctgcggagaaccgccttctgctgcaacggcgagaagtctagggccaagcgatctggatctggagcaacaaacttctcactactcaaacaagcaggtgacgtggaggagaatcccgggcctactagtatggactggatttggcgcatccttttccttgtcggcgctgctaccggcgcgcattccttcgaagtgcagctgcttgaaagtggcggcggactgattcagcctggcggatctctgagactgagctgtgccgccagcggcttcaccttttctagccacgccatgacctgggtccgacaggcacctggaaaagggcttgaatgggtgtccgccatcagcggctctggcgattacacacactacgccgacagcgtgaagggcagattcaccatcagcagagacaacagcaagaacaccgtgtacctccagatgaacagcctgagagccgaggacagcgccgtgtattattgcgccaaggatgaggatggcggcagcctgcttggacacagaggacaaggcaccctggtcaccgtttcttccacgcgtgataaaactcatacctgtccgccatgcccggcagaagtgaaaaccgactccaccgaccacgtgaagcccaaagagacagagaacaccaagcagcccagcaagagctgccacaagcccaaggccatcgtgcacaccgagaaagtgaacatgatgagcctgaccgtgctgggcctgcggatgctgttcgccaaaaccgtggccgtgaacttcctgctgaccgccaagctgttcttcctc

SEQ ID NO: 6829 - DNA, 2187 bp, Artificial Sequence
  Synthetic Polynucloetide
atggccttaccagtgaccgccttgctcctgccgctggccttgctgctccacgccgccaggccgcagctccagctgcaagagtctggacctggcctggtcaagcctagcgagacactgagcctgacctgtaccgtgtccggcgatagcatcagcagcggcgattactactggggctggatcagacagcctcctggcaaaggactggaatggatcggccacatctactacagcggcgtgacctactacaaccccagcctgaagtccagagtgaccatcagcgtggacaccagccggaaccagttctccctgaagctgtctagcgtgacagccgccgataccgccgtgtactactgcaccagagaggacagcagcaactggcggagtagaggccagggaacactggtcacagttagctctctcgagagcggcggaggcggatctttcgaagtgcaactggtggaaagcggaggcggacttgttcaaccaggcggaagcctgagactgagctgtgccgcttccggctttaatatcaaagacacatgcatcggatgggttcgccgcgctccagggaaagaagaggaactggttgccgacatctgtccctacaagggcagcacaagatatgccgactccgtgaaaggccggtttaccatctctgccgacacctctaagaatacggcctatctgcaaatgaactctctgcgggccgaagatacagccgtgtattactgcgccatcgtgtctgccagagatggctactataactattggggacagggaaccacagtcacagtgtcctctacgcgtgagcagaaactgatctcggaagaggatctggcgaagcccaccacgacgccagcgccgcgaccaccaacaccggcgcccaccatcgcgtcgcagcccctgtccctgcgcccagaggcgtgccggccagcggcggggggcgcagtgcacacgagggggctggacttcgcctgtgacatctacatctgggcgcccttggccgggacttgtggggtccttctcctgtcactggttatcaccctttactgcaaacggggcagaaagaaactcctgtatatattcaaacaaccatttatgagaccagtacaaactactcaagaggaagatggctgtagctgccgatttccagaagaagaagaaggaggatgtgaactgagagtgaagttcagcaggagcgcagacgcccccgcgtaccagcagggccagaaccagctctataacgagctgaatctaggacgaagagaggagtacgatgttttggacaagagacgtggccgggaccctgagatggggggaaagccgagaaggaagaaccctcaggaaggcctgtacaatgaactgcagaaagataagatggcggaggcctacagtgagattgggatgaaaggcgagcgccggaggggcaaggggcacgatggcctttaccagggtctcagtacagccaccaaggacacctacgacgcccttcacatgcaggccctgccccctcgctctagtggctccggcgagggcagaggaagtctactaacctgcggagatgtggaagaaaatcctggcccacatatgaccgagtacaagcccacggtgcgcctcgccacccgcgacgacgtccccagggccgtacgcaccctcgccgccgcgttcgccgactaccccgccacgcgccacaccgtcgatccggaccgccacatcgagcgggtcaccgagctgcaagaactcttcctcacgcgcgtcgggctcgacatcggcaaggtgtgggtcgcggacgacggcgccgcggtggcggtctggaccacgccggagagcgtcgaagcgggggcggtgttcgccgagatcggcccgcgcatggccgagttgagcggttcccggctggccgcgcagcaacagatggaaggcctcctggcgccgcaccggcccaaggagcccgcgtggttcctggccaccgtcggcgtctcgcccgaccaccagggcaagggtctgggcagcgccgtcgtgctccccggagtggaggcggccgagcgcgccggggtgcccgccttcctggagacctccgcgccccgcaacctccccttctacgagcggctcggcttcaccgtcaccgccgacgtcgaggtgcccgaaggaccgcgcacctggtgcatgacccgcaagcccggtgcctga

SEQ ID NO: 6830 - DNA, 2169 bp, Artificial Sequence
  Synthetic Polynucloetide
atggccttaccagtgaccgccttgctcctgccgctggccttgctgctccacgccgccaggccgcagctccagctgcaagagtctggacctggcctggtcaagcctagcgagacactgagcctgacctgtaccgtgtccggcgatagcatcagcagcggcgattactactggggctggatcagacagcctcctggcaaaggactggaatggatcggccacatctactacagcggcgtgacctactacaaccccagcctgaagtccagagtgaccatcagcgtggacaccagccggaaccagttctccctgaagctgtctagcgtgacagccgccgataccgccgtgtactactgcaccagagaggacagcagcaactggcggagtagaggccagggaacactggtcacagttagctctctcgagagcggcggaggcggatctttcgaagtgcaactggtggaaagcggaggcggacttgttcaaccaggcggaagcctgagactgagctgtgccgcttccggctttaatatcaaagacacatgcatcggatgggttcgccgcgctccagggaaagaagaggaactggttgccgacatctgtccctacaagggcagcacaagatatgccgactccgtgaaaggccggtttaccatctctgccgacacctctaagaatacggcctatctgcaaatgaactctctgcgggccgaagatacagccgtgtattactgcgccatcgtgtctgccagagatggctactataactattggggacagggaaccacagtcacagtgtcctctacgcgtgagcagaaactgatctcggaagaggatctgaaaattgaagttatgtatcctcctccttacctagacaatgagaagagcaatggaaccattatccatgtgaaagggaaacacctttgtccaagtcccctatttcccggaccttctaagcccttttgggtgctggtggtggttgggggagtcctggcttgctatagcttgctagtaacagtggcctttattattttctgggtgaggagtaagaggagcaggctcctgcacagtgactacatgaacatgactccacgccgccccggacccacccgcaagcattaccagccctatgccccaccacgcgacttcgcagcctatcgctccagagtgaagttcagcaggagcgcagacgcccccgcgtaccagcagggccagaaccagctctataacgagctcaatctaggacgaagagaggagtacgatgttttggacaagagacgtggccgggaccctgagatggggggaaagccgagaaggaagaaccctcaggaaggcctgtacaatgaactgcagaaagataagatggcggaggcctacagtgagattgggatgaaaggcgagcgccggaggggcaaggggcacgatggcctttaccagggtctcagtacagccaccaaggacacctacgacgcccttcacatgcaggccctgccccctcgctctagtggctccggcgagggcagaggaagtctactaacctgcggagatgtggaagaaaatcctggcccacatatgaccgagtacaagcccacggtgcgcctcgccacccgcgacgacgtccccagggccgtacgcaccctcgccgccgcgttcgccgactaccccgccacgcgccacaccgtcgatccggaccgccacatcgagcgggtcaccgagctgcaagaactcttcctcacgcgcgtcgggctcgacatcggcaaggtgtgggtcgcggacgacggcgccgcggtggcggtctggaccacgccggagagcgtcgaagcgggggcggtgttcgccgagatcggcccgcgcatggccgagttgagcggttcccggctggccgcgcagcaacagatggaaggcctcctggcgccgcaccggcccaaggagcccgcgtggttcctggccaccgtcggcgtctcgcccgaccaccagggcaagggtctgggcagcgccgtcgtgctccccggagtggaggcggccgagcgcgccggggtgcccgccttcctggagacctccgcgccccgcaacctccccttctacgagcggctcggcttcaccgtcaccgccgacgtcgaggtgcccgaaggaccgcgcacctggtgcatgacccgcaagcccggtgcctga

SEQ ID NO: 6831 - DNA, 1497 bp, Artificial Sequence
  Synthetic Polynucloetide
atggccttaccagtgaccgccttgctcctgccgctggccttgctgctccacgccgccaggccgcagctccagctgcaagagtctggacctggcctggtcaagcctagcgagacactgagcctgacctgtaccgtgtccggcgatagcatcagcagcggcgattactactggggctggatcagacagcctcctggcaaaggactggaatggatcggccacatctactacagcggcgtgacctactacaaccccagcctgaagtccagagtgaccatcagcgtggacaccagccggaaccagttctccctgaagctgtctagcgtgacagccgccgataccgccgtgtactactgcaccagagaggacagcagcaactggcggagtagaggccagggaacactggtcacagttagctctctcgagagcggcggaggcggatctttcgaagtgcaactggtggaaagcggaggcggacttgttcaaccaggcggaagcctgagactgagctgtgccgcttccggctttaatatcaaagacacatgcatcggatgggttcgccgcgctccagggaaagaagaggaactggttgccgacatctgtccctacaagggcagcacaagatatgccgactccgtgaaaggccggtttaccatctctgccgacacctctaagaatacggcctatctgcaaatgaactctctgcgggccgaagatacagccgtgtattactgcgccatcgtgtctgccagagatggctactataactattggggacagggaaccacagtcacagtgtcctctacgcgtgagcagaaactgatctcggaagaggatctgaaaattgaagttatgtatcctcctccttacctagacaatgagaagagcaatggaaccattatccatgtgaaagggaaacacctttgtccaagtcccctatttcccggaccttctaagcccttttgggtgctggtggtggttgggggagtcctggcttgctatagcttgctagtaacagtggcctttattattttctgggtgaggagtaagaggagcaggctcctgcacagtgactacatgaacatgactccacgccgccccggacccacccgcaagcattaccagccctatgccccaccacgcgacttcgcagcctatcgctccagagtgaagttcagcaggagcgcagacgcccccgcgtaccagcagggccagaaccagctctataacgagctcaatctaggacgaagagaggagtacgatgttttggacaagagacgtggccgggaccctgagatggggggaaagccgagaaggaagaaccctcaggaaggcctgtacaatgaactgcagaaagataagatggcggaggcctacagtgagattgggatgaaaggcgagcgccggaggggcaaggggcacgatggcctttaccagggtctcagtacagccaccaaggacacctacgacgcccttcacatgcaggccctgccccctcgc

SEQ ID NO: 6832 - DNA, 1518 bp, Artificial Sequence
  Synthetic Polynucloetide
atggccttaccagtgaccgccttgctcctgccgctggccttgctgctccacgccgccaggccgcagctccagctgcaagagtctggacctggcctggtcaagcctagcgagacactgagcctgacctgtaccgtgtccggcgatagcatcagcagcggcgattactactggggctggatcagacagcctcctggcaaaggactggaatggatcggccacatctactacagcggcgtgacctactacaaccccagcctgaagtccagagtgaccatcagcgtggacaccagccggaaccagttctccctgaagctgtctagcgtgacagccgccgataccgccgtgtactactgcaccagagaggacagcagcaactggcggagtagaggccagggaacactggtcacagttagctctctcgagagcggcggaggcggatctttcgaagtgcaactggtggaaagcggaggcggacttgttcaaccaggcggaagcctgagactgagctgtgccgcttccggctttaatatcaaagacacatgcatcggatgggttcgccgcgctccagggaaagaagaggaactggttgccgacatctgtccctacaagggcagcacaagatatgccgactccgtgaaaggccggtttaccatctctgccgacacctctaagaatacggcctatctgcaaatgaactctctgcgggccgaagatacagccgtgtattactgcgccatcgtgtctgccagagatggctactataactattggggacagggaaccacagtcacagtgtcctctacgcgtgagcagaaactgatctcggaagaggatctggcgaagcccaccacgacgccagcgccgcgaccaccaacaccggcgcccaccatcgcgtcgcagcccctgtccctgcgcccagaggcgtgccggccagcggcggggggcgcagtgcacacgagggggctggacttcgcctgtgacatctacatctgggcgcccttggccgggacttgtggggtccttctcctgtcactggttatcaccctttactgcaaacggggcagaaagaaactcctgtatatattcaaacaaccatttatgagaccagtacaaactactcaagaggaagatggctgtagctgccgatttccagaagaagaagaaggaggatgtgaactgagagtgaagttcagcaggagcgcagacgcccccgcgtaccagcagggccagaaccagctctataacgagctgaatctaggacgaagagaggagtacgatgttttggacaagagacgtggccgggaccctgagatggggggaaagccgagaaggaagaaccctcaggaaggcctgtacaatgaactgcagaaagataagatggcggaggcctacagtgagattgggatgaaaggcgagcgccggaggggcaaggggcacgatggcctttaccagggtctcagtacagccaccaaggacacctacgacgcccttcacatgcaggccctgccccctcgctga

SEQ ID NO: 6833 - DNA, 1521 bp, Artificial Sequence
  Synthetic Polynucloetide
atggccttaccagtgaccgccttgctcctgccgctggccttgctgctccacgccgccaggccggaagtgcaactggtggaaagcggaggcggacttgttcaaccaggcggaagcctgagactgagctgtgccgcttccggctttaatatcaaagacacatgcatcggatgggttcgccgcgctccagggaaagaagaggaactggttgccgacatctgtccctacaagggcagcacaagatatgccgactccgtgaaaggccggtttaccatctctgccgacacctctaagaatacggcctatctgcaaatgaactctctgcgggccgaagatacagccgtgtattactgcgccatcgtgtctgccagagatggctactataactattggggacagggaaccacagtcacagtgtcctctctcgagagcggcggaggcggatctttcgaacagctccagctgcaagagtctggacctggcctggtcaagcctagcgagacactgagcctgacctgtaccgtgtccggcgatagcatcagcagcggcgattactactggggctggatcagacagcctcctggcaaaggactggaatggatcggccacatctactacagcggcgtgacctactacaaccccagcctgaagtccagagtgaccatcagcgtggacaccagccggaaccagttctccctgaagctgtctagcgtgacagccgccgataccgccgtgtactactgcaccagagaggacagcagcaactggcggagtagaggccagggaacactggtcacagttagctctacgcgtgagcagaaactgatctcggaagaggatctggcgaagcccaccacgacgccagcgccgcgaccaccaacaccggcgcccaccatcgcgtcgcagcccctgtccctgcgcccagaggcgtgccggccagcggcggggggcgcagtgcacacgagggggctggacttcgcctgtgacatctacatctgggcgcccttggccgggacttgtggggtccttctcctgtcactggttatcaccctttactgcaaacggggcagaaagaaactcctgtatatattcaaacaaccatttatgagaccagtacaaactactcaagaggaagatggctgtagctgccgatttccagaagaagaagaaggaggatgtgaactgagagtgaagttcagcaggagcgcagacgcccccgcgtaccagcagggccagaaccagctctataacgagctgaatctaggacgaagagaggagtacgatgttttggacaagagacgtggccgggaccctgagatggggggaaagccgagaaggaagaaccctcaggaaggcctgtacaatgaactgcagaaagataagatggcggaggcctacagtgagattgggatgaaaggcgagcgccggaggggcaaggggcacgatggcctttaccagggtctcagtacagccaccaaggacacctacgacgcccttcacatgcaggccctgccccctcgctga

SEQ ID NO: 6834 - DNA, 2757 bp, Artificial Sequence
  Synthetic Polynucloetide
atggccttaccagtgaccgccttgctcctgccgctggccttgctgctccacgccgccaggccgcagctccagctgcaagagtctggacctggcctggtcaagcctagcgagacactgagcctgacctgtaccgtgtccggcgatagcatcagcagcggcgattactactggggctggatcagacagcctcctggcaaaggactggaatggatcggccacatctactacagcggcgtgacctactacaaccccagcctgaagtccagagtgaccatcagcgtggacaccagccggaaccagttctccctgaagctgtctagcgtgacagccgccgataccgccgtgtactactgcaccagagaggacagcagcaactggcggagtagaggccagggaacactggtcacagttagctctctcgagagcggcggaggcggatctttcgaagtgcaactggtggaaagcggaggcggacttgttcaaccaggcggaagcctgagactgagctgtgccgcttccggctttaatatcaaagacacatgcatcggatgggttcgccgcgctccagggaaagaagaggaactggttgccgacatctgtccctacaagggcagcacaagatatgccgactccgtgaaaggccggtttaccatctctgccgacacctctaagaatacggcctatctgcaaatgaactctctgcgggccgaagatacagccgtgtattactgcgccatcgtgtctgccagagatggctactataactattggggacagggaaccacagtcacagtgtcctctacgcgtgagcagaaactgatctcggaagaggatctggcgaagcccaccacgacgccagcgccgcgaccaccaacaccggcgcccaccatcgcgtcgcagcccctgtccctgcgcccagaggcgtgccggccagcggcggggggcgcagtgcacacgagggggctggacttcgcctgtgacatctacatctgggcgcccttggccgggacttgtggggtccttctcctgtcactggttatcaccctttactgcgggcgcgccagagtgaagttcagcaggagcgcagacgcccccgcgtaccagcagggccagaaccagctctataacgagctgaatctaggacgaagagaggagtacgatgttttggacaagagacgtggccgggaccctgagatggggggaaagccgagaaggaagaaccctcaggaaggcctgtacaatgaactgcagaaagataagatggcggaggcctacagtgagattgggatgaaaggcgagcgccggaggggcaaggggcacgatggcctttaccagggtctcagtacagccaccaaggacacctacgacgcccttcacatgcaggccctgccccctcgctctagaggatctggagcaacaaacttctcactactcaaacaagcaggtgacgtggaggagaatcccgggcctgggatccacatggccacttacgaggttctctgtgaggtggcgcggaaactgggcacggatgacagggaagtggtattgttcctcctaaacgtgttcatacctcaacccacactggcccaattaattggagctcttagagctttaaaggaggagggcaggttaacgtttcccctgttagcggaatgtctgtttcgtgcaggtcgcagagacctcttgcgcgacctgcttcacttagacccgcgttttttagagcgccacctagcgggcacaatgagttatttcagcccttatcagctcactgttctccacgtagacggggagctgtgtgcgagggatattaggtctttgatatttttaagcaaggacactatagggtctcgcagcacaccacagacattcttacactgggtgtactgtatggaaaacttagacctactgggtcccactgacgtggatgccctaatgtcaatgcttagatctttgtcaagagtagacctacagcgccaagtgcaaaccctaatgggccttcacctttccggcccatcacactcccaacactatcgccatacaccactcgagaccgatttctacgactacaaggacgacgatgacaagactagtggctccggcgagggcagaggaagtctactaacctgcggagatgtggaagaaaatcctggcccacatatgaccgagtacaagcccacggtgcgcctcgccacccgcgacgacgtccccagggccgtacgcaccctcgccgccgcgttcgccgactaccccgccacgcgccacaccgtcgatccggaccgccacatcgagcgggtcaccgagctgcaagaactcttcctcacgcgcgtcgggctcgacatcggcaaggtgtgggtcgcggacgacggcgccgcggtggcggtctggaccacgccggagagcgtcgaagcgggggcggtgttcgccgagatcggcccgcgcatggccgagttgagcggttcccggctggccgcgcagcaacagatggaaggcctcctggcgccgcaccggcccaaggagcccgcgtggttcctggccaccgtcggcgtctcgcccgaccaccagggcaagggtctgggcagcgccgtcgtgctccccggagtggaggcggccgagcgcgccggggtgcccgccttcctggagacctccgcgccccgcaacctccccttctacgagcggctcggcttcaccgtcaccgccgacgtcgaggtgcccgaaggaccgcgcacctggtgcatgacccgcaagcccggtgcctga

SEQ ID NO: 6835 - DNA, 2592 bp, Artificial Sequence
  Synthetic Polynucloetide
atggccttaccagtgaccgccttgctcctgccgctggccttgctgctccacgccgccaggccgcagctccagctgcaagagtctggacctggcctggtcaagcctagcgagacactgagcctgacctgtaccgtgtccggcgatagcatcagcagcggcgattactactggggctggatcagacagcctcctggcaaaggactggaatggatcggccacatctactacagcggcgtgacctactacaaccccagcctgaagtccagagtgaccatcagcgtggacaccagccggaaccagttctccctgaagctgtctagcgtgacagccgccgataccgccgtgtactactgcaccagagaggacagcagcaactggcggagtagaggccagggaacactggtcacagttagctctctcgagatccagaaccctgatcctgccgtgtaccagctgcgggatagcaagagcagcgacaagagcgtgtgtctgttcaccgacttcgacagccagaccaacgtgtcccagagcaaggactccgacgtgtacatcaccgataagtgcgtgctggacatgcggagcatggacttcaagagcaactccgccgtggcctggtccaacaagtccgatttcgcctgcgccaacgccttcaacaacagcattatccccgaggacacattcttcccaagcagcgacgtgccctgcgacgtgaagctggtggaaaagagcttcgagacagacaccaacctgaacttccagaacctgagcgtgatcggcttcagaatcctgctgctgaaagtggccggctttaacctgctgatgaccctgcggctgtggtccagccgcgccaagagaagcggatctggcgtgaagcagaccctgaatttcgacctgctgaagctggctggcgacgtggaatccaacccaggccctactagtatggactggatttggcgcatccttttccttgtcggcgctgctaccggcgcgcattccttcgaagtgcaactggtggaaagcggaggcggacttgttcaaccaggcggaagcctgagactgagctgtgccgcttccggctttaatatcaaagacacatgcatcggatgggttcgccgcgctccagggaaagaagaggaactggttgccgacatctgtccctacaagggcagcacaagatatgccgactccgtgaaaggccggtttaccatctctgccgacacctctaagaatacggcctatctgcaaatgaactctctgcgggccgaagatacagccgtgtattactgcgccatcgtgtctgccagagatggctactataactattggggacagggaaccacagtcacagtgtcctctacgcgtgaggacctgaagaacgtgttcccacctgaggtggccgtgttcgagcctagcaaggccgagatcgcccacacccagaaagccaccctcgtgtgcctggctaccggcttctaccccgaccatgtggaactgtcttggtgggtcaacggcaaagaggtgcacagcggcgtgtgtaccgacccccagccactgaaagaacagcccgccctgaacgacagccggtactgcctgagcagcagactgagagtgtccgccaccttctggcagaacccccggaaccacttcagatgccaggtgcagttctacggcctgagcgagaacgacgagtggacccaggacagagccaagcccgtgacccagatcgtgtctgccgaagcctggggcagagccgattgcggcatcaccagcgccagctaccaccagggcgtgctgagcgccaccatcctgtacgagatcctgctgggcaaggccaccctgtacgccgtgctggtgtctgccctggtgctgatggctatggtcaagcggaaggacagccggggaagggccaagcgatctggatctggagcaacaaacttctcactactcaaacaagcaggtgacgtggaggagaatcccgggccttctagaggccatatgaccgagtacaagcccacggtgcgcctcgccacccgcgacgacgtccccagggccgtacgcaccctcgccgccgcgttcgccgactaccccgccacgcgccacaccgtcgatccggaccgccacatcgagcgggtcaccgagctgcaagaactcttcctcacgcgcgtcgggctcgacatcggcaaggtgtgggtcgcggacgacggcgccgcggtggcggtctggaccacgccggagagcgtcgaagcgggggcggtgttcgccgagatcggcccgcgcatggccgagttgagcggttcccggctggccgcgcagcaacagatggaaggcctcctggcgccgcaccggcccaaggagcccgcgtggttcctggccaccgtcggcgtctcgcccgaccaccagggcaagggtctgggcagcgccgtcgtgctccccggagtggaggcggccgagcgcgccggggtgcccgccttcctggagacctccgcgccccgcaacctccccttctacgagcggctcggcttcaccgtcaccgccgacgtcgaggtgcccgaaggaccgcgcacctggtgcatgacccgcaagcccggtgcctga

SEQ ID NO: 6836 - DNA, 2589 bp, Artificial Sequence
  Synthetic Polynucloetide
atggccttaccagtgaccgccttgctcctgccgctggccttgctgctccacgccgccaggccgcagctccagctgcaagagtctggacctggcctggtcaagcctagcgagacactgagcctgacctgtaccgtgtccggcgatagcatcagcagcggcgattactactggggctggatcagacagcctcctggcaaaggactggaatggatcggccacatctactacagcggcgtgacctactacaaccccagcctgaagtccagagtgaccatcagcgtggacaccagccggaaccagttctccctgaagctgtctagcgtgacagccgccgataccgccgtgtactactgcaccagagaggacagcagcaactggcggagtagaggccagggaacactggtcacagttagctctctcgaggacctgaagaacgtgttcccacctgaggtggccgtgttcgagcctagcaaggccgagatcgcccacacccagaaagccaccctcgtgtgcctggctaccggcttctaccccgaccatgtggaactgtcttggtgggtcaacggcaaagaggtgcacagcggcgtgtgtaccgacccccagccactgaaagaacagcccgccctgaacgacagccggtactgcctgagcagcagactgagagtgtccgccaccttctggcagaacccccggaaccacttcagatgccaggtgcagttctacggcctgagcgagaacgacgagtggacccaggacagagccaagcccgtgacccagatcgtgtctgccgaagcctggggcagagccgattgcggcatcaccagcgccagctaccaccagggcgtgctgagcgccaccatcctgtacgagatcctgctgggcaaggccaccctgtacgccgtgctggtgtctgccctggtgctgatggctatggtcaagcggaaggacagccggggaagggccaagcgatctggatctggagcaacaaacttctcactactcaaacaagcaggtgacgtggaggagaatcccgggcctactagtatggactggatttggcgcatccttttccttgtcggcgctgctaccggcgcgcattccttcgaagtgcaactggtggaaagcggaggcggacttgttcaaccaggcggaagcctgagactgagctgtgccgcttccggctttaatatcaaagacacatgcatcggatgggttcgccgcgctccagggaaagaagaggaactggttgccgacatctgtccctacaagggcagcacaagatatgccgactccgtgaaaggccggtttaccatctctgccgacacctctaagaatacggcctatctgcaaatgaactctctgcgggccgaagatacagccgtgtattactgcgccatcgtgtctgccagagatggctactataactattggggacagggaaccacagtcacagtgtcctctacgcgtatccagaaccctgatcctgccgtgtaccagctgcgggatagcaagagcagcgacaagagcgtgtgtctgttcaccgacttcgacagccagaccaacgtgtcccagagcaaggactccgacgtgtacatcaccgataagtgcgtgctggacatgcggagcatggacttcaagagcaactccgccgtggcctggtccaacaagtccgatttcgcctgcgccaacgccttcaacaacagcattatccccgaggacacattcttcccaagcagcgacgtgccctgcgacgtgaagctggtggaaaagagcttcgagacagacaccaacctgaacttccagaacctgagcgtgatcggcttcagaatcctgctgctgaaagtggccggctttaacctgctgatgaccctgcggctgtggtccagccgcgccaagagaagcggatctggcgtgaagcagaccctgaatttcgacctgctgaagctggctggcgacgtggaatccaacccaggcccttctagaggccatatgaccgagtacaagcccacggtgcgcctcgccacccgcgacgacgtccccagggccgtacgcaccctcgccgccgcgttcgccgactaccccgccacgcgccacaccgtcgatccggaccgccacatcgagcgggtcaccgagctgcaagaactcttcctcacgcgcgtcgggctcgacatcggcaaggtgtgggtcgcggacgacggcgccgcggtggcggtctggaccacgccggagagcgtcgaagcgggggcggtgttcgccgagatcggcccgcgcatggccgagttgagcggttcccggctggccgcgcagcaacagatggaaggcctcctggcgccgcaccggcccaaggagcccgcgtggttcctggccaccgtcggcgtctcgcccgaccaccagggcaagggtctgggcagcgccgtcgtgctccccggagtggaggcggccgagcgcgccggggtgcccgccttcctggagacctccgcgccccgcaacctccccttctacgagcggctcggcttcaccgtcaccgccgacgtcgaggtgcccgaaggaccgcgcacctggtgcatgacccgcaagcccggtgcctga

SEQ ID NO: 6837 - DNA, 1887 bp, Artificial Sequence
  Synthetic Polynucloetide
atggccttaccagtgaccgccttgctcctgccgctggccttgctgctccacgccgccaggccgcagctccagctgcaagagtctggacctggcctggtcaagcctagcgagacactgagcctgacctgtaccgtgtccggcgatagcatcagcagcggcgattactactggggctggatcagacagcctcctggcaaaggactggaatggatcggccacatctactacagcggcgtgacctactacaaccccagcctgaagtccagagtgaccatcagcgtggacaccagccggaaccagttctccctgaagctgtctagcgtgacagccgccgataccgccgtgtactactgcaccagagaggacagcagcaactggcggagtagaggccagggaacactggtcacagttagctctctcgaggacctgaagaacgtgttcccacctgaggtggccgtgttcgagcctagcgaggccgagatcagccacacccagaaagccaccctcgtgtgcctggctaccggcttctaccccgaccatgtggaactgtcttggtgggtcaacggcaaagaggtgcacagcggcgtgtgtaccgacccccagccactgaaagaacagcccgccctgaacgacagccggtactgcctgagcagcagactgagagtgtccgccaccttctggcagaacccccggaaccacttcagatgccaggtgcagttctacggcctgagcgagaacgacgagtggacccaggacagagccaagcccgtgacccagatcgtgtctgccgaagcctggggcagagccgattgcggctttaccagcgagagctaccagcagggcgtgctgagcgccaccatcctgtacgagatcctgctgggcaaggccaccctgtacgccgtgctggtgtctgccctggtgctgatggctatggtcaagcggaaggacagccggggaagggccaagcgatctggatctggagcaacaaacttctcactactcaaacaagcaggtgacgtggaggagaatcccgggcctactagtatggactggatttggcgcatccttttccttgtcggcgctgctaccggcgcgcattccttcgaagtgcaactggtggaaagcggaggcggacttgttcaaccaggcggaagcctgagactgagctgtgccgcttccggctttaatatcaaagacacatgcatcggatgggttcgccgcgctccagggaaagaagaggaactggttgccgacatctgtccctacaagggcagcacaagatatgccgactccgtgaaaggccggtttaccatctctgccgacacctctaagaatacggcctatctgcaaatgaactctctgcgggccgaagatacagccgtgtattactgcgccatcgtgtctgccagagatggctactataactattggggacagggaaccacagtcacagtgtcctctacgcgtatccagaaccctgatcctgccgtgtaccagctgcgggatagcaagagcagcgacaagagcgtgtgtctgttcaccgacttcgacagccagaccaacgtgtcccagagcaaggactccgacgtgtacatcaccgataagtgcgtgctggacatgcggagcatggacttcaagagcaactccgccgtggcctggtccaacaagtccgatttcgcctgcgccaacgccttcaacaacagcattatccccgaggacacattcttcccaagccccgagagcagctgcgacgtgaagctggtggaaaagagcttcgagacagacaccaacctgaacttccagaacctgagcgtgatcggcttcagaatcctgctgctgaaagtggccggctttaacctgctgatgaccctgcggctgtggtccagc

SEQ ID NO: 6838 - DNA, 2562 bp, Artificial Sequence
  Synthetic Polynucloetide
atggccttaccagtgaccgccttgctcctgccgctggccttgctgctccacgccgccaggccgcagctccagctgcaagagtctggacctggcctggtcaagcctagcgagacactgagcctgacctgtaccgtgtccggcgatagcatcagcagcggcgattactactggggctggatcagacagcctcctggcaaaggactggaatggatcggccacatctactacagcggcgtgacctactacaaccccagcctgaagtccagagtgaccatcagcgtggacaccagccggaaccagttctccctgaagctgtctagcgtgacagccgccgataccgccgtgtactactgcaccagagaggacagcagcaactggcggagtagaggccagggaacactggtcacagttagctctctcgaggacctgaagaacgtgttcccacctgaggtggccgtgttcgagcctagcgaggccgagatcagccacacccagaaagccaccctcgtgtgcctggctaccggcttctaccccgaccatgtggaactgtcttggtgggtcaacggcaaagaggtgcacagcggcgtgtgtaccgacccccagccactgaaagaacagcccgccctgaacgacagccggtactgcctgagcagcagactgagagtgtccgccaccttctggcagaacccccggaaccacttcagatgccaggtgcagttctacggcctgagcgagaacgacgagtggacccaggacagagccaagcccgtgacccagatcgtgtctgccgaagcctggggcagagccgattgcggctttaccagcgagagctaccagcagggcgtgctgagcgccaccatcctgtacgagatcctgctgggcaaggccaccctgtacgccgtgctggtgtctgccctggtgctgatggctatggtcaagcggaaggacagccggggaagggccaagcgatctggatctggagcaacaaacttctcactactcaaacaagcaggtgacgtggaggagaatcccgggcctactagtatggactggatttggcgcatccttttccttgtcggcgctgctaccggcgcgcattccttcgaagtgcaactggtggaaagcggaggcggacttgttcaaccaggcggaagcctgagactgagctgtgccgcttccggctttaatatcaaagacacatgcatcggatgggttcgccgcgctccagggaaagaagaggaactggttgccgacatctgtccctacaagggcagcacaagatatgccgactccgtgaaaggccggtttaccatctctgccgacacctctaagaatacggcctatctgcaaatgaactctctgcgggccgaagatacagccgtgtattactgcgccatcgtgtctgccagagatggctactataactattggggacagggaaccacagtcacagtgtcctctacgcgtatccagaaccctgatcctgccgtgtaccagctgcgggatagcaagagcagcgacaagagcgtgtgtctgttcaccgacttcgacagccagaccaacgtgtcccagagcaaggactccgacgtgtacatcaccgataagtgcgtgctggacatgcggagcatggacttcaagagcaactccgccgtggcctggtccaacaagtccgatttcgcctgcgccaacgccttcaacaacagcattatccccgaggacacattcttcccaagccccgagagcagctgcgacgtgaagctggtggaaaagagcttcgagacagacaccaacctgaacttccagaacctgagcgtgatcggcttcagaatcctgctgctgaaagtggccggctttaacctgctgatgaccctgcggctgtggtccagccgcgccaagagaagcggatctggcgtgaagcagaccctgaatttcgacctgctgaagctggctggcgacgtggaatccaacccaggcccttctagaggcgggatccacaccatggctacctacgaggtgctgtgcgaggtggcaagaaagctgggcaccgacgacagagaagtggtgctgttcctgctgaacgtgttcatccctcagcctacactggcccagctgatcggtgcactgagagccctgaaagaggaaggccggctgacctttcctctgctggccgaatgcctgttcagagccggaagaagggatctgctgcgggacctgctgcatctggaccccagatttctggaaagacacctggccggcaccatgagctacttcagcccttaccagctgaccgtgctgcacgttgacggcgaactgtgcgccagagatattcggagcctgatcttcctgagcaaggacaccatcggcagccggtctacccctcagacatttctgcactgggtgtactgcatggaaaacctggacctgctcggccccacagatgtggatgccctgatgtccatgctgagaagcctgagcagagtggacctccagagacaggtgcagacactgatgggactgcacctgagcggacctagccacagccagcactacagacacacccct

SEQ ID NO: 6839 - DNA, 1899 bp, Artificial Sequence
  Synthetic Polynucloetide
atggccttaccagtgaccgccttgctcctgccgctggccttgctgctccacgccgccaggccgcagctccagctgcaagagtctggacctggcctggtcaagcctagcgagacactgagcctgacctgtaccgtgtccggcgatagcatcagcagcggcgattactactggggctggatcagacagcctcctggcaaaggactggaatggatcggccacatctactacagcggcgtgacctactacaaccccagcctgaagtccagagtgaccatcagcgtggacaccagccggaaccagttctccctgaagctgtctagcgtgacagccgccgataccgccgtgtactactgcaccagagaggacagcagcaactggcggagtagaggccagggaacactggtcacagttagctctctcgagatccagaaccctgatcctgccgtgtaccagctgcgggatagcaagagcagcgacaagagcgtgtgtctgttcaccgacttcgacagccagaccaacgtgtcccagagcaaggactccgacgtgtacatcaccgataagtgcgtgctggacatgcggagcatggacttcaagagcaactccgccgtggcctggtccaacaagtccgatttcgcctgcgccaacgccttcaacaacagcattatccccgaggacacattcttcccaagccccgagagcagctgcgacgtgaagctggtggaaaagagcttcgagacagacaccaacctgaacttccagaacctgagcgtgatcggcttcagaatcctgctgctgaaagtggccggctttaacctgctgatgaccctgcggctgtggtccagccgcgccaagagaagcggatctggcgtgaagcagaccctgaatttcgacctgctgaagctggctggcgacgtggaatccaacccaggccctactagtatggactggatttggcgcatccttttccttgtcggcgctgctaccggcgcgcattccttcgaagtgcaactggtggaaagcggaggcggacttgttcaaccaggcggaagcctgagactgagctgtgccgcttccggctttaatatcaaagacacatgcatcggatgggttcgccgcgctccagggaaagaagaggaactggttgccgacatctgtccctacaagggcagcacaagatatgccgactccgtgaaaggccggtttaccatctctgccgacacctctaagaatacggcctatctgcaaatgaactctctgcgggccgaagatacagccgtgtattactgcgccatcgtgtctgccagagatggctactataactattggggacagggaaccacagtcacagtgtcctctacgcgtgaggacctgaagaacgtgttcccacctgaggtggccgtgttcgagcctagcgaggccgagatcagccacacccagaaagccaccctcgtgtgcctggctaccggcttctaccccgaccatgtggaactgtcttggtgggtcaacggcaaagaggtgcacagcggcgtgtgtaccgacccccagccactgaaagaacagcccgccctgaacgacagccggtactgcctgagcagcagactgagagtgtccgccaccttctggcagaacccccggaaccacttcagatgccaggtgcagttctacggcctgagcgagaacgacgagtggacccaggacagagccaagcccgtgacccagatcgtgtctgccgaagcctggggcagagccgattgcggctttaccagcgagagctaccagcagggcgtgctgagcgccaccatcctgtacgagatcctgctgggcaaggccaccctgtacgccgtgctggtgtctgccctggtgctgatggctatggtcaagcggaaggacagccgggga

SEQ ID NO: 6840 - DNA, 2565 bp, Artificial Sequence
  Synthetic Polynucloetide
atggccttaccagtgaccgccttgctcctgccgctggccttgctgctccacgccgccaggccgcagctccagctgcaagagtctggacctggcctggtcaagcctagcgagacactgagcctgacctgtaccgtgtccggcgatagcatcagcagcggcgattactactggggctggatcagacagcctcctggcaaaggactggaatggatcggccacatctactacagcggcgtgacctactacaaccccagcctgaagtccagagtgaccatcagcgtggacaccagccggaaccagttctccctgaagctgtctagcgtgacagccgccgataccgccgtgtactactgcaccagagaggacagcagcaactggcggagtagaggccagggaacactggtcacagttagctctctcgagatccagaaccctgatcctgccgtgtaccagctgcgggatagcaagagcagcgacaagagcgtgtgtctgttcaccgacttcgacagccagaccaacgtgtcccagagcaaggactccgacgtgtacatcaccgataagtgcgtgctggacatgcggagcatggacttcaagagcaactccgccgtggcctggtccaacaagtccgatttcgcctgcgccaacgccttcaacaacagcattatccccgaggacacattcttcccaagccccgagagcagctgcgacgtgaagctggtggaaaagagcttcgagacagacaccaacctgaacttccagaacctgagcgtgatcggcttcagaatcctgctgctgaaagtggccggctttaacctgctgatgaccctgcggctgtggtccagccgcgccaagagaagcggatctggcgtgaagcagaccctgaatttcgacctgctgaagctggctggcgacgtggaatccaacccaggccctactagtatggactggatttggcgcatccttttccttgtcggcgctgctaccggcgcgcattccttcgaagtgcaactggtggaaagcggaggcggacttgttcaaccaggcggaagcctgagactgagctgtgccgcttccggctttaatatcaaagacacatgcatcggatgggttcgccgcgctccagggaaagaagaggaactggttgccgacatctgtccctacaagggcagcacaagatatgccgactccgtgaaaggccggtttaccatctctgccgacacctctaagaatacggcctatctgcaaatgaactctctgcgggccgaagatacagccgtgtattactgcgccatcgtgtctgccagagatggctactataactattggggacagggaaccacagtcacagtgtcctctacgcgtgaggacctgaagaacgtgttcccacctgaggtggccgtgttcgagcctagcgaggccgagatcagccacacccagaaagccaccctcgtgtgcctggctaccggcttctaccccgaccatgtggaactgtcttggtgggtcaacggcaaagaggtgcacagcggcgtgtgtaccgacccccagccactgaaagaacagcccgccctgaacgacagccggtactgcctgagcagcagactgagagtgtccgccaccttctggcagaacccccggaaccacttcagatgccaggtgcagttctacggcctgagcgagaacgacgagtggacccaggacagagccaagcccgtgacccagatcgtgtctgccgaagcctggggcagagccgattgcggctttaccagcgagagctaccagcagggcgtgctgagcgccaccatcctgtacgagatcctgctgggcaaggccaccctgtacgccgtgctggtgtctgccctggtgctgatggctatggtcaagcggaaggacagccggggaagggccaagcgatctggatctggagcaacaaacttctcactactcaaacaagcaggtgacgtggaggagaatcccgggccttctagaggcgggatccacaccatggctacctacgaggtgctgtgcgaggtggcaagaaagctgggcaccgacgacagagaagtggtgctgttcctgctgaacgtgttcatccctcagcctacactggcccagctgatcggtgcactgagagccctgaaagaggaaggccggctgacctttcctctgctggccgaatgcctgttcagagccggaagaagggatctgctgcgggacctgctgcatctggaccccagatttctggaaagacacctggccggcaccatgagctacttcagcccttaccagctgaccgtgctgcacgttgacggcgaactgtgcgccagagatattcggagcctgatcttcctgagcaaggacaccatcggcagccggtctacccctcagacatttctgcactgggtgtactgcatggaaaacctggacctgctcggccccacagatgtggatgccctgatgtccatgctgagaagcctgagcagagtggacctccagagacaggtgcagacactgatgggactgcacctgagcggacctagccacagccagcactacagacacacccct

SEQ ID NO: 6841 - DNA, 2709 bp, Artificial Sequence
  Synthetic Polynucloetide
atggccttaccagtgaccgccttgctcctgccgctggccttgctgctccacgccgccaggccgctcgaggggaaaccaattcccaaccctcttctgggactggattcaaccggcagcggcgaggacctgaagaacgtgttcccacctgaggtggccgtgttcgagcctagcaaggccgagatcgcccacacccagaaagccaccctcgtgtgcctggctaccggcttctaccccgaccatgtggaactgtcttggtgggtcaacggcaaagaggtgcacagcggcgtgtgtaccgacccccagccactgaaagaacagcccgccctgaacgacagccggtactgcctgagcagcagactgagagtgtccgccaccttctggcagaacccccggaaccacttcagatgccaggtgcagttctacggcctgagcgagaacgacgagtggacccaggacagagccaagcccgtgacccagatcgtgtctgccgaagcctggggcagagccgattgcggcatcaccagcgccagctaccaccagggcgtgctgagcgccaccatcctgtacgagatcctgctgggcaaggccaccctgtacgccgtgctggtgtctgccctggtgctgatggctatggtcaagcggaaggacagccggggaagggccaagcgatctggatctggagcaacaaacttctcactactcaaacaagcaggtgacgtggaggagaatcccgggcctactagcatggccttaccagtgaccgccttgctcctgccgctggccttgctgctccacgccgccaggccgcagctccagctgcaagagtctggacctggcctggtcaagcctagcgagacactgagcctgacctgtaccgtgtccggcgatagcatcagcagcggcgattactactggggctggatcagacagcctcctggcaaaggactggaatggatcggccacatctactacagcggcgtgacctactacaaccccagcctgaagtccagagtgaccatcagcgtggacaccagccggaaccagttctccctgaagctgtctagcgtgacagccgccgataccgccgtgtactactgcaccagagaggacagcagcaactggcggagtagaggccagggaacactggtcacagttagctctctcgagagcggcggaggcggatctttcgaagtgcaactggtggaaagcggaggcggacttgttcaaccaggcggaagcctgagactgagctgtgccgcttccggctttaatatcaaagacacatgcatcggatgggttcgccgcgctccagggaaagaagaggaactggttgccgacatctgtccctacaagggcagcacaagatatgccgactccgtgaaaggccggtttaccatctctgccgacacctctaagaatacggcctatctgcaaatgaactctctgcgggccgaagatacagccgtgtattactgcgccatcgtgtctgccagagatggctactataactattggggacagggaaccacagtcacagtgtcctctacgcgtgagcagaaactgatctcggaagaggatgggagcggcatccagaaccctgatcctgccgtgtaccagctgcgggatagcaagagcagcgacaagagcgtgtgtctgttcaccgacttcgacagccagaccaacgtgtcccagagcaaggactccgacgtgtacatcaccgataagtgcgtgctggacatgcggagcatggacttcaagagcaactccgccgtggcctggtccaacaagtccgatttcgcctgcgccaacgccttcaacaacagcattatccccgaggacacattcttcccaagcagcgacgtgccctgcgacgtgaagctggtggaaaagagcttcgagacagacaccaacctgaacttccagaacctgagcgtgatcggcttcagaatcctgctgctgaaagtggccggctttaacctgctgatgaccctgcggctgtggtccagccgcgccaagagaagcggatctggcgtgaagcagaccctgaatttcgacctgctgaagctggctggcgacgtggaatccaacccaggcccttctagaggccatatgaccgagtacaagcccacggtgcgcctcgccacccgcgacgacgtccccagggccgtacgcaccctcgccgccgcgttcgccgactaccccgccacgcgccacaccgtcgatccggaccgccacatcgagcgggtcaccgagctgcaagaactcttcctcacgcgcgtcgggctcgacatcggcaaggtgtgggtcgcggacgacggcgccgcggtggcggtctggaccacgccggagagcgtcgaagcgggggcggtgttcgccgagatcggcccgcgcatggccgagttgagcggttcccggctggccgcgcagcaacagatggaaggcctcctggcgccgcaccggcccaaggagcccgcgtggttcctggccaccgtcggcgtctcgcccgaccaccagggcaagggtctgggcagcgccgtcgtgctccccggagtggaggcggccgagcgcgccggggtgcccgccttcctggagacctccgcgccccgcaacctccccttctacgagcggctcggcttcaccgtcaccgccgacgtcgaggtgcccgaaggaccgcgcacctggtgcatgacccgcaagcccggtgcctga

SEQ ID NO: 6842 - DNA, 2712 bp, Artificial Sequence
  Synthetic Polynucloetide
atggccttaccagtgaccgccttgctcctgccgctggccttgctgctccacgccgccaggccgctcgagcagaaactgatctcggaagaggatctgggctccggcgatcgccctgatcctgccgtgtaccagctgcgggatagcaagagcagcgacaagagcgtgtgtctgttcaccgacttcgacagccagaccaacgtgtcccagagcaaggactccgacgtgtacatcaccgataagtgcgtgctggacatgcggagcatggacttcaagagcaactccgccgtggcctggtccaacaagtccgatttcgcctgcgccaacgccttcaacaacagcattatccccgaggacacattcttcccaagccccgagagcagctgcgacgtgaagctggtggaaaagagcttcgagacagacaccaacctgaacttccagaacctgagcgtgatcggcttcagaatcctgctgctgaaagtggccggctttaacctgctgatgaccctgcggctgtggtccagctctagtcgcgccaagagaagcggatctggcgtgaagcagaccctgaatttcgacctgctgaagctggctggcgacgtggaatccaacccaggccccactagcatggccttaccagtgaccgccttgctcctgccgctggccttgctgctccacgccgccaggccgcagctccagctgcaagagtctggacctggcctggtcaagcctagcgagacactgagcctgacctgtaccgtgtccggcgatagcatcagcagcggcgattactactggggctggatcagacagcctcctggcaaaggactggaatggatcggccacatctactacagcggcgtgacctactacaaccccagcctgaagtccagagtgaccatcagcgtggacaccagccggaaccagttctccctgaagctgtctagcgtgacagccgccgataccgccgtgtactactgcaccagagaggacagcagcaactggcggagtagaggccagggaacactggtcacagttagctctctcgagagcggcggaggcggatctttcgaagtgcaactggtggaaagcggaggcggacttgttcaaccaggcggaagcctgagactgagctgtgccgcttccggctttaatatcaaagacacatgcatcggatgggttcgccgcgctccagggaaagaagaggaactggttgccgacatctgtccctacaagggcagcacaagatatgccgactccgtgaaaggccggtttaccatctctgccgacacctctaagaatacggcctatctgcaaatgaactctctgcgggccgaagatacagccgtgtattactgcgccatcgtgtctgccagagatggctactataactattggggacagggaaccacagtcacagtgtcctctacgcgtgggaaaccaattcccaaccctcttctgggactggattcaaccggcagcggcgaggacctgaagaacgtgttcccacctgaggtggccgtgttcgagcctagcgaggccgagatcagccacacccagaaagccaccctcgtgtgcctggctaccggcttctaccccgaccatgtggaactgtcttggtgggtcaacggcaaagaggtgcacagcggcgtgtgtaccgacccccagccactgaaagaacagcccgccctgaacgacagccggtactgcctgagcagcagactgagagtgtccgccaccttctggcagaacccccggaaccacttcagatgccaggtgcagttctacggcctgagcgagaacgacgagtggacccaggacagagccaagcccgtgacccagatcgtgtctgccgaagcctggggcagagccgattgcggctttaccagcgagagctaccagcagggcgtgctgagcgccaccatcctgtacgagatcctgctgggcaaggccaccctgtacgccgtgctggtgtctgccctggtgctgatggctatggtcaagcggaaggacagccggggaagggccaagcgatctggatctggagcaacaaacttctcactactcaaacaagcaggtgacgtggaggagaatcccgggccttctagaggccatatgaccgagtacaagcccacggtgcgcctcgccacccgcgacgacgtccccagggccgtacgcaccctcgccgccgcgttcgccgactaccccgccacgcgccacaccgtcgatccggaccgccacatcgagcgggtcaccgagctgcaagaactcttcctcacgcgcgtcgggctcgacatcggcaaggtgtgggtcgcggacgacggcgccgcggtggcggtctggaccacgccggagagcgtcgaagcgggggcggtgttcgccgagatcggcccgcgcatggccgagttgagcggttcccggctggccgcgcagcaacagatggaaggcctcctggcgccgcaccggcccaaggagcccgcgtggttcctggccaccgtcggcgtctcgcccgaccaccagggcaagggtctgggcagcgccgtcgtgctccccggagtggaggcggccgagcgcgccggggtgcccgccttcctggagacctccgcgccccgcaacctccccttctacgagcggctcggcttcaccgtcaccgccgacgtcgaggtgcccgaaggaccgcgcacctggtgcatgacccgcaagcccggtgcctga

SEQ ID NO: 6843 - DNA, 2589 bp, Artificial Sequence
  Synthetic Polynucloetide
atggccttaccagtgaccgccttgctcctgccgctggccttgctgctccacgccgccaggccgcagctccagctgcaagagtctggacctggcctggtcaagcctagcgagacactgagcctgacctgtaccgtgtccggcgatagcatcagcagcggcgattactactggggctggatcagacagcctcctggcaaaggactggaatggatcggccacatctactacagcggcgtgacctactacaaccccagcctgaagtccagagtgaccatcagcgtggacaccagccggaaccagttctccctgaagctgtctagcgtgacagccgccgataccgccgtgtactactgcaccagagaggacagcagcaactggcggagtagaggccagggaacactggtcacagttagctctctcgaggacctgaagaacgtgttcccacctgaggtggccgtgttcgagcctagcgaggccgagatcagccacacccagaaagccaccctcgtgtgcctggctaccggcttctaccccgaccatgtggaactgtcttggtgggtcaacggcaaagaggtgcacagcggcgtgtctaccgacccccagccactgaaagaacagcccgccctgaacgacagccggtactgcctgagcagcagactgagagtgtccgccaccttctggcagaacccccggaaccacttcagatgccaggtgcagttctacggcctgagcgagaacgacgagtggacccaggacagagccaagcccgtgacccagatcgtgtctgccgaagcctggggcagagccgattgcggctttaccagcgagagctaccagcagggcgtgctgagcgccaccatcctgtacgagatcctgctgggcaaggccaccctgtacgccgtgctggtgtctgccctggtgctgatggctatggtcaagcggaaggacagccggggaagggccaagcgatctggatctggagcaacaaacttctcactactcaaacaagcaggtgacgtggaggagaatcccgggcctactagtatggactggatttggcgcatccttttccttgtcggcgctgctaccggcgcgcattccttcgaagtgcaactggtggaaagcggaggcggacttgttcaaccaggcggaagcctgagactgagctgtgccgcttccggctttaatatcaaagacacatgcatcggatgggttcgccgcgctccagggaaagaagaggaactggttgccgacatctgtccctacaagggcagcacaagatatgccgactccgtgaaaggccggtttaccatctctgccgacacctctaagaatacggcctatctgcaaatgaactctctgcgggccgaagatacagccgtgtattactgcgccatcgtgtctgccagagatggctactataactattggggacagggaaccacagtcacagtgtcctctacgcgtatccagaaccctgatcctgccgtgtaccagctgcgggatagcaagagcagcgacaagagcgtgtgtctgttcaccgacttcgacagccagaccaacgtgtcccagagcaaggactccgacgtgtacatcaccgataagaccgtgctggacatgcggagcatggacttcaagagcaactccgccgtggcctggtccaacaagtccgatttcgcctgcgccaacgccttcaacaacagcattatccccgaggacacattcttcccaagccccgagagcagctgcgacgtgaagctggtggaaaagagcttcgagacagacaccaacctgaacttccagaacctgagcgtgatcggcttcagaatcctgctgctgaaagtggccggctttaacctgctgatgaccctgcggctgtggtccagccgcgccaagagaagcggatctggcgtgaagcagaccctgaatttcgacctgctgaagctggctggcgacgtggaatccaacccaggcccttctagaggccatatgaccgagtacaagcccacggtgcgcctcgccacccgcgacgacgtccccagggccgtacgcaccctcgccgccgcgttcgccgactaccccgccacgcgccacaccgtcgatccggaccgccacatcgagcgggtcaccgagctgcaagaactcttcctcacgcgcgtcgggctcgacatcggcaaggtgtgggtcgcggacgacggcgccgcggtggcggtctggaccacgccggagagcgtcgaagcgggggcggtgttcgccgagatcggcccgcgcatggccgagttgagcggttcccggctggccgcgcagcaacagatggaaggcctcctggcgccgcaccggcccaaggagcccgcgtggttcctggccaccgtcggcgtctcgcccgaccaccagggcaagggtctgggcagcgccgtcgtgctccccggagtggaggcggccgagcgcgccggggtgcccgccttcctggagacctccgcgccccgcaacctccccttctacgagcggctcggcttcaccgtcaccgccgacgtcgaggtgcccgaaggaccgcgcacctggtgcatgacccgcaagcccggtgcctga

SEQ ID NO: 6844 - DNA, 2835 bp, Artificial Sequence
  Synthetic Polynucloetide
atggccttaccagtgaccgccttgctcctgccgctggccttgctgctccacgccgccaggccgcagctccagctgcaagagtctggacctggcctggtcaagcctagcgagacactgagcctgacctgtaccgtgtccggcgatagcatcagcagcggcgattactactggggctggatcagacagcctcctggcaaaggactggaatggatcggccacatctactacagcggcgtgacctactacaaccccagcctgaagtccagagtgaccatcagcgtggacaccagccggaaccagttctccctgaagctgtctagcgtgacagccgccgataccgccgtgtactactgcaccagagaggacagcagcaactggcggagtagaggccagggaacactggtcacagttagctctctcgaggacctgaagaacgtgttcccacctgaggtggccgtgttcgagcctagcgaggccgagatcagccacacccagaaagccaccctcgtgtgcctggctaccggcttctaccccgaccatgtggaactgtcttggtgggtcaacggcaaagaggtgcacagcggcgtgtctaccgacccccagccactgaaagaacagcccgccctgaacgacagccggtactgcctgagcagcagactgagagtgtccgccaccttctggcagaacccccggaaccacttcagatgccaggtgcagttctacggcctgagcgagaacgacgagtggacccaggacagagccaagcccgtgacccagatcgtgtctgccgaagcctggggcagagccgattgcggctttaccagcgagagctaccagcagggcgtgctgagcgccaccatcctgtacgagatcctgctgggcaaggccaccctgtacgccgtgctggtgtctgccctggtgctgatggctatggtcaagcggaaggacagccggggaagggccaagcgatctggatctggagcaacaaacttctcactactcaaacaagcaggtgacgtggaggagaatcccgggcctactagtatggactggatttggcgcatccttttccttgtcggcgctgctaccggcgcgcattccttcgaagtgcaactggtggaaagcggaggcggacttgttcaaccaggcggaagcctgagactgagctgtgccgcttccggctttaatatcaaagacacatgcatcggatgggttcgccgcgctccagggaaagaagaggaactggttgccgacatctgtccctacaagggcagcacaagatatgccgactccgtgaaaggccggtttaccatctctgccgacacctctaagaatacggcctatctgcaaatgaactctctgcgggccgaagatacagccgtgtattactgcgccatcgtgtctgccagagatggctactataactattggggacagggaaccacagtcacagtgtcctctacgcgtgagcagaaactgatctcggaagaggatgggagcggcaccccattcccttctctggcccctcccatcatgctgctggtggacggcaagcagcagatggtggtcgtgtgcctggtgctggatgtggccccacctggactggacagccccatctggtttagcgccggcaatggctctgccctggacgcctttacctacggcccaagccctgccaccgatggcacctggacaaatctggcccacctgagcctgcccagcgaggaactggcttcttgggagcctctcgtgtgccacacaggacctggcgctgagggacacagcagatccacccagcctatgcacctgtctggcgaggccagcaccgccagaacctgtcctcaggaacctctgagaggcacccctggcggagcactgtggctgggagtgctgagactgctgctgttcaagctgctgctgtttgacctgctgctgacctgctcctgtctgtgcgatcctgccggccctctgccttctcctgccaccaccacaagactgagagccctgggcagccacagactgcaccctgccacagagacaggcggcagagaggccacaagcagccctagaccccagcccagagacagaagatggggcgataccccccctggcagaaagcctggatctccagtccgcgccaagagaagcggatctggcgtgaagcagaccctgaatttcgacctgctgaagctggctggcgacgtggaatccaacccaggcccttctagaggccatatgaccgagtacaagcccacggtgcgcctcgccacccgcgacgacgtccccagggccgtacgcaccctcgccgccgcgttcgccgactaccccgccacgcgccacaccgtcgatccggaccgccacatcgagcgggtcaccgagctgcaagaactcttcctcacgcgcgtcgggctcgacatcggcaaggtgtgggtcgcggacgacggcgccgcggtggcggtctggaccacgccggagagcgtcgaagcgggggcggtgttcgccgagatcggcccgcgcatggccgagttgagcggttcccggctggccgcgcagcaacagatggaaggcctcctggcgccgcaccggcccaaggagcccgcgtggttcctggccaccgtcggcgtctcgcccgaccaccagggcaagggtctgggcagcgccgtcgtgctccccggagtggaggcggccgagcgcgccggggtgcccgccttcctggagacctccgcgccccgcaacctccccttctacgagcggctcggcttcaccgtcaccgccgacgtcgaggtgcccgaaggaccgcgcacctggtgcatgacccgcaagcccggtgcctga

SEQ ID NO: 6845 - DNA, 2874 bp, Artificial Sequence
  Synthetic Polynucloetide
atggccttaccagtgaccgccttgctcctgccgctggccttgctgctccacgccgccaggccgctcgaggacctgaagaacgtgttcccacctgaggtggccgtgttcgagcctagcgaggccgagatcagccacacccagaaagccaccctcgtgtgcctggctaccggcttctaccccgaccatgtggaactgtcttggtgggtcaacggcaaagaggtgcacagcggcgtgtctaccgacccccagccactgaaagaacagcccgccctgaacgacagccggtactgcctgagcagcagactgagagtgtccgccaccttctggcagaacccccggaaccacttcagatgccaggtgcagttctacggcctgagcgagaacgacgagtggacccaggacagagccaagcccgtgacccagatcgtgtctgccgaagcctggggcagagccgattgcggctttaccagcgagagctaccagcagggcgtgctgagcgccaccatcctgtacgagatcctgctgggcaaggccaccctgtacgccgtgctggtgtctgccctggtgctgatggctatggtcaagcggaaggacagccggggaagggccaagcgatctggatctggagcaacaaacttctcactactcaaacaagcaggtgacgtggaggagaatcccgggcctactagcatggccttaccagtgaccgccttgctcctgccgctggccttgctgctccacgccgccaggccgcagctccagctgcaagagtctggacctggcctggtcaagcctagcgagacactgagcctgacctgtaccgtgtccggcgatagcatcagcagcggcgattactactggggctggatcagacagcctcctggcaaaggactggaatggatcggccacatctactacagcggcgtgacctactacaaccccagcctgaagtccagagtgaccatcagcgtggacaccagccggaaccagttctccctgaagctgtctagcgtgacagccgccgataccgccgtgtactactgcaccagagaggacagcagcaactggcggagtagaggccagggaacactggtcacagttagctctctcgagagcggcggaggcggatctttcgaagtgcaactggtggaaagcggaggcggacttgttcaaccaggcggaagcctgagactgagctgtgccgcttccggctttaatatcaaagacacatgcatcggatgggttcgccgcgctccagggaaagaagaggaactggttgccgacatctgtccctacaagggcagcacaagatatgccgactccgtgaaaggccggtttaccatctctgccgacacctctaagaatacggcctatctgcaaatgaactctctgcgggccgaagatacagccgtgtattactgcgccatcgtgtctgccagagatggctactataactattggggacagggaaccacagtcacagtgtcctctacgcgtgagcagaaactgatctcggaagaggatctggggagcggcaccccattcccttctctggcccctcccatcatgctgctggtggacggcaagcagcagatggtggtcgtgtgcctggtgctggatgtggccccacctggactggacagccccatctggtttagcgccggcaatggctctgccctggacgcctttacctacggcccaagccctgccaccgatggcacctggacaaatctggcccacctgagcctgcccagcgaggaactggcttcttgggagcctctcgtgtgccacacaggacctggcgctgagggacacagcagatccacccagcctatgcacctgtctggcgaggccagcaccgccagaacctgtcctcaggaacctctgagaggcacccctggcggagcactgtggctgggagtgctgagactgctgctgttcaagctgctgctgtttgacctgctgctgacctgctcctgtctgtgcgatcctgccggccctctgccttctcctgccaccaccacaagactgagagccctgggcagccacagactgcaccctgccacagagacaggcggcagagaggccacaagcagccctagaccccagcccagagacagaagatggggcgataccccccctggcagaaagcctggatctccagtccgcgccaagagaagcggatctggcgtgaagcagaccctgaatttcgacctgctgaagctggctggcgacgtggaatccaacccaggcccttctagatctagaggccatatgaccgagtacaagcccacggtgcgcctcgccacccgcgacgacgtccccagggccgtacgcaccctcgccgccgcgttcgccgactaccccgccacgcgccacaccgtcgatccggaccgccacatcgagcgggtcaccgagctgcaagaactcttcctcacgcgcgtcgggctcgacatcggcaaggtgtgggtcgcggacgacggcgccgcggtggcggtctggaccacgccggagagcgtcgaagcgggggcggtgttcgccgagatcggcccgcgcatggccgagttgagcggttcccggctggccgcgcagcaacagatggaaggcctcctggcgccgcaccggcccaaggagcccgcgtggttcctggccaccgtcggcgtctcgcccgaccaccagggcaagggtctgggcagcgccgtcgtgctccccggagtggaggcggccgagcgcgccggggtgcccgccttcctggagacctccgcgccccgcaacctccccttctacgagcggctcggcttcaccgtcaccgccgacgtcgaggtgcccgaaggaccgcgcacctggtgcatgacccgcaagcccggtgcctga

SEQ ID NO: 6846 - DNA, 2700 bp, Artificial Sequence
  Synthetic Polynucloetide
atggccttaccagtgaccgccttgctcctgccgctggccttgctgctccacgccgccaggccgcagctccagctgcaagagtctggacctggcctggtcaagcctagcgagacactgagcctgacctgtaccgtgtccggcgatagcatcagcagcggcgattactactggggctggatcagacagcctcctggcaaaggactggaatggatcggccacatctactacagcggcgtgacctactacaaccccagcctgaagtccagagtgaccatcagcgtggacaccagccggaaccagttctccctgaagctgtctagcgtgacagccgccgataccgccgtgtactactgcaccagagaggacagcagcaactggcggagtagaggccagggaacactggtcacagttagctctctcgaggggaaaccaattcccaaccctcttctgggactggattcaaccggcagcggcgacaagcagctggacgccgacgtgtcccccaagcctaccatcttcctgccctctatcgccgagacaaagctccagaaggccggcacctacctgtgcctgctggaaaagttcttcccagatgtgattaagatccactggcaggaaaagaagtccaacaccatcctgggcagccaggaaggcaacaccatgaagaccaacgacacctacatgaagttcagctggctgaccgtgcccgagaagtccctggacaaagaacacagatgcatcgtgcggcacgaaaacaacaagaacggcgtggaccaggaaatcatcttcccacccatcaagaccgatgtgattacaatggaccccaaggacaactgctccaaggacgccaacgataccctgctgctccagctgaccaacaccagcgcctactacatgtacttgttgctgctgctgaagtccgtggtgtacttcgccatcatcacatgctgcctgctgcggagaaccgccttctgctgcaacggcgagaagtctagggccaagcgatctggatctggagcaacaaacttctcactactcaaacaagcaggtgacgtggaggagaatcccgggcctactagtatggactggatttggcgcatccttttccttgtcggcgctgctaccggcgcgcattccttcgaagtgcaactggtggaaagcggaggcggacttgttcaaccaggcggaagcctgagactgagctgtgccgcttccggctttaatatcaaagacacatgcatcggatgggttcgccgcgctccagggaaagaagaggaactggttgccgacatctgtccctacaagggcagcacaagatatgccgactccgtgaaaggccggtttaccatctctgccgacacctctaagaatacggcctatctgcaaatgaactctctgcgggccgaagatacagccgtgtattactgcgccatcgtgtctgccagagatggctactataactattggggacagggaaccacagtcacagtgtcctctacgcgtgagcagaaactgatctcggaagaggatgggagcggcagccagcctcacaccaagcccagcgtgttcgtgatgaagaacggcaccaacgtggcctgcctcgtgaaagagttctaccccaaggacatcaggatcaacctggtgtccagcaagaagatcaccgagttcgaccccgccatcgtgatctcccccagcggcaagtacaacgccgtgaagctggggaagtacgaggacagcaacagcgtgacctgctccgtgcagcacgacaacaagaccgtgcacagcaccgactttgaagtgaaaaccgactccaccgaccacgtgaagcccaaagagacagagaacaccaagcagcccagcaagagctgccacaagcccaaggccatcgtgcacaccgagaaagtgaacatgatgagcctgaccgtgctgggcctgcggatgctgttcgccaaaaccgtggccgtgaacttcctgctgaccgccaagctgttcttcctccgcgccaagagaagcggatctggcgtgaagcagaccctgaatttcgacctgctgaagctggctggcgacgtggaatccaacccaggcccttctagaggccatatgaccgagtacaagcccacggtgcgcctcgccacccgcgacgacgtccccagggccgtacgcaccctcgccgccgcgttcgccgactaccccgccacgcgccacaccgtcgatccggaccgccacatcgagcgggtcaccgagctgcaagaactcttcctcacgcgcgtcgggctcgacatcggcaaggtgtgggtcgcggacgacggcgccgcggtggcggtctggaccacgccggagagcgtcgaagcgggggcggtgttcgccgagatcggcccgcgcatggccgagttgagcggttcccggctggccgcgcagcaacagatggaaggcctcctggcgccgcaccggcccaaggagcccgcgtggttcctggccaccgtcggcgtctcgcccgaccaccagggcaagggtctgggcagcgccgtcgtgctccccggagtggaggcggccgagcgcgccggggtgcccgccttcctggagacctccgcgccccgcaacctccccttctacgagcggctcggcttcaccgtcaccgccgacgtcgaggtgcccgaaggaccgcgcacctggtgcatgacccgcaagcccggtgcctga

SEQ ID NO: 6847 - DNA, 1911 bp, Artificial Sequence
  Synthetic Polynucloetide
atggccttaccagtgaccgccttgctcctgccgctggccttgctgctccacgccgccaggccgcagctccagctgcaagagtctggacctggcctggtcaagcctagcgagacactgagcctgacctgtaccgtgtccggcgatagcatcagcagcggcgattactactggggctggatcagacagcctcctggcaaaggactggaatggatcggccacatctactacagcggcgtgacctactacaaccccagcctgaagtccagagtgaccatcagcgtggacaccagccggaaccagttctccctgaagctgtctagcgtgacagccgccgataccgccgtgtactactgcaccagagaggacagcagcaactggcggagtagaggccagggaacactggtcacagttagctctctcgagagccagcctcacaccaagcccagcgtgttcgtgatgaagaacggcaccaacgtggcctgcctcgtgaaagagttctaccccaaggacatcaggatcaacctggtgtccagcaagaagatcaccgagttcgaccccgccatcgtgatctcccccagcggcaagtacaacgccgtgaagctggggaagtacgaggacagcaacagcgtgacctgctccgtgcagcacgacaacaagaccgtgcacagcaccgactttgaagtgaaaaccgactccaccgaccacgtgaagcccaaagagacagagaacaccaagcagcccagcaagagctgccacaagcccaaggccatcgtgcacaccgagaaagtgaacatgatgagcctgaccgtgctgggcctgcggatgctgttcgccaaaaccgtggccgtgaacttcctgctgaccgccaagctgttcttcctcagggccaagcgatctggatctggagcaacaaacttctcactactcaaacaagcaggtgacgtggaggagaatcccgggcctactagtatggactggatttggcgcatccttttccttgtcggcgctgctaccggcgcgcattccttcgaagtgcaactggtggaaagcggaggcggacttgttcaaccaggcggaagcctgagactgagctgtgccgcttccggctttaatatcaaagacacatgcatcggatgggttcgccgcgctccagggaaagaagaggaactggttgccgacatctgtccctacaagggcagcacaagatatgccgactccgtgaaaggccggtttaccatctctgccgacacctctaagaatacggcctatctgcaaatgaactctctgcgggccgaagatacagccgtgtattactgcgccatcgtgtctgccagagatggctactataactattggggacagggaaccacagtcacagtgtcctctacgcgtgacaagcagctggacgccgacgtgtcccccaagcctaccatcttcctgccctctatcgccgagacaaagctccagaaggccggcacctacctgtgcctgctggaaaagttcttcccagatgtgattaagatccactggcaggaaaagaagtccaacaccatcctgggcagccaggaaggcaacaccatgaagaccaacgacacctacatgaagttcagctggctgaccgtgcccgagaagtccctggacaaagaacacagatgcatcgtgcggcacgaaaacaacaagaacggcgtggaccaggaaatcatcttcccacccatcaagaccgatgtgattacaatggaccccaaggacaactgctccaaggacgccaacgataccctgctgctccagctgaccaacaccagcgcctactacatgtacttgttgctgctgctgaagtccgtggtgtacttcgccatcatcacatgctgcctgctgcggagaaccgccttctgctgcaacggcgagaagtct

SEQ ID NO: 6848 - DNA, 2730 bp, Artificial Sequence
  Synthetic Polynucloetide
atggccttaccagtgaccgccttgctcctgccgctggccttgctgctccacgccgccaggccgctcgaggggaaaccaattcccaaccctcttctgggactggattcaaccggcagcggcgacaagcagctggacgccgacgtgtcccccaagcctaccatcttcctgccctctatcgccgagacaaagctccagaaggccggcacctacctgtgcctgctggaaaagttcttcccagatgtgattaagatccactggcaggaaaagaagtccaacaccatcctgggcagccaggaaggcaacaccatgaagaccaacgacacctacatgaagttcagctggctgaccgtgcccgagaagtccctggacaaagaacacagatgcatcgtgcggcacgaaaacaacaagaacggcgtggaccaggaaatcatcttcccacccatcaagaccgatgtgattacaatggaccccaaggacaactgctccaaggacgccaacgataccctgctgctccagctgaccaacaccagcgcctactacatgtacttgttgctgctgctgaagtccgtggtgtacttcgccatcatcacatgctgcctgctgcggagaaccgccttctgctgcaacggcgagaagtctagggccaagcgatctggatctggagcaacaaacttctcactactcaaacaagcaggtgacgtggaggagaatcccgggcctactagcatggccttaccagtgaccgccttgctcctgccgctggccttgctgctccacgccgccaggccgcagctccagctgcaagagtctggacctggcctggtcaagcctagcgagacactgagcctgacctgtaccgtgtccggcgatagcatcagcagcggcgattactactggggctggatcagacagcctcctggcaaaggactggaatggatcggccacatctactacagcggcgtgacctactacaaccccagcctgaagtccagagtgaccatcagcgtggacaccagccggaaccagttctccctgaagctgtctagcgtgacagccgccgataccgccgtgtactactgcaccagagaggacagcagcaactggcggagtagaggccagggaacactggtcacagttagctctctcgagagcggcggaggcggatctttcgaagtgcaactggtggaaagcggaggcggacttgttcaaccaggcggaagcctgagactgagctgtgccgcttccggctttaatatcaaagacacatgcatcggatgggttcgccgcgctccagggaaagaagaggaactggttgccgacatctgtccctacaagggcagcacaagatatgccgactccgtgaaaggccggtttaccatctctgccgacacctctaagaatacggcctatctgcaaatgaactctctgcgggccgaagatacagccgtgtattactgcgccatcgtgtctgccagagatggctactataactattggggacagggaaccacagtcacagtgtcctctacgcgtgagcagaaactgatctcggaagaggatgggagcggcagccagcctcacaccaagcccagcgtgttcgtgatgaagaacggcaccaacgtggcctgcctcgtgaaagagttctaccccaaggacatcaggatcaacctggtgtccagcaagaagatcaccgagttcgaccccgccatcgtgatctcccccagcggcaagtacaacgccgtgaagctggggaagtacgaggacagcaacagcgtgacctgctccgtgcagcacgacaacaagaccgtgcacagcaccgactttgaagtgaaaaccgactccaccgaccacgtgaagcccaaagagacagagaacaccaagcagcccagcaagagctgccacaagcccaaggccatcgtgcacaccgagaaagtgaacatgatgagcctgaccgtgctgggcctgcggatgctgttcgccaaaaccgtggccgtgaacttcctgctgaccgccaagctgttcttcctccgcgccaagagaagcggatctggcgtgaagcagaccctgaatttcgacctgctgaagctggctggcgacgtggaatccaacccaggcccttctagaggccatatgaccgagtacaagcccacggtgcgcctcgccacccgcgacgacgtccccagggccgtacgcaccctcgccgccgcgttcgccgactaccccgccacgcgccacaccgtcgatccggaccgccacatcgagcgggtcaccgagctgcaagaactcttcctcacgcgcgtcgggctcgacatcggcaaggtgtgggtcgcggacgacggcgccgcggtggcggtctggaccacgccggagagcgtcgaagcgggggcggtgttcgccgagatcggcccgcgcatggccgagttgagcggttcccggctggccgcgcagcaacagatggaaggcctcctggcgccgcaccggcccaaggagcccgcgtggttcctggccaccgtcggcgtctcgcccgaccaccagggcaagggtctgggcagcgccgtcgtgctccccggagtggaggcggccgagcgcgccggggtgcccgccttcctggagacctccgcgccccgcaacctccccttctacgagcggctcggcttcaccgtcaccgccgacgtcgaggtgcccgaaggaccgcgcacctggtgcatgacccgcaagcccggtgcctga

SEQ ID NO: 6849 - DNA, 3120 bp, Artificial Sequence
  Synthetic Polynucloetide
atggccttaccagtgaccgccttgctcctgccgctggccttgctgctccacgccgccaggccgcagctccagctgcaagagtctggacctggcctggtcaagcctagcgagacactgagcctgacctgtaccgtgtccggcgatagcatcagcagcggcgattactactggggctggatcagacagcctcctggcaaaggactggaatggatcggccacatctactacagcggcgtgacctactacaaccccagcctgaagtccagagtgaccatcagcgtggacaccagccggaaccagttctccctgaagctgtctagcgtgacagccgccgataccgccgtgtactactgcaccagagaggacagcagcaactggcggagtagaggccagggaacactggtcacagttagctctggacagcctaaggccaatcctaccgtgacactgttccctccaagcagcgaagaactccaggccaacaaggccacacttgtgtgcctgatctccgacttctaccctggggctgtgacagtggcttggaaggccgatggatctcctgtgaaagccggcgtggaaaccaccaagccatccaagcagagcaacaacaaatacgccgccagctcctacctgagcctgacacctgagcagtggaagtcccacagatcctacagctgccaagtgacccacgaaggcagcaccgtggaaaagacagtggcccctacagagtgcagcggatcccagagcttcggcctgctggaccccaagctgtgctacctgctggatggcatcctgttcatctacggcgtgatcctgaccgccctgttcctgagagtgaagttcagcagaagcgccgacgcccctgcctaccagcagggacagaaccaactgtacaacgagctgaacctgggcagacgggaagagtacgacgtgctggacaagcggagaggcagggaccctgagatgggcggaaagccccagcggagaaagaacccccaggaaggactgtataacgaactccagaaagacaagatggccgaagcctacagcgagatcggcatgaagggcgagcggagaagaggcaagggccacgatggcctgtaccagggcctgagcaccgccaccaaggacacctatgacgccctgcacatgcaggccctgcctccaagaagggccaagcgatctggatctggagcaacaaacttctcactactcaaacaagcaggtgacgtggaggagaatcccgggcctactagtatggactggatttggcgcatccttttccttgtcggcgctgctaccggcgcgcattccttcgaagtgcaactggtggaaagcggaggcggacttgttcaaccaggcggaagcctgagactgagctgtgccgcttccggctttaatatcaaagacacatgcatcggatgggttcgccgcgctccagggaaagaagaggaactggttgccgacatctgtccctacaagggcagcacaagatatgccgactccgtgaaaggccggtttaccatctctgccgacacctctaagaatacggcctatctgcaaatgaactctctgcgggccgaagatacagccgtgtattactgcgccatcgtgtctgccagagatggctactataactattggggacagggaaccacagtcacagtgtcctctgcctctacaaagggaccctccgtgtttcctctggctcccagcagcaagtctacaagcggaggaacagccgctctgggctgcctggtcaaggattactttcccgagcctgtgaccgtgtcctggaatagcggagcactgacaagcggcgtgcacacctttccagccgtgctgcaaagcagcggcctgtactctctgagcagcgtggtcacagtgcctagctctagcctgggcacccagacctacatctgcaatgtgaaccacaagcctagcaacaccaaggtggacaagagagtggaacccaagagctgtggtacccagagttttgggttgttggaccctaaattgtgctatctgttggacggaatcctgttcatttacggagtgatcctgaccgcattgttcctgcgggttaagttttccagatccgcagacgcacccgcttaccaacaagggcagaaccaactctacaatgaacttaatttggggcggagggaagagtacgacgttctggacaaaaggaggggacgagatcccgagatgggcggaaagcctcagcgaaggaagaatccgcaagaggggctttataacgaactccagaaagataaaatggcagaagcctatagtgagattgggatgaagggagaaaggaggaggggtaaaggtcacgatgggttgtaccaaggattgagcacagccactaaagatacctatgatgcgctccacatgcaggccctgccgccaagacgcgccaagagaagcggatctggcgtgaagcagaccctgaatttcgacctgctgaagctggctggcgacgtggaatccaacccaggcccttctagaggccatatgaccgagtacaagcccacggtgcgcctcgccacccgcgacgacgtccccagggccgtacgcaccctcgccgccgcgttcgccgactaccccgccacgcgccacaccgtcgatccggaccgccacatcgagcgggtcaccgagctgcaagaactcttcctcacgcgcgtcgggctcgacatcggcaaggtgtgggtcgcggacgacggcgccgcggtggcggtctggaccacgccggagagcgtcgaagcgggggcggtgttcgccgagatcggcccgcgcatggccgagttgagcggttcccggctggccgcgcagcaacagatggaaggcctcctggcgccgcaccggcccaaggagcccgcgtggttcctggccaccgtcggcgtctcgcccgaccaccagggcaagggtctgggcagcgccgtcgtgctccccggagtggaggcggccgagcgcgccggggtgcccgccttcctggagacctccgcgccccgcaacctccccttctacgagcggctcggcttcaccgtcaccgccgacgtcgaggtgcccgaaggaccgcgcacctggtgcatgacccgcaagcccggtgcctga

SEQ ID NO: 6850 - DNA, 2475 bp, Artificial Sequence
  Synthetic Polynucloetide
atggccttaccagtgaccgccttgctcctgccgctggccttgctgctccacgccgccaggccgcagctccagctgcaagagtctggacctggcctggtcaagcctagcgagacactgagcctgacctgtaccgtgtccggcgatagcatcagcagcggcgattactactggggctggatcagacagcctcctggcaaaggactggaatggatcggccacatctactacagcggcgtgacctactacaaccccagcctgaagtccagagtgaccatcagcgtggacaccagccggaaccagttctccctgaagctgtctagcgtgacagccgccgataccgccgtgtactactgcaccagagaggacagcagcaactggcggagtagaggccagggaacactggtcacagttagctctctcgaggacctgaagaacgtgttcccacctgaggtggccgtgttcgagcctagcgaggccgagatcagccacacccagaaagccaccctcgtgtgcctggctaccggcttctaccccgaccatgtggaactgtcttggtgggtcaacggcaaagaggtgcacagcggcgtgtctaccgacccccagccactgaaagaacagcccgccctgaacgacagccggtactgcctgagcagcagactgagagtgtccgccaccttctggcagaacccccggaaccacttcagatgccaggtgcagttctacggcctgagcgagaacgacgagtggacccaggacagagccaagcccgtgacccagatcgtgtctgccgaagcctggggcagagccgattgcggatcccagagcttcggcctgctggaccccaagctgtgctacctgctggatggcatcctgttcatctacggcgtgatcctgaccgccctgttcctgagagtgaagttcagcagaagcgccgacgcccctgcctaccagcagggacagaaccaactgtacaacgagctgaacctgggcagacgggaagagtacgacgtgctggacaagcggagaggcagggaccctgagatgggcggaaagccccagcggagaaagaacccccaggaaggactgtataacgaactccagaaagacaagatggccgaagcctacagcgagatcggcatgaagggcgagcggagaagaggcaagggccacgatggcctgtaccagggcctgagcaccgccaccaaggacacctatgacgccctgcacatgcaggccctgcctccaagaagggccaagcgatctggatctggagcaacaaacttctcactactcaaacaagcaggtgacgtggaggagaatcccgggcctactagtatggactggatttggcgcatccttttccttgtcggcgctgctaccggcgcgcattccttcgaagtgcaactggtggaaagcggaggcggacttgttcaaccaggcggaagcctgagactgagctgtgccgcttccggctttaatatcaaagacacatgcatcggatgggttcgccgcgctccagggaaagaagaggaactggttgccgacatctgtccctacaagggcagcacaagatatgccgactccgtgaaaggccggtttaccatctctgccgacacctctaagaatacggcctatctgcaaatgaactctctgcgggccgaagatacagccgtgtattactgcgccatcgtgtctgccagagatggctactataactattggggacagggaaccacagtcacagtgtcctctacgcgtatccagaaccctgatcctgccgtgtaccagctgcgggatagcaagagcagcgacaagagcgtgtgtctgttcaccgacttcgacagccagaccaacgtgtcccagagcaaggactccgacgtgtacatcaccgataagaccgtgctggacatgcggagcatggacttcaagagcaactccgccgtggcctggtccaacaagtccgatttcgcctgcgccaacgccttcaacaacagcattatccccgaggacacattcttcccaagccccgagagcagctgcggtacccagagttttgggttgttggaccctaaattgtgctatctgttggacggaatcctgttcatttacggagtgatcctgaccgcattgttcctgcgggttaagttttccagatccgcagacgcacccgcttaccaacaagggcagaaccaactctacaatgaacttaatttggggcggagggaagagtacgacgttctggacaaaaggaggggacgagatcccgagatgggcggaaagcctcagcgaaggaagaatccgcaagaggggctttataacgaactccagaaagataaaatggcagaagcctatagtgagattgggatgaagggagaaaggaggaggggtaaaggtcacgatgggttgtaccaaggattgagcacagccactaaagatacctatgatgcgctccacatgcaggccctgccgccaaga

SEQ ID NO: 6851 - DNA, 2475 bp, Artificial Sequence
  Synthetic Polynucloetide
atggccttaccagtgaccgccttgctcctgccgctggccttgctgctccacgccgccaggccgcagctccagctgcaagagtctggacctggcctggtcaagcctagcgagacactgagcctgacctgtaccgtgtccggcgatagcatcagcagcggcgattactactggggctggatcagacagcctcctggcaaaggactggaatggatcggccacatctactacagcggcgtgacctactacaaccccagcctgaagtccagagtgaccatcagcgtggacaccagccggaaccagttctccctgaagctgtctagcgtgacagccgccgataccgccgtgtactactgcaccagagaggacagcagcaactggcggagtagaggccagggaacactggtcacagttagctctctcgaggacctgaagaacgtgttcccacctgaggtggccgtgttcgagcctagcaaggccgagatcgcccacacccagaaagccaccctcgtgtgcctggctaccggcttctaccccgaccatgtggaactgtcttggtgggtcaacggcaaagaggtgcacagcggcgtgtgtaccgacccccagccactgaaagaacagcccgccctgaacgacagccggtactgcctgagcagcagactgagagtgtccgccaccttctggcagaacccccggaaccacttcagatgccaggtgcagttctacggcctgagcgagaacgacgagtggacccaggacagagccaagcccgtgacccagatcgtgtctgccgaagcctggggcagagccgattgcggatcccagagcttcggcctgctggaccccaagctgtgctacctgctggatggcatcctgttcatctacggcgtgatcctgaccgccctgttcctgagagtgaagttcagcagaagcgccgacgcccctgcctaccagcagggacagaaccaactgtacaacgagctgaacctgggcagacgggaagagtacgacgtgctggacaagcggagaggcagggaccctgagatgggcggaaagccccagcggagaaagaacccccaggaaggactgtataacgaactccagaaagacaagatggccgaagcctacagcgagatcggcatgaagggcgagcggagaagaggcaagggccacgatggcctgtaccagggcctgagcaccgccaccaaggacacctatgacgccctgcacatgcaggccctgcctccaagaagggccaagcgatctggatctggagcaacaaacttctcactactcaaacaagcaggtgacgtggaggagaatcccgggcctactagtatggactggatttggcgcatccttttccttgtcggcgctgctaccggcgcgcattccttcgaagtgcaactggtggaaagcggaggcggacttgttcaaccaggcggaagcctgagactgagctgtgccgcttccggctttaatatcaaagacacatgcatcggatgggttcgccgcgctccagggaaagaagaggaactggttgccgacatctgtccctacaagggcagcacaagatatgccgactccgtgaaaggccggtttaccatctctgccgacacctctaagaatacggcctatctgcaaatgaactctctgcgggccgaagatacagccgtgtattactgcgccatcgtgtctgccagagatggctactataactattggggacagggaaccacagtcacagtgtcctctacgcgtatccagaaccctgatcctgccgtgtaccagctgcgggatagcaagagcagcgacaagagcgtgtgtctgttcaccgacttcgacagccagaccaacgtgtcccagagcaaggactccgacgtgtacatcaccgataagtgcgtgctggacatgcggagcatggacttcaagagcaactccgccgtggcctggtccaacaagtccgatttcgcctgcgccaacgccttcaacaacagcattatccccgaggacacattcttcccaagcagcgacgtgccctgcggtacccagagttttgggttgttggaccctaaattgtgctatctgttggacggaatcctgttcatttacggagtgatcctgaccgcattgttcctgcgggttaagttttccagatccgcagacgcacccgcttaccaacaagggcagaaccaactctacaatgaacttaatttggggcggagggaagagtacgacgttctggacaaaaggaggggacgagatcccgagatgggcggaaagcctcagcgaaggaagaatccgcaagaggggctttataacgaactccagaaagataaaatggcagaagcctatagtgagattgggatgaagggagaaaggaggaggggtaaaggtcacgatgggttgtaccaaggattgagcacagccactaaagatacctatgatgcgctccacatgcaggccctgccgccaaga

SEQ ID NO: 6852 - DNA, 2688 bp, Artificial Sequence
  Synthetic Polynucloetide
atggccttaccagtgaccgccttgctcctgccgctggccttgctgctccacgccgccaggccgcagctccagctgcaagagtctggacctggcctggtcaagcctagcgagacactgagcctgacctgtaccgtgtccggcgatagcatcagcagcggcgattactactggggctggatcagacagcctcctggcaaaggactggaatggatcggccacatctactacagcggcgtgacctactacaaccccagcctgaagtccagagtgaccatcagcgtggacaccagccggaaccagttctccctgaagctgtctagcgtgacagccgccgataccgccgtgtactactgcaccagagaggacagcagcaactggcggagtagaggccagggaacactggtcacagttagctctctcgaggggaaaccaattcccaaccctcttctgggactggattcaaccggcagcggcgaggacctgaagaacgtgttcccacctgaggtggccgtgttcgagcctagcgaggccgagatcagccacacccagaaagccaccctcgtgtgcctggctaccggcttctaccccgaccatgtggaactgtcttggtgggtcaacggcaaagaggtgcacagcggcgtgtctaccgacccccagccactgaaagaacagcccgccctgaacgacagccggtactgcctgagcagcagactgagagtgtccgccaccttctggcagaacccccggaaccacttcagatgccaggtgcagttctacggcctgagcgagaacgacgagtggacccaggacagagccaagcccgtgacccagatcgtgtctgccgaagcctggggcagagccgattgcggatcccagagcttcggcctgctggaccccaagctgtgctacctgctggatggcatcctgttcatctacggcgtgatcctgaccgccctgttcctgagagtgaagttcagcagaagcgccgacgcccctgcctaccagcagggacagaaccaactgtacaacgagctgaacctgggcagacgggaagagtacgacgtgctggacaagcggagaggcagggaccctgagatgggcggaaagccccagcggagaaagaacccccaggaaggactgtataacgaactccagaaagacaagatggccgaagcctacagcgagatcggcatgaagggcgagcggagaagaggcaagggccacgatggcctgtaccagggcctgagcaccgccaccaaggacacctatgacgccctgcacatgcaggccctgcctccaagaagggccaagcgatctggatctggagcaacaaacttctcactactcaaacaagcaggtgacgtggaggagaatcccgggcctactagtatggactggatttggcgcatccttttccttgtcggcgctgctaccggcgcgcattccttcgaagtgcaactggtggaaagcggaggcggacttgttcaaccaggcggaagcctgagactgagctgtgccgcttccggctttaatatcaaagacacatgcatcggatgggttcgccgcgctccagggaaagaagaggaactggttgccgacatctgtccctacaagggcagcacaagatatgccgactccgtgaaaggccggtttaccatctctgccgacacctctaagaatacggcctatctgcaaatgaactctctgcgggccgaagatacagccgtgtattactgcgccatcgtgtctgccagagatggctactataactattggggacagggaaccacagtcacagtgtcctctacgcgtgagcagaaactgatctcggaagaggatgggagcggcatccagaaccctgatcctgccgtgtaccagctgcgggatagcaagagcagcgacaagagcgtgtgtctgttcaccgacttcgacagccagaccaacgtgtcccagagcaaggactccgacgtgtacatcaccgataagaccgtgctggacatgcggagcatggacttcaagagcaactccgccgtggcctggtccaacaagtccgatttcgcctgcgccaacgccttcaacaacagcattatccccgaggacacattcttcccaagccccgagagcagctgcggtacccagagttttgggttgttggaccctaaattgtgctatctgttggacggaatcctgttcatttacggagtgatcctgaccgcattgttcctgaggagcaagcggtcacggctgctccacagcgattacatgaatatgacaccacgaagaccgggtcctactcgcaaacactaccaaccctacgcacctccccgcgactttgcagcgtaccgatctcgggttaagttttccagatccgcagacgcacccgcttaccaacaagggcagaaccaactctacaatgaacttaatttggggcggagggaagagtacgacgttctggacaaaaggaggggacgagatcccgagatgggcggaaagcctcagcgaaggaagaatccgcaagaggggctttataacgaactccagaaagataaaatggcagaagcctatagtgagattgggatgaagggagaaaggaggaggggtaaaggtcacgatgggttgtaccaaggattgagcacagccactaaagatacctatgatgcgctccacatgcaggccctgccgccaaga

SEQ ID NO: 6853 - DNA, 2811 bp, Artificial Sequence
  Synthetic Polynucloetide
atggccttaccagtgaccgccttgctcctgccgctggccttgctgctccacgccgccaggccgcagctccagctgcaagagtctggacctggcctggtcaagcctagcgagacactgagcctgacctgtaccgtgtccggcgatagcatcagcagcggcgattactactggggctggatcagacagcctcctggcaaaggactggaatggatcggccacatctactacagcggcgtgacctactacaaccccagcctgaagtccagagtgaccatcagcgtggacaccagccggaaccagttctccctgaagctgtctagcgtgacagccgccgataccgccgtgtactactgcaccagagaggacagcagcaactggcggagtagaggccagggaacactggtcacagttagctctctcgaggggaaaccaattcccaaccctcttctgggactggattcaaccggcagcggcgaggacctgaagaacgtgttcccacctgaggtggccgtgttcgagcctagcgaggccgagatcagccacacccagaaagccaccctcgtgtgcctggctaccggcttctaccccgaccatgtggaactgtcttggtgggtcaacggcaaagaggtgcacagcggcgtgtctaccgacccccagccactgaaagaacagcccgccctgaacgacagccggtactgcctgagcagcagactgagagtgtccgccaccttctggcagaacccccggaaccacttcagatgccaggtgcagttctacggcctgagcgagaacgacgagtggacccaggacagagccaagcccgtgacccagatcgtgtctgccgaagcctggggcagagccgattgcggatcccagagcttcggcctgctggaccccaagctgtgctacctgctggatggcatcctgttcatctacggcgtgatcctgaccgccctgttcctgaggagtaagaggagcaggctcctgcacagtgactacatgaacatgactccacgccgccccggacccacccgcaagcattaccagccctatgccccaccacgcgacttcgcagcctatcgctccagagtgaagttcagcagaagcgccgacgcccctgcctaccagcagggacagaaccaactgtacaacgagctgaacctgggcagacgggaagagtacgacgtgctggacaagcggagaggcagggaccctgagatgggcggaaagccccagcggagaaagaacccccaggaaggactgtataacgaactccagaaagacaagatggccgaagcctacagcgagatcggcatgaagggcgagcggagaagaggcaagggccacgatggcctgtaccagggcctgagcaccgccaccaaggacacctatgacgccctgcacatgcaggccctgcctccaagaagggccaagcgatctggatctggagcaacaaacttctcactactcaaacaagcaggtgacgtggaggagaatcccgggcctactagtatggactggatttggcgcatccttttccttgtcggcgctgctaccggcgcgcattccttcgaagtgcaactggtggaaagcggaggcggacttgttcaaccaggcggaagcctgagactgagctgtgccgcttccggctttaatatcaaagacacatgcatcggatgggttcgccgcgctccagggaaagaagaggaactggttgccgacatctgtccctacaagggcagcacaagatatgccgactccgtgaaaggccggtttaccatctctgccgacacctctaagaatacggcctatctgcaaatgaactctctgcgggccgaagatacagccgtgtattactgcgccatcgtgtctgccagagatggctactataactattggggacagggaaccacagtcacagtgtcctctacgcgtgagcagaaactgatctcggaagaggatgggagcggcatccagaaccctgatcctgccgtgtaccagctgcgggatagcaagagcagcgacaagagcgtgtgtctgttcaccgacttcgacagccagaccaacgtgtcccagagcaaggactccgacgtgtacatcaccgataagaccgtgctggacatgcggagcatggacttcaagagcaactccgccgtggcctggtccaacaagtccgatttcgcctgcgccaacgccttcaacaacagcattatccccgaggacacattcttcccaagccccgagagcagctgcggtacccagagttttgggttgttggaccctaaattgtgctatctgttggacggaatcctgttcatttacggagtgatcctgaccgcattgttcctgaggagcaagcggtcacggctgctccacagcgattacatgaatatgacaccacgaagaccgggtcctactcgcaaacactaccaaccctacgcacctccccgcgactttgcagcgtaccgatctcgggttaagttttccagatccgcagacgcacccgcttaccaacaagggcagaaccaactctacaatgaacttaatttggggcggagggaagagtacgacgttctggacaaaaggaggggacgagatcccgagatgggcggaaagcctcagcgaaggaagaatccgcaagaggggctttataacgaactccagaaagataaaatggcagaagcctatagtgagattgggatgaagggagaaaggaggaggggtaaaggtcacgatgggttgtaccaaggattgagcacagccactaaagatacctatgatgcgctccacatgcaggccctgccgccaaga

SEQ ID NO: 6854 - DNA, 2694 bp, Artificial Sequence
  Synthetic Polynucloetide
atggccttaccagtgaccgccttgctcctgccgctggccttgctgctccacgccgccaggccgcagctccagctgcaagagtctggacctggcctggtcaagcctagcgagacactgagcctgacctgtaccgtgtccggcgatagcatcagcagcggcgattactactggggctggatcagacagcctcctggcaaaggactggaatggatcggccacatctactacagcggcgtgacctactacaaccccagcctgaagtccagagtgaccatcagcgtggacaccagccggaaccagttctccctgaagctgtctagcgtgacagccgccgataccgccgtgtactactgcaccagagaggacagcagcaactggcggagtagaggccagggaacactggtcacagttagctctctcgaggggaaaccaattcccaaccctcttctgggactggattcaaccggcagcggcgaggacctgaagaacgtgttcccacctgaggtggccgtgttcgagcctagcgaggccgagatcagccacacccagaaagccaccctcgtgtgcctggctaccggcttctaccccgaccatgtggaactgtcttggtgggtcaacggcaaagaggtgcacagcggcgtgtctaccgacccccagccactgaaagaacagcccgccctgaacgacagccggtactgcctgagcagcagactgagagtgtccgccaccttctggcagaacccccggaaccacttcagatgccaggtgcagttctacggcctgagcgagaacgacgagtggacccaggacagagccaagcccgtgacccagatcgtgtctgccgaagcctggggcagagccgattgcggatcccagagcttcggcctgctggaccccaagctgtgctacctgctggatggcatcctgttcatctacggcgtgatcctgaccgccctgttcctgagagtgaagttcagcagaagcgccgacgcccctgcctaccagcagggacagaaccaactgtacaacgagctgaacctgggcagacgggaagagtacgacgtgctggacaagcggagaggcagggaccctgagatgggcggaaagccccagcggagaaagaacccccaggaaggactgtataacgaactccagaaagacaagatggccgaagcctacagcgagatcggcatgaagggcgagcggagaagaggcaagggccacgatggcctgtaccagggcctgagcaccgccaccaaggacacctatgacgccctgcacatgcaggccctgcctccaagaagggccaagcgatctggatctggagcaacaaacttctcactactcaaacaagcaggtgacgtggaggagaatcccgggcctactagtatggactggatttggcgcatccttttccttgtcggcgctgctaccggcgcgcattccttcgaagtgcaactggtggaaagcggaggcggacttgttcaaccaggcggaagcctgagactgagctgtgccgcttccggctttaatatcaaagacacatgcatcggatgggttcgccgcgctccagggaaagaagaggaactggttgccgacatctgtccctacaagggcagcacaagatatgccgactccgtgaaaggccggtttaccatctctgccgacacctctaagaatacggcctatctgcaaatgaactctctgcgggccgaagatacagccgtgtattactgcgccatcgtgtctgccagagatggctactataactattggggacagggaaccacagtcacagtgtcctctacgcgtgagcagaaactgatctcggaagaggatctggggagcggcatccagaaccctgatcctgccgtgtaccagctgcgggatagcaagagcagcgacaagagcgtgtgtctgttcaccgacttcgacagccagaccaacgtgtcccagagcaaggactccgacgtgtacatcaccgataagaccgtgctggacatgcggagcatggacttcaagagcaactccgccgtggcctggtccaacaagtccgatttcgcctgcgccaacgccttcaacaacagcattatccccgaggacacattcttcccaagccccgagagcagctgcggtacccagagttttgggttgttggaccctaaattgtgctatctgttggacggaatcctgttcatttacggagtgatcctgaccgcattgttcctgaagagaggccggaagaagctgctgtacatcttcaagcagcctttcatgcggcccgtgcagaccacccaggaagaggacggctgctcctgccggttccccgaggaagaagaaggcggctgcgagctgcgggttaagttttccagatccgcagacgcacccgcttaccaacaagggcagaaccaactctacaatgaacttaatttggggcggagggaagagtacgacgttctggacaaaaggaggggacgagatcccgagatgggcggaaagcctcagcgaaggaagaatccgcaagaggggctttataacgaactccagaaagataaaatggcagaagcctatagtgagattgggatgaagggagaaaggaggaggggtaaaggtcacgatgggttgtaccaaggattgagcacagccactaaagatacctatgatgcgctccacatgcaggccctgccgccaaga

SEQ ID NO: 6855 - DNA, 2820 bp, Artificial Sequence
  Synthetic Polynucloetide
atggccttaccagtgaccgccttgctcctgccgctggccttgctgctccacgccgccaggccgcagctccagctgcaagagtctggacctggcctggtcaagcctagcgagacactgagcctgacctgtaccgtgtccggcgatagcatcagcagcggcgattactactggggctggatcagacagcctcctggcaaaggactggaatggatcggccacatctactacagcggcgtgacctactacaaccccagcctgaagtccagagtgaccatcagcgtggacaccagccggaaccagttctccctgaagctgtctagcgtgacagccgccgataccgccgtgtactactgcaccagagaggacagcagcaactggcggagtagaggccagggaacactggtcacagttagctctctcgaggggaaaccaattcccaaccctcttctgggactggattcaaccggcagcggcgaggacctgaagaacgtgttcccacctgaggtggccgtgttcgagcctagcgaggccgagatcagccacacccagaaagccaccctcgtgtgcctggctaccggcttctaccccgaccatgtggaactgtcttggtgggtcaacggcaaagaggtgcacagcggcgtgtctaccgacccccagccactgaaagaacagcccgccctgaacgacagccggtactgcctgagcagcagactgagagtgtccgccaccttctggcagaacccccggaaccacttcagatgccaggtgcagttctacggcctgagcgagaacgacgagtggacccaggacagagccaagcccgtgacccagatcgtgtctgccgaagcctggggcagagccgattgcggatcccagagcttcggcctgctggaccccaagctgtgctacctgctggatggcatcctgttcatctacggcgtgatcctgaccgccctgttcctgaaacggggcagaaagaaactcctgtatatattcaaacaaccatttatgagaccagtacaaactactcaagaggaagatggctgtagctgccgatttccagaagaagaagaaggaggatgtgaactgagagtgaagttcagcagaagcgccgacgcccctgcctaccagcagggacagaaccaactgtacaacgagctgaacctgggcagacgggaagagtacgacgtgctggacaagcggagaggcagggaccctgagatgggcggaaagccccagcggagaaagaacccccaggaaggactgtataacgaactccagaaagacaagatggccgaagcctacagcgagatcggcatgaagggcgagcggagaagaggcaagggccacgatggcctgtaccagggcctgagcaccgccaccaaggacacctatgacgccctgcacatgcaggccctgcctccaagaagggccaagcgatctggatctggagcaacaaacttctcactactcaaacaagcaggtgacgtggaggagaatcccgggcctactagtatggactggatttggcgcatccttttccttgtcggcgctgctaccggcgcgcattccttcgaagtgcaactggtggaaagcggaggcggacttgttcaaccaggcggaagcctgagactgagctgtgccgcttccggctttaatatcaaagacacatgcatcggatgggttcgccgcgctccagggaaagaagaggaactggttgccgacatctgtccctacaagggcagcacaagatatgccgactccgtgaaaggccggtttaccatctctgccgacacctctaagaatacggcctatctgcaaatgaactctctgcgggccgaagatacagccgtgtattactgcgccatcgtgtctgccagagatggctactataactattggggacagggaaccacagtcacagtgtcctctacgcgtgagcagaaactgatctcggaagaggatctggggagcggcatccagaaccctgatcctgccgtgtaccagctgcgggatagcaagagcagcgacaagagcgtgtgtctgttcaccgacttcgacagccagaccaacgtgtcccagagcaaggactccgacgtgtacatcaccgataagaccgtgctggacatgcggagcatggacttcaagagcaactccgccgtggcctggtccaacaagtccgatttcgcctgcgccaacgccttcaacaacagcattatccccgaggacacattcttcccaagccccgagagcagctgcggtacccagagttttgggttgttggaccctaaattgtgctatctgttggacggaatcctgttcatttacggagtgatcctgaccgcattgttcctgaagagaggccggaagaagctgctgtacatcttcaagcagcctttcatgcggcccgtgcagaccacccaggaagaggacggctgctcctgccggttccccgaggaagaagaaggcggctgcgagctgcgggttaagttttccagatccgcagacgcacccgcttaccaacaagggcagaaccaactctacaatgaacttaatttggggcggagggaagagtacgacgttctggacaaaaggaggggacgagatcccgagatgggcggaaagcctcagcgaaggaagaatccgcaagaggggctttataacgaactccagaaagataaaatggcagaagcctatagtgagattgggatgaagggagaaaggaggaggggtaaaggtcacgatgggttgtaccaaggattgagcacagccactaaagatacctatgatgcgctccacatgcaggccctgccgccaaga

SEQ ID NO: 6856 - DNA, 2493 bp, Artificial Sequence
  Synthetic Polynucloetide
atggccttaccagtgaccgccttgctcctgccgctggccttgctgctccacgccgccaggccgcagctccagctgcaagagtctggacctggcctggtcaagcctagcgagacactgagcctgacctgtaccgtgtccggcgatagcatcagcagcggcgattactactggggctggatcagacagcctcctggcaaaggactggaatggatcggccacatctactacagcggcgtgacctactacaaccccagcctgaagtccagagtgaccatcagcgtggacaccagccggaaccagttctccctgaagctgtctagcgtgacagccgccgataccgccgtgtactactgcaccagagaggacagcagcaactggcggagtagaggccagggaacactggtcacagttagctctctcgagcagagcttcggcctgctggaccccaagctgtgctacctgctggatggcatcctgttcatctacggcgtgatcctgaccgccctgttcctgagagtgaagttcagcagaagcgccgacgcccctgcctaccagcagggacagaaccaactgtacaacgagctgaacctgggcagacgggaagagtacgacgtgctggacaagcggagaggcagggaccctgagatgggcggaaagccccagcggagaaagaacccccaggaaggactgtataacgaactccagaaagacaagatggccgaagcctacagcgagatcggcatgaagggcgagcggagaagaggcaagggccacgatggcctgtaccagggcctgagcaccgccaccaaggacacctatgacgccctgcacatgcaggccctgcctccaagaagggccaagcgatctggatctggagcaacaaacttctcactactcaaacaagcaggtgacgtggaggagaatcccgggcctactagtatggactggatttggcgcatccttttccttgtcggcgctgctaccggcgcgcattccttcgaagtgcaactggtggaaagcggaggcggacttgttcaaccaggcggaagcctgagactgagctgtgccgcttccggctttaatatcaaagacacatgcatcggatgggttcgccgcgctccagggaaagaagaggaactggttgccgacatctgtccctacaagggcagcacaagatatgccgactccgtgaaaggccggtttaccatctctgccgacacctctaagaatacggcctatctgcaaatgaactctctgcgggccgaagatacagccgtgtattactgcgccatcgtgtctgccagagatggctactataactattggggacagggaaccacagtcacagtgtcctctacgcgtcagagttttgggttgttggaccctaaattgtgctatctgttggacggaatcctgttcatttacggagtgatcctgaccgcattgttcctgcgggttaagttttccagatccgcagacgcacccgcttaccaacaagggcagaaccaactctacaatgaacttaatttggggcggagggaagagtacgacgttctggacaaaaggaggggacgagatcccgagatgggcggaaagcctcagcgaaggaagaatccgcaagaggggctttataacgaactccagaaagataaaatggcagaagcctatagtgagattgggatgaagggagaaaggaggaggggtaaaggtcacgatgggttgtaccaaggattgagcacagccactaaagatacctatgatgcgctccacatgcaggccctgccgccaagacgcgccaagagaagcggatctggcgtgaagcagaccctgaatttcgacctgctgaagctggctggcgacgtggaatccaacccaggcccttctagaggccatatgaccgagtacaagcccacggtgcgcctcgccacccgcgacgacgtccccagggccgtacgcaccctcgccgccgcgttcgccgactaccccgccacgcgccacaccgtcgatccggaccgccacatcgagcgggtcaccgagctgcaagaactcttcctcacgcgcgtcgggctcgacatcggcaaggtgtgggtcgcggacgacggcgccgcggtggcggtctggaccacgccggagagcgtcgaagcgggggcggtgttcgccgagatcggcccgcgcatggccgagttgagcggttcccggctggccgcgcagcaacagatggaaggcctcctggcgccgcaccggcccaaggagcccgcgtggttcctggccaccgtcggcgtctcgcccgaccaccagggcaagggtctgggcagcgccgtcgtgctccccggagtggaggcggccgagcgcgccggggtgcccgccttcctggagacctccgcgccccgcaacctccccttctacgagcggctcggcttcaccgtcaccgccgacgtcgaggtgcccgaaggaccgcgcacctggtgcatgacccgcaagcccggtgcctga

SEQ ID NO: 6857 - DNA, 1965 bp, Artificial Sequence
  Synthetic Polynucloetide
atggccttaccagtgaccgccttgctcctgccgctggccttgctgctccacgccgccaggccgcagctccagctgcaagagtctggacctggcctggtcaagcctagcgagacactgagcctgacctgtaccgtgtccggcgatagcatcagcagcggcgattactactggggctggatcagacagcctcctggcaaaggactggaatggatcggccacatctactacagcggcgtgacctactacaaccccagcctgaagtccagagtgaccatcagcgtggacaccagccggaaccagttctccctgaagctgtctagcgtgacagccgccgataccgccgtgtactactgcaccagagaggacagcagcaactggcggagtagaggccagggaacactggtcacagttagctctctcgagggacagcctaaggccaatcctaccgtgacactgttccctccaagcagcgaagaactccaggccaacaaggccacacttgtgtgcctgatctccgacttctaccctggggctgtgacagtggcttggaaggccgatggatctcctgtgaaagccggcgtggaaaccaccaagccatccaagcagagcaacaacaaatacgccgccagctcctacctgagcctgacacctgagcagtggaagtcccacagatcctacagctgccaagtgacccacgaaggcagcaccgtggaaaagacagtggcccctacagagtgcagccccatcaagaccgatgtgattacaatggaccccaaggacaactgctccaaggacgccaacgataccctgctgctccagctgaccaacaccagcgcctactacatgtacttgttgctgctgctgaagtccgtggtgtacttcgccatcatcacatgctgcctgctgcggagaaccgccttctgctgcaacggcgagaagtctagggccaagcgatctggatctggagcaacaaacttctcactactcaaacaagcaggtgacgtggaggagaatcccgggcctactagtatggactggatttggcgcatccttttccttgtcggcgctgctaccggcgcgcattccttcgaagtgcaactggtggaaagcggaggcggacttgttcaaccaggcggaagcctgagactgagctgtgccgcttccggctttaatatcaaagacacatgcatcggatgggttcgccgcgctccagggaaagaagaggaactggttgccgacatctgtccctacaagggcagcacaagatatgccgactccgtgaaaggccggtttaccatctctgccgacacctctaagaatacggcctatctgcaaatgaactctctgcgggccgaagatacagccgtgtattactgcgccatcgtgtctgccagagatggctactataactattggggacagggaaccacagtcacagtgtcctctacgcgtgcctctacaaagggaccctccgtgtttcctctggctcccagcagcaagtctacaagcggaggaacagccgctctgggctgcctggtcaaggattactttcccgagcctgtgaccgtgtcctggaatagcggagcactgacaagcggcgtgcacacctttccagccgtgctgcaaagcagcggcctgtactctctgagcagcgtggtcacagtgcctagctctagcctgggcacccagacctacatctgcaatgtgaaccacaagcctagcaacaccaaggtggacaagagagtggaacccaagagctgtgaagtgaaaaccgactccaccgaccacgtgaagcccaaagagacagagaacaccaagcagcccagcaagagctgccacaagcccaaggccatcgtgcacaccgagaaagtgaacatgatgagcctgaccgtgctgggcctgcggatgctgttcgccaaaaccgtggccgtgaacttcctgctgaccgccaagctgttcttcctc

SEQ ID NO: 6858 - DNA, 1899 bp, Artificial Sequence
  Synthetic Polynucloetide
atggccttaccagtgaccgccttgctcctgccgctggccttgctgctccacgccgccaggccgcagctccagctgcaagagtctggacctggcctggtcaagcctagcgagacactgagcctgacctgtaccgtgtccggcgatagcatcagcagcggcgattactactggggctggatcagacagcctcctggcaaaggactggaatggatcggccacatctactacagcggcgtgacctactacaaccccagcctgaagtccagagtgaccatcagcgtggacaccagccggaaccagttctccctgaagctgtctagcgtgacagccgccgataccgccgtgtactactgcaccagagaggacagcagcaactggcggagtagaggccagggaacactggtcacagttagctctctcgagggacagcctaaggccaatcctaccgtgacactgttccctccaagcagcgaagaactccaggccaacaaggccacacttgtgtgcctgatctccgacttctaccctggggctgtgacagtggcttggaaggccgatggatctcctgtgaaagccggcgtggaaaccaccaagccatccaagcagagcaacaacaaatacgccgccagctcctacctgagcctgacacctgagcagtggaagtcccacagatcctacagctgccaagtgacccacgaaggcagcaccgtggaaaagacagtggcccctacagagtgcagcggcagagccgattgcggcatcaccagcgccagctaccaccagggcgtgctgagcgccaccatcctgtacgagatcctgctgggcaaggccaccctgtacgccgtgctggtgtctgccctggtgctgatggctatggtcaagcggaaggacagccggggaagggccaagcgatctggatctggagcaacaaacttctcactactcaaacaagcaggtgacgtggaggagaatcccgggcctactagtatggactggatttggcgcatccttttccttgtcggcgctgctaccggcgcgcattccttcgaagtgcaactggtggaaagcggaggcggacttgttcaaccaggcggaagcctgagactgagctgtgccgcttccggctttaatatcaaagacacatgcatcggatgggttcgccgcgctccagggaaagaagaggaactggttgccgacatctgtccctacaagggcagcacaagatatgccgactccgtgaaaggccggtttaccatctctgccgacacctctaagaatacggcctatctgcaaatgaactctctgcgggccgaagatacagccgtgtattactgcgccatcgtgtctgccagagatggctactataactattggggacagggaaccacagtcacagtgtcctctacgcgtgcctctacaaagggaccctccgtgtttcctctggctcccagcagcaagtctacaagcggaggaacagccgctctgggctgcctggtcaaggattactttcccgagcctgtgaccgtgtcctggaatagcggagcactgacaagcggcgtgcacacctttccagccgtgctgcaaagcagcggcctgtactctctgagcagcgtggtcacagtgcctagctctagcctgggcacccagacctacatctgcaatgtgaaccacaagcctagcaacaccaaggtggacaagagagtggaacccaagagctgtatccccgaggacacattcttcccaagcagcgacgtgccctgcgacgtgaagctggtggaaaagagcttcgagacagacaccaacctgaacttccagaacctgagcgtgatcggcttcagaatcctgctgctgaaagtggccggctttaacctgctgatgaccctgcggctgtggtccagc

SEQ ID NO: 6859 - DNA, 1899 bp, Artificial Sequence
  Synthetic Polynucloetide
atggccttaccagtgaccgccttgctcctgccgctggccttgctgctccacgccgccaggccgcagctccagctgcaagagtctggacctggcctggtcaagcctagcgagacactgagcctgacctgtaccgtgtccggcgatagcatcagcagcggcgattactactggggctggatcagacagcctcctggcaaaggactggaatggatcggccacatctactacagcggcgtgacctactacaaccccagcctgaagtccagagtgaccatcagcgtggacaccagccggaaccagttctccctgaagctgtctagcgtgacagccgccgataccgccgtgtactactgcaccagagaggacagcagcaactggcggagtagaggccagggaacactggtcacagttagctctctcgagggacagcctaaggccaatcctaccgtgacactgttccctccaagcagcgaagaactccaggccaacaaggccacacttgtgtgcctgatctccgacttctaccctggggctgtgacagtggcttggaaggccgatggatctcctgtgaaagccggcgtggaaaccaccaagccatccaagcagagcaacaacaaatacgccgccagctcctacctgagcctgacacctgagcagtggaagtcccacagatcctacagctgccaagtgacccacgaaggcagcaccgtggaaaagacagtggcccctacagagtgcagcggcagagccgattgcggctttaccagcgagagctaccagcagggcgtgctgagcgccaccatcctgtacgagatcctgctgggcaaggccaccctgtacgccgtgctggtgtctgccctggtgctgatggctatggtcaagcggaaggacagccggggaagggccaagcgatctggatctggagcaacaaacttctcactactcaaacaagcaggtgacgtggaggagaatcccgggcctactagtatggactggatttggcgcatccttttccttgtcggcgctgctaccggcgcgcattccttcgaagtgcaactggtggaaagcggaggcggacttgttcaaccaggcggaagcctgagactgagctgtgccgcttccggctttaatatcaaagacacatgcatcggatgggttcgccgcgctccagggaaagaagaggaactggttgccgacatctgtccctacaagggcagcacaagatatgccgactccgtgaaaggccggtttaccatctctgccgacacctctaagaatacggcctatctgcaaatgaactctctgcgggccgaagatacagccgtgtattactgcgccatcgtgtctgccagagatggctactataactattggggacagggaaccacagtcacagtgtcctctacgcgtgcctctacaaagggaccctccgtgtttcctctggctcccagcagcaagtctacaagcggaggaacagccgctctgggctgcctggtcaaggattactttcccgagcctgtgaccgtgtcctggaatagcggagcactgacaagcggcgtgcacacctttccagccgtgctgcaaagcagcggcctgtactctctgagcagcgtggtcacagtgcctagctctagcctgggcacccagacctacatctgcaatgtgaaccacaagcctagcaacaccaaggtggacaagagagtggaacccaagagctgtatccccgaggacacattcttcccaagccccgagagcagctgcgacgtgaagctggtggaaaagagcttcgagacagacaccaacctgaacttccagaacctgagcgtgatcggcttcagaatcctgctgctgaaagtggccggctttaacctgctgatgaccctgcggctgtggtccagc

SEQ ID NO: 6860 - DNA, 1362 bp, Artificial Sequence
  Synthetic Polynucloetide
atggccttaccagtgaccgccttgctcctgccgctggccttgctgctccacgccgccaggccgcagctccagctgcaagagtctggacctggcctggtcaagcctagcgagacactgagcctgacctgtaccgtgtccggcgatagcatcagcagcggcgattactactggggctggatcagacagcctcctggcaaaggactggaatggatcggccacatctactacagcggcgtgacctactacaaccccagcctgaagtccagagtgaccatcagcgtggacaccagccggaaccagttctccctgaagctgtctagcgtgacagccgccgataccgccgtgtactactgcaccagagaggacagcagcaactggcggagtagaggccagggaacactggtcacagttagctctctcgagagcggcggaggcggatctttcgaagtgcaactggtggaaagcggaggcggacttgttcaaccaggcggaagcctgagactgagctgtgccgcttccggctttaatatcaaagacacatgcatcggatgggttcgccgcgctccagggaaagaagaggaactggttgccgacatctgtccctacaagggcagcacaagatatgccgactccgtgaaaggccggtttaccatctctgccgacacctctaagaatacggcctatctgcaaatgaactctctgcgggccgaagatacagccgtgtattactgcgccatcgtgtctgccagagatggctactataactattggggacagggaaccacagtcacagtgtcctctacgcgtgacggtaacgaggagatgggaggaatcactcaaaccccttacaaagtctcaatttcaggaacaactgttatccttacatgtccccagtatcctggcagcgagatcctttggcagcataacgacaagaatatagggggagatgaagacgataagaatatcggatctgacgaggatcacttgagcctgaaagagttctccgagcttgaacaaagcggatattatgtgtgctatccgcgcgggtcaaagccggaagacgctaacttttacctttatctccgagccagagtgtgcgaaaattgcatggaaatggacgttatgtccgttgctacaatagttatcgtagatatatgcatcacgggtggactgcttctgctggtttattattggtccaagaatagaaaggccaaagctaaacccgtgaccagaggcgctggcgcaggcggaaggcaaaggggacaaaacaaagaacggccaccaccagtgccaaatccagattatgagcctattcggaaaggacagagggacctgtactctggcctgaatcagagaagaatc

SEQ ID NO: 6861 - DNA, 1257 bp, Artificial Sequence
  Synthetic Polynucloetide
atggccttaccagtgaccgccttgctcctgccgctggccttgctgctccacgccgccaggccgcagctccagctgcaagagtctggacctggcctggtcaagcctagcgagacactgagcctgacctgtaccgtgtccggcgatagcatcagcagcggcgattactactggggctggatcagacagcctcctggcaaaggactggaatggatcggccacatctactacagcggcgtgacctactacaaccccagcctgaagtccagagtgaccatcagcgtggacaccagccggaaccagttctccctgaagctgtctagcgtgacagccgccgataccgccgtgtactactgcaccagagaggacagcagcaactggcggagtagaggccagggaacactggtcacagttagctctctcgagagcggcggaggcggatctttcgaagtgcaactggtggaaagcggaggcggacttgttcaaccaggcggaagcctgagactgagctgtgccgcttccggctttaatatcaaagacacatgcatcggatgggttcgccgcgctccagggaaagaagaggaactggttgccgacatctgtccctacaagggcagcacaagatatgccgactccgtgaaaggccggtttaccatctctgccgacacctctaagaatacggcctatctgcaaatgaactctctgcgggccgaagatacagccgtgtattactgcgccatcgtgtctgccagagatggctactataactattggggacagggaaccacagtcacagtgtcctctacgcgtttcaagatccccatcgaggaactggaagatcgggtgttcgtgaactgcaacacctctatcacctgggtggaaggcaccgtgggaacactgctgagcgacatcaccagactggacctcggcaagcggattctggaccctcggggcatctacagatgcaacggcaccgacatctacaaggacaaagaaagcaccgtgcaggtccactacagaatgtgccagtcctgcgtggaactggaccctgctacagtggccggcatcatcgtgaccgatgtgatcgctactctgctgctggctctgggagtgttctgcttcgccggacacgaaacaggcagactgtctggcgctgccgatacacaggccctgctgagaaacgaccaagtgtatcagcccctgcgcgacagagatgatgcccagtattctcacctcggcggcaactgggctagaaacaag

SEQ ID NO: 6862 - DNA, 1287 bp, Artificial Sequence
  Synthetic Polynucloetide
atggccttaccagtgaccgccttgctcctgccgctggccttgctgctccacgccgccaggccgcagctccagctgcaagagtctggacctggcctggtcaagcctagcgagacactgagcctgacctgtaccgtgtccggcgatagcatcagcagcggcgattactactggggctggatcagacagcctcctggcaaaggactggaatggatcggccacatctactacagcggcgtgacctactacaaccccagcctgaagtccagagtgaccatcagcgtggacaccagccggaaccagttctccctgaagctgtctagcgtgacagccgccgataccgccgtgtactactgcaccagagaggacagcagcaactggcggagtagaggccagggaacactggtcacagttagctctctcgagagcggcggaggcggatctttcgaagtgcaactggtggaaagcggaggcggacttgttcaaccaggcggaagcctgagactgagctgtgccgcttccggctttaatatcaaagacacatgcatcggatgggttcgccgcgctccagggaaagaagaggaactggttgccgacatctgtccctacaagggcagcacaagatatgccgactccgtgaaaggccggtttaccatctctgccgacacctctaagaatacggcctatctgcaaatgaactctctgcgggccgaagatacagccgtgtattactgcgccatcgtgtctgccagagatggctactataactattggggacagggaaccacagtcacagtgtcctctacgcgtcagagcatcaagggcaaccacctggtcaaggtgtacgactaccaagaggacggcagcgtgctgctgacatgtgatgccgaggccaagaacatcacctggtttaaggacggcaagatgatcggcttcctgaccgaggacaagaagaagtggaacctgggcagcaacgctaaggaccccagaggcatgtatcagtgcaagggcagccagaacaagagcaagcccctccaggtgtactaccggatgtgccagaactgcatcgagctgaacgccgctaccatcagcggctttctgttcgccgagatcgtgtccatcttcgtgctggccgtgggcgtgtactttatcgctggacaggatggcgtgcggcagagcagagcttccgataagcaaaccctgctgcctaacgaccagctgtaccagcctctgaaggacagagaggacgaccagtacagccacctccagggcaatcagctgagaagaaac

SEQ ID NO: 6863 - DNA, 1236 bp, Artificial Sequence
  Synthetic Polynucloetide
atggccttaccagtgaccgccttgctcctgccgctggccttgctgctccacgccgccaggccgcagctccagctgcaagagtctggacctggcctggtcaagcctagcgagacactgagcctgacctgtaccgtgtccggcgatagcatcagcagcggcgattactactggggctggatcagacagcctcctggcaaaggactggaatggatcggccacatctactacagcggcgtgacctactacaaccccagcctgaagtccagagtgaccatcagcgtggacaccagccggaaccagttctccctgaagctgtctagcgtgacagccgccgataccgccgtgtactactgcaccagagaggacagcagcaactggcggagtagaggccagggaacactggtcacagttagctctctcgagagcggcggaggcggatctttcgaagtgcaactggtggaaagcggaggcggacttgttcaaccaggcggaagcctgagactgagctgtgccgcttccggctttaatatcaaagacacatgcatcggatgggttcgccgcgctccagggaaagaagaggaactggttgccgacatctgtccctacaagggcagcacaagatatgccgactccgtgaaaggccggtttaccatctctgccgacacctctaagaatacggcctatctgcaaatgaactctctgcgggccgaagatacagccgtgtattactgcgccatcgtgtctgccagagatggctactataactattggggacagggaaccacagtcacagtgtcctctacgcgtcagagttttgggttgttggaccctaaattgtgctatctgttggacggaatcctgttcatttacggagtgatcctgaccgcattgttcctgcgggttaagttttccagatccgcagacgcacccgcttaccaacaagggcagaaccaactctacaatgaacttaatttggggcggagggaagagtacgacgttctggacaaaaggaggggacgagatcccgagatgggcggaaagcctcagcgaaggaagaatccgcaagaggggctttataacgaactccagaaagataaaatggcagaagcctatagtgagattgggatgaagggagaaaggaggaggggtaaaggtcacgatgggttgtaccaaggattgagcacagccactaaagatacctatgatgcgctccacatgcaggccctgccgccaaga

SEQ ID NO: 6864 - DNA, 1365 bp, Artificial Sequence
  Synthetic Polynucloetide
atggccttaccagtgaccgccttgctcctgccgctggccttgctgctccacgccgccaggccggaagtgcaactggtggaaagcggaggcggacttgttcaaccaggcggaagcctgagactgagctgtgccgcttccggctttaatatcaaagacacatgcatcggatgggttcgccgcgctccagggaaagaagaggaactggttgccgacatctgtccctacaagggcagcacaagatatgccgactccgtgaaaggccggtttaccatctctgccgacacctctaagaatacggcctatctgcaaatgaactctctgcgggccgaagatacagccgtgtattactgcgccatcgtgtctgccagagatggctactataactattggggacagggaaccacagtcacagtgtcctctctcgagagcggcggaggcggatctttcgaacagctccagctgcaagagtctggacctggcctggtcaagcctagcgagacactgagcctgacctgtaccgtgtccggcgatagcatcagcagcggcgattactactggggctggatcagacagcctcctggcaaaggactggaatggatcggccacatctactacagcggcgtgacctactacaaccccagcctgaagtccagagtgaccatcagcgtggacaccagccggaaccagttctccctgaagctgtctagcgtgacagccgccgataccgccgtgtactactgcaccagagaggacagcagcaactggcggagtagaggccagggaacactggtcacagttagctctacgcgtgacggtaacgaggagatgggaggaatcactcaaaccccttacaaagtctcaatttcaggaacaactgttatccttacatgtccccagtatcctggcagcgagatcctttggcagcataacgacaagaatatagggggagatgaagacgataagaatatcggatctgacgaggatcacttgagcctgaaagagttctccgagcttgaacaaagcggatattatgtgtgctatccgcgcgggtcaaagccggaagacgctaacttttacctttatctccgagccagagtgtgcgaaaattgcatggaaatggacgttatgtccgttgctacaatagttatcgtagatatatgcatcacgggtggactgcttctgctggtttattattggtccaagaatagaaaggccaaagctaaacccgtgaccagaggcgctggcgcaggcggaaggcaaaggggacaaaacaaagaacggccaccaccagtgccaaatccagattatgagcctattcggaaaggacagagggacctgtactctggcctgaatcagagaagaatc

SEQ ID NO: 6865 - DNA, 1260 bp, Artificial Sequence
  Synthetic Polynucloetide
atggccttaccagtgaccgccttgctcctgccgctggccttgctgctccacgccgccaggccggaagtgcaactggtggaaagcggaggcggacttgttcaaccaggcggaagcctgagactgagctgtgccgcttccggctttaatatcaaagacacatgcatcggatgggttcgccgcgctccagggaaagaagaggaactggttgccgacatctgtccctacaagggcagcacaagatatgccgactccgtgaaaggccggtttaccatctctgccgacacctctaagaatacggcctatctgcaaatgaactctctgcgggccgaagatacagccgtgtattactgcgccatcgtgtctgccagagatggctactataactattggggacagggaaccacagtcacagtgtcctctctcgagagcggcggaggcggatctttcgaacagctccagctgcaagagtctggacctggcctggtcaagcctagcgagacactgagcctgacctgtaccgtgtccggcgatagcatcagcagcggcgattactactggggctggatcagacagcctcctggcaaaggactggaatggatcggccacatctactacagcggcgtgacctactacaaccccagcctgaagtccagagtgaccatcagcgtggacaccagccggaaccagttctccctgaagctgtctagcgtgacagccgccgataccgccgtgtactactgcaccagagaggacagcagcaactggcggagtagaggccagggaacactggtcacagttagctctacgcgtttcaagatccccatcgaggaactggaagatcgggtgttcgtgaactgcaacacctctatcacctgggtggaaggcaccgtgggaacactgctgagcgacatcaccagactggacctcggcaagcggattctggaccctcggggcatctacagatgcaacggcaccgacatctacaaggacaaagaaagcaccgtgcaggtccactacagaatgtgccagtcctgcgtggaactggaccctgctacagtggccggcatcatcgtgaccgatgtgatcgctactctgctgctggctctgggagtgttctgcttcgccggacacgaaacaggcagactgtctggcgctgccgatacacaggccctgctgagaaacgaccaagtgtatcagcccctgcgcgacagagatgatgcccagtattctcacctcggcggcaactgggctagaaacaag

SEQ ID NO: 6866 - DNA, 1290 bp, Artificial Sequence
  Synthetic Polynucloetide
atggccttaccagtgaccgccttgctcctgccgctggccttgctgctccacgccgccaggccggaagtgcaactggtggaaagcggaggcggacttgttcaaccaggcggaagcctgagactgagctgtgccgcttccggctttaatatcaaagacacatgcatcggatgggttcgccgcgctccagggaaagaagaggaactggttgccgacatctgtccctacaagggcagcacaagatatgccgactccgtgaaaggccggtttaccatctctgccgacacctctaagaatacggcctatctgcaaatgaactctctgcgggccgaagatacagccgtgtattactgcgccatcgtgtctgccagagatggctactataactattggggacagggaaccacagtcacagtgtcctctctcgagagcggcggaggcggatctttcgaacagctccagctgcaagagtctggacctggcctggtcaagcctagcgagacactgagcctgacctgtaccgtgtccggcgatagcatcagcagcggcgattactactggggctggatcagacagcctcctggcaaaggactggaatggatcggccacatctactacagcggcgtgacctactacaaccccagcctgaagtccagagtgaccatcagcgtggacaccagccggaaccagttctccctgaagctgtctagcgtgacagccgccgataccgccgtgtactactgcaccagagaggacagcagcaactggcggagtagaggccagggaacactggtcacagttagctctacgcgtcagagcatcaagggcaaccacctggtcaaggtgtacgactaccaagaggacggcagcgtgctgctgacatgtgatgccgaggccaagaacatcacctggtttaaggacggcaagatgatcggcttcctgaccgaggacaagaagaagtggaacctgggcagcaacgctaaggaccccagaggcatgtatcagtgcaagggcagccagaacaagagcaagcccctccaggtgtactaccggatgtgccagaactgcatcgagctgaacgccgctaccatcagcggctttctgttcgccgagatcgtgtccatcttcgtgctggccgtgggcgtgtactttatcgctggacaggatggcgtgcggcagagcagagcttccgataagcaaaccctgctgcctaacgaccagctgtaccagcctctgaaggacagagaggacgaccagtacagccacctccagggcaatcagctgagaagaaac

SEQ ID NO: 6867 - DNA, 1239 bp, Artificial Sequence
  Synthetic Polynucloetide
atggccttaccagtgaccgccttgctcctgccgctggccttgctgctccacgccgccaggccggaagtgcaactggtggaaagcggaggcggacttgttcaaccaggcggaagcctgagactgagctgtgccgcttccggctttaatatcaaagacacatgcatcggatgggttcgccgcgctccagggaaagaagaggaactggttgccgacatctgtccctacaagggcagcacaagatatgccgactccgtgaaaggccggtttaccatctctgccgacacctctaagaatacggcctatctgcaaatgaactctctgcgggccgaagatacagccgtgtattactgcgccatcgtgtctgccagagatggctactataactattggggacagggaaccacagtcacagtgtcctctctcgagagcggcggaggcggatctttcgaacagctccagctgcaagagtctggacctggcctggtcaagcctagcgagacactgagcctgacctgtaccgtgtccggcgatagcatcagcagcggcgattactactggggctggatcagacagcctcctggcaaaggactggaatggatcggccacatctactacagcggcgtgacctactacaaccccagcctgaagtccagagtgaccatcagcgtggacaccagccggaaccagttctccctgaagctgtctagcgtgacagccgccgataccgccgtgtactactgcaccagagaggacagcagcaactggcggagtagaggccagggaacactggtcacagttagctctacgcgtcagagttttgggttgttggaccctaaattgtgctatctgttggacggaatcctgttcatttacggagtgatcctgaccgcattgttcctgcgggttaagttttccagatccgcagacgcacccgcttaccaacaagggcagaaccaactctacaatgaacttaatttggggcggagggaagagtacgacgttctggacaaaaggaggggacgagatcccgagatgggcggaaagcctcagcgaaggaagaatccgcaagaggggctttataacgaactccagaaagataaaatggcagaagcctatagtgagattgggatgaagggagaaaggaggaggggtaaaggtcacgatgggttgtaccaaggattgagcacagccactaaagatacctatgatgcgctccacatgcaggccctgccgccaaga

SEQ ID NO: 6868 - DNA, 1938 bp, Artificial Sequence
  Synthetic Polynucloetide
atggccttaccagtgaccgccttgctcctgccgctggccttgctgctccacgccgccaggccgcagctccagctgcaagagtctggacctggcctggtcaagcctagcgagacactgagcctgacctgtaccgtgtccggcgatagcatcagcagcggcgattactactggggctggatcagacagcctcctggcaaaggactggaatggatcggccacatctactacagcggcgtgacctactacaaccccagcctgaagtccagagtgaccatcagcgtggacaccagccggaaccagttctccctgaagctgtctagcgtgacagccgccgataccgccgtgtactactgcaccagagaggacagcagcaactggcggagtagaggccagggaacactggtcacagttagctctctcgagagcggcggaggcggatctttcgaagtgcaactggtggaaagcggaggcggacttgttcaaccaggcggaagcctgagactgagctgtgccgcttccggctttaatatcaaagacacatgcatcggatgggttcgccgcgctccagggaaagaagaggaactggttgccgacatctgtccctacaagggcagcacaagatatgccgactccgtgaaaggccggtttaccatctctgccgacacctctaagaatacggcctatctgcaaatgaactctctgcgggccgaagatacagccgtgtattactgcgccatcgtgtctgccagagatggctactataactattggggacagggaaccacagtcacagtgtcctctacgcgtgggagcggcatccagaaccctgatcctgccgtgtaccagctgcgggatagcaagagcagcgacaagagcgtgtgtctgttcaccgacttcgacagccagaccaacgtgtcccagagcaaggactccgacgtgtacatcaccgataagaccgtgctggacatgcggagcatggacttcaagagcaactccgccgtggcctggtccaacaagtccgatttcgcctgcgccaacgccttcaacaacagcattatccccgaggacacattcttcccaagccccgagagcagctgcgacgtgaagctggtggaaaagagcttcgagacagacaccaacctgaacttccagaacctgagcgtgatcggcttcagaatcctgctgctgaaagtggccggctttaacctgctgatgaccctgcggctgtggtccagccgcgccaagagaagcggatctggcgtgaagcagaccctgaatttcgacctgctgaagctggctggcgacgtggaatccaacccaggcccttctagaggccatatgaccgagtacaagcccacggtgcgcctcgccacccgcgacgacgtccccagggccgtacgcaccctcgccgccgcgttcgccgactaccccgccacgcgccacaccgtcgatccggaccgccacatcgagcgggtcaccgagctgcaagaactcttcctcacgcgcgtcgggctcgacatcggcaaggtgtgggtcgcggacgacggcgccgcggtggcggtctggaccacgccggagagcgtcgaagcgggggcggtgttcgccgagatcggcccgcgcatggccgagttgagcggttcccggctggccgcgcagcaacagatggaaggcctcctggcgccgcaccggcccaaggagcccgcgtggttcctggccaccgtcggcgtctcgcccgaccaccagggcaagggtctgggcagcgccgtcgtgctccccggagtggaggcggccgagcgcgccggggtgcccgccttcctggagacctccgcgccccgcaacctccccttctacgagcggctcggcttcaccgtcaccgccgacgtcgaggtgcccgaaggaccgcgcacctggtgcatgacccgcaagcccggtgcctga

SEQ ID NO: 6869 - DNA, 2034 bp, Artificial Sequence
  Synthetic Polynucloetide
atggccttaccagtgaccgccttgctcctgccgctggccttgctgctccacgccgccaggccgcagctccagctgcaagagtctggacctggcctggtcaagcctagcgagacactgagcctgacctgtaccgtgtccggcgatagcatcagcagcggcgattactactggggctggatcagacagcctcctggcaaaggactggaatggatcggccacatctactacagcggcgtgacctactacaaccccagcctgaagtccagagtgaccatcagcgtggacaccagccggaaccagttctccctgaagctgtctagcgtgacagccgccgataccgccgtgtactactgcaccagagaggacagcagcaactggcggagtagaggccagggaacactggtcacagttagctctctcgagagcggcggaggcggatctttcgaagtgcaactggtggaaagcggaggcggacttgttcaaccaggcggaagcctgagactgagctgtgccgcttccggctttaatatcaaagacacatgcatcggatgggttcgccgcgctccagggaaagaagaggaactggttgccgacatctgtccctacaagggcagcacaagatatgccgactccgtgaaaggccggtttaccatctctgccgacacctctaagaatacggcctatctgcaaatgaactctctgcgggccgaagatacagccgtgtattactgcgccatcgtgtctgccagagatggctactataactattggggacagggaaccacagtcacagtgtcctctctcgaggacctgaagaacgtgttcccacctgaggtggccgtgttcgagcctagcgaggccgagatcagccacacccagaaagccaccctcgtgtgcctggctaccggcttctaccccgaccatgtggaactgtcttggtgggtcaacggcaaagaggtgcacagcggcgtgtctaccgacccccagccactgaaagaacagcccgccctgaacgacagccggtactgcctgagcagcagactgagagtgtccgccaccttctggcagaacccccggaaccacttcagatgccaggtgcagttctacggcctgagcgagaacgacgagtggacccaggacagagccaagcccgtgacccagatcgtgtctgccgaagcctggggcagagccgattgcggctttaccagcgagagctaccagcagggcgtgctgagcgccaccatcctgtacgagatcctgctgggcaaggccaccctgtacgccgtgctggtgtctgccctggtgctgatggctatggtcaagcggaaggacagccggggaagggccaagcgatctggatctggagcaacaaacttctcactactcaaacaagcaggtgacgtggaggagaatcccgggcctactagaggccatatgaccgagtacaagcccacggtgcgcctcgccacccgcgacgacgtccccagggccgtacgcaccctcgccgccgcgttcgccgactaccccgccacgcgccacaccgtcgatccggaccgccacatcgagcgggtcaccgagctgcaagaactcttcctcacgcgcgtcgggctcgacatcggcaaggtgtgggtcgcggacgacggcgccgcggtggcggtctggaccacgccggagagcgtcgaagcgggggcggtgttcgccgagatcggcccgcgcatggccgagttgagcggttcccggctggccgcgcagcaacagatggaaggcctcctggcgccgcaccggcccaaggagcccgcgtggttcctggccaccgtcggcgtctcgcccgaccaccagggcaagggtctgggcagcgccgtcgtgctccccggagtggaggcggccgagcgcgccggggtgcccgccttcctggagacctccgcgccccgcaacctccccttctacgagcggctcggcttcaccgtcaccgccgacgtcgaggtgcccgaaggaccgcgcacctggtgcatgacccgcaagcccggtgcctga

SEQ ID NO: 6870 - DNA, 2184 bp, Artificial Sequence
  Synthetic Polynucloetide
atggccttaccagtgaccgccttgctcctgccgctggccttgctgctccacgccgccaggccgcagctccagctgcaagagtctggacctggcctggtcaagcctagcgagacactgagcctgacctgtaccgtgtccggcgatagcatcagcagcggcgattactactggggctggatcagacagcctcctggcaaaggactggaatggatcggccacatctactacagcggcgtgacctactacaaccccagcctgaagtccagagtgaccatcagcgtggacaccagccggaaccagttctccctgaagctgtctagcgtgacagccgccgataccgccgtgtactactgcaccagagaggacagcagcaactggcggagtagaggccagggaacactggtcacagttagctctctcgagagcggcggaggcggatctttcgaagtgcaactggtggaaagcggaggcggacttgttcaaccaggcggaagcctgagactgagctgtgccgcttccggctttaatatcaaagacacatgcatcggatgggttcgccgcgctccagggaaagaagaggaactggttgccgacatctgtccctacaagggcagcacaagatatgccgactccgtgaaaggccggtttaccatctctgccgacacctctaagaatacggcctatctgcaaatgaactctctgcgggccgaagatacagccgtgtattactgcgccatcgtgtctgccagagatggctactataactattggggacagggaaccacagtcacagtgtcctctacgcgtgagcagaaactgatctcggaagaggatctggggagcggcaccccattcccttctctggcccctcccatcatgctgctggtggacggcaagcagcagatggtggtcgtgtgcctggtgctggatgtggccccacctggactggacagccccatctggtttagcgccggcaatggctctgccctggacgcctttacctacggcccaagccctgccaccgatggcacctggacaaatctggcccacctgagcctgcccagcgaggaactggcttcttgggagcctctcgtgtgccacacaggacctggcgctgagggacacagcagatccacccagcctatgcacctgtctggcgaggccagcaccgccagaacctgtcctcaggaacctctgagaggcacccctggcggagcactgtggctgggagtgctgagactgctgctgttcaagctgctgctgtttgacctgctgctgacctgctcctgtctgtgcgatcctgccggccctctgccttctcctgccaccaccacaagactgagagccctgggcagccacagactgcaccctgccacagagacaggcggcagagaggccacaagcagccctagaccccagcccagagacagaagatggggcgataccccccctggcagaaagcctggatctccagtccgcgccaagagaagcggatctggcgtgaagcagaccctgaatttcgacctgctgaagctggctggcgacgtggaatccaacccaggcccttctagatctagaggccatatgaccgagtacaagcccacggtgcgcctcgccacccgcgacgacgtccccagggccgtacgcaccctcgccgccgcgttcgccgactaccccgccacgcgccacaccgtcgatccggaccgccacatcgagcgggtcaccgagctgcaagaactcttcctcacgcgcgtcgggctcgacatcggcaaggtgtgggtcgcggacgacggcgccgcggtggcggtctggaccacgccggagagcgtcgaagcgggggcggtgttcgccgagatcggcccgcgcatggccgagttgagcggttcccggctggccgcgcagcaacagatggaaggcctcctggcgccgcaccggcccaaggagcccgcgtggttcctggccaccgtcggcgtctcgcccgaccaccagggcaagggtctgggcagcgccgtcgtgctccccggagtggaggcggccgagcgcgccggggtgcccgccttcctggagacctccgcgccccgcaacctccccttctacgagcggctcggcttcaccgtcaccgccgacgtcgaggtgcccgaaggaccgcgcacctggtgcatgacccgcaagcccggtgcctga

SEQ ID NO: 6871 - DNA, 1650 bp, Artificial Sequence; identical to SEQ ID NO: 6506
  Synthetic Polynucloetide

SEQ ID NO: 6872 - DNA, 957 bp, Artificial Sequence; identical to SEQ ID NO: 6507
  Synthetic Polynucloetide

SEQ ID NO: 6873 - DNA, 1344 bp, Artificial Sequence
  Synthetic Polynucloetide
atggactggatttggcgcatccttttccttgtcggcgctgctaccggcgcgcattccttcgaagtgcaactggtggaaagcggaggcggacttgttcaaccaggcggaagcctgagactgagctgtgccgcttccggctttaatatcaaagacacatgcatcggatgggttcgccgcgctccagggaaagaagaggaactggttgccgacatctgtccctacaagggcagcacaagatatgccgactccgtgaaaggccggtttaccatctctgccgacacctctaagaatacggcctatctgcaaatgaactctctgcgggccgaagatacagccgtgtattactgcgccatcgtgtctgccagagatggctactataactattggggacagggaaccacagtcacagtgtcctctacgcgtatccagaaccctgatcctgccgtgtaccagctgcgggatagcaagagcagcgacaagagcgtgtgtctgttcaccgacttcgacagccagaccaacgtgtcccagagcaaggactccgacgtgtacatcaccgataagaccgtgctggacatgcggagcatggacttcaagagcaactccgccgtggcctggtccaacaagtccgatttcgcctgcgccaacgccttcaacaacagcattatccccgaggacacattcttcccaagccccgagagcagctgcgacgtgaagctggtggaaaagagcttcgagacagacaccaacctgaacttccagaacctgagcgtgatcggcttcagaatcctgctgctgaaagtggccggctttaacctgctgatgaccctgcggctgtggtccagccgcgccaagagaagcggatctggcgtgaagcagaccctgaatttcgacctgctgaagctggctggcgacgtggaatccaacccaggcccttctagaggccatatggccaagcctttgtctcaagaagaatccaccctcattgaaagagcaacggctacaatcaacagcatccccatctctgaagactacagcgtcgccagcgcagctctctctagcgacggccgcatcttcactggtgtcaatgtatatcattttactgggggaccttgtgcagaactcgtggtgctgggcactgctgctgctgcggcagctggcaacctgacttgtatcgtcgcgatcggaaatgagaacaggggcatcttgagcccctgcggacggtgccgacaggtgcttctcgatctgcatcctgggatcaaagccatagtgaaggacagtgatggacagccgacggcagttgggattcgtgaattgctgccctctggttatgtgtgggagggctga

SEQ ID NO: 6874 - DNA, 843 bp, Artificial Sequence
  Synthetic Polynucloetide
atggactggatttggcgcatccttttccttgtcggcgctgctaccggcgcgcattccttcgaagtgcaactggtggaaagcggaggcggacttgttcaaccaggcggaagcctgagactgagctgtgccgcttccggctttaatatcaaagacacatgcatcggatgggttcgccgcgctccagggaaagaagaggaactggttgccgacatctgtccctacaagggcagcacaagatatgccgactccgtgaaaggccggtttaccatctctgccgacacctctaagaatacggcctatctgcaaatgaactctctgcgggccgaagatacagccgtgtattactgcgccatcgtgtctgccagagatggctactataactattggggacagggaaccacagtcacagtgtcctctacgcgtatccagaaccctgatcctgccgtgtaccagctgcgggatagcaagagcagcgacaagagcgtgtgtctgttcaccgacttcgacagccagaccaacgtgtcccagagcaaggactccgacgtgtacatcaccgataagaccgtgctggacatgcggagcatggacttcaagagcaactccgccgtggcctggtccaacaagtccgatttcgcctgcgccaacgccttcaacaacagcattatccccgaggacacattcttcccaagccccgagagcagctgcgacgtgaagctggtggaaaagagcttcgagacagacaccaacctgaacttccagaacctgagcgtgatcggcttcagaatcctgctgctgaaagtggccggctttaacctgctgatgaccctgcggctgtggtccagc

SEQ ID NO: 6875 - DNA, 1704 bp, Artificial Sequence; identical to SEQ ID NO: 6510
  Synthetic Polynucloetide

SEQ ID NO: 6876 - DNA, 1014 bp, Artificial Sequence; identical to SEQ ID NO: 6511
  Synthetic Polynucloetide

SEQ ID NO: 6877 - DNA, 1380 bp, Artificial Sequence
  Synthetic Polynucloetide
atggactggatttggcgcatccttttccttgtcggcgctgctaccggcgcgcattccttcgaagtgcaactggtggaaagcggaggcggacttgttcaaccaggcggaagcctgagactgagctgtgccgcttccggctttaatatcaaagacacatgcatcggatgggttcgccgcgctccagggaaagaagaggaactggttgccgacatctgtccctacaagggcagcacaagatatgccgactccgtgaaaggccggtttaccatctctgccgacacctctaagaatacggcctatctgcaaatgaactctctgcgggccgaagatacagccgtgtattactgcgccatcgtgtctgccagagatggctactataactattggggacagggaaccacagtcacagtgtcctctacgcgtgagcagaaactgatctcggaagaggatgggagcggcatccagaaccctgatcctgccgtgtaccagctgcgggatagcaagagcagcgacaagagcgtgtgtctgttcaccgacttcgacagccagaccaacgtgtcccagagcaaggactccgacgtgtacatcaccgataagtgcgtgctggacatgcggagcatggacttcaagagcaactccgccgtggcctggtccaacaagtccgatttcgcctgcgccaacgccttcaacaacagcattatccccgaggacacattcttcccaagccccgagagcagctgcgacgtgaagctggtggaaaagagcttcgagacagacaccaacctgaacttccagaacctgagcgtgatcggcttcagaatcctgctgctgaaagtggccggctttaacctgctgatgaccctgcggctgtggtccagccgcgccaagagaagcggatctggcgtgaagcagaccctgaatttcgacctgctgaagctggctggcgacgtggaatccaacccaggcccttctagaggccatatggccaagcctttgtctcaagaagaatccaccctcattgaaagagcaacggctacaatcaacagcatccccatctctgaagactacagcgtcgccagcgcagctctctctagcgacggccgcatcttcactggtgtcaatgtatatcattttactgggggaccttgtgcagaactcgtggtgctgggcactgctgctgctgcggcagctggcaacctgacttgtatcgtcgcgatcggaaatgagaacaggggcatcttgagcccctgcggacggtgccgacaggtgcttctcgatctgcatcctgggatcaaagccatagtgaaggacagtgatggacagccgacggcagttgggattcgtgaattgctgccctctggttatgtgtgggagggctga

SEQ ID NO: 6878 - DNA, 882 bp, Artificial Sequence
  Synthetic Polynucloetide
atggactggatttggcgcatccttttccttgtcggcgctgctaccggcgcgcattccttcgaagtgcaactggtggaaagcggaggcggacttgttcaaccaggcggaagcctgagactgagctgtgccgcttccggctttaatatcaaagacacatgcatcggatgggttcgccgcgctccagggaaagaagaggaactggttgccgacatctgtccctacaagggcagcacaagatatgccgactccgtgaaaggccggtttaccatctctgccgacacctctaagaatacggcctatctgcaaatgaactctctgcgggccgaagatacagccgtgtattactgcgccatcgtgtctgccagagatggctactataactattggggacagggaaccacagtcacagtgtcctctacgcgtgagcagaaactgatctcggaagaggatgggagcggcatccagaaccctgatcctgccgtgtaccagctgcgggatagcaagagcagcgacaagagcgtgtgtctgttcaccgacttcgacagccagaccaacgtgtcccagagcaaggactccgacgtgtacatcaccgataagtgcgtgctggacatgcggagcatggacttcaagagcaactccgccgtggcctggtccaacaagtccgatttcgcctgcgccaacgccttcaacaacagcattatccccgaggacacattcttcccaagccccgagagcagctgcgacgtgaagctggtggaaaagagcttcgagacagacaccaacctgaacttccagaacctgagcgtgatcggcttcagaatcctgctgctgaaagtggccggctttaacctgctgatgaccctgcggctgtggtccagctga

SEQ ID NO: 6879 - DNA, 1938 bp, Artificial Sequence
  Synthetic Polynucloetide
atggccttaccagtgaccgccttgctcctgccgctggccttgctgctccacgccgccaggccgcagctccagctgcaagagtctggacctggcctggtcaagcctagcgagacactgagcctgacctgtaccgtgtccggcgatagcatcagcagcggcgattactactggggctggatcagacagcctcctggcaaaggactggaatggatcggccacatctactacagcggcgtgacctactacaaccccagcctgaagtccagagtgaccatcagcgtggacaccagccggaaccagttctccctgaagctgtctagcgtgacagccgccgataccgccgtgtactactgcaccagagaggacagcagcaactggcggagtagaggccagggaacactggtcacagttagctctctcgagagcggcggaggcggatctttcgaagtgcaactggtggaaagcggaggcggacttgttcaaccaggcggaagcctgagactgagctgtgccgcttccggctttaatatcaaagacacatgcatcggatgggttcgccgcgctccagggaaagaagaggaactggttgccgacatctgtccctacaagggcagcacaagatatgccgactccgtgaaaggccggtttaccatctctgccgacacctctaagaatacggcctatctgcaaatgaactctctgcgggccgaagatacagccgtgtattactgcgccatcgtgtctgccagagatggctactataactattggggacagggaaccacagtcacagtgtcctctacgcgtgggagcggcatccagaaccctgatcctgccgtgtaccagctgcgggatagcaagagcagcgacaagagcgtgtgtctgttcaccgacttcgacagccagaccaacgtgtcccagagcaaggactccgacgtgtacatcaccgataagaccgtgctggacatgcggagcatggacttcaagagcaactccgccgtggcctggtccaacaagtccgatttcgcctgcgccaacgccttcaacaacagcattatccccgaggacacattcttcccaagcagcgacgtgccctgcgacgtgaagctggtggaaaagagcttcgagacagacaccaacctgaacttccagaacctgagcgtgatcggcttcagaatcctgctgctgaaagtggccggctttaacctgctgatgaccctgcggctgtggtccagccgcgccaagagaagcggatctggcgtgaagcagaccctgaatttcgacctgctgaagctggctggcgacgtggaatccaacccaggcccttctagaggccatatgaccgagtacaagcccacggtgcgcctcgccacccgcgacgacgtccccagggccgtacgcaccctcgccgccgcgttcgccgactaccccgccacgcgccacaccgtcgatccggaccgccacatcgagcgggtcaccgagctgcaagaactcttcctcacgcgcgtcgggctcgacatcggcaaggtgtgggtcgcggacgacggcgccgcggtggcggtctggaccacgccggagagcgtcgaagcgggggcggtgttcgccgagatcggcccgcgcatggccgagttgagcggttcccggctggccgcgcagcaacagatggaaggcctcctggcgccgcaccggcccaaggagcccgcgtggttcctggccaccgtcggcgtctcgcccgaccaccagggcaagggtctgggcagcgccgtcgtgctccccggagtggaggcggccgagcgcgccggggtgcccgccttcctggagacctccgcgccccgcaacctccccttctacgagcggctcggcttcaccgtcaccgccgacgtcgaggtgcccgaaggaccgcgcacctggtgcatgacccgcaagcccggtgcctga

SEQ ID NO: 6880 - DNA, 2034 bp, Artificial Sequence
  Synthetic Polynucloetide
atggccttaccagtgaccgccttgctcctgccgctggccttgctgctccacgccgccaggccgcagctccagctgcaagagtctggacctggcctggtcaagcctagcgagacactgagcctgacctgtaccgtgtccggcgatagcatcagcagcggcgattactactggggctggatcagacagcctcctggcaaaggactggaatggatcggccacatctactacagcggcgtgacctactacaaccccagcctgaagtccagagtgaccatcagcgtggacaccagccggaaccagttctccctgaagctgtctagcgtgacagccgccgataccgccgtgtactactgcaccagagaggacagcagcaactggcggagtagaggccagggaacactggtcacagttagctctctcgagagcggcggaggcggatctttcgaagtgcaactggtggaaagcggaggcggacttgttcaaccaggcggaagcctgagactgagctgtgccgcttccggctttaatatcaaagacacatgcatcggatgggttcgccgcgctccagggaaagaagaggaactggttgccgacatctgtccctacaagggcagcacaagatatgccgactccgtgaaaggccggtttaccatctctgccgacacctctaagaatacggcctatctgcaaatgaactctctgcgggccgaagatacagccgtgtattactgcgccatcgtgtctgccagagatggctactataactattggggacagggaaccacagtcacagtgtcctctctcgaggacctgaagaacgtgttcccacctgaggtggccgtgttcgagcctagcaaggccgagatcgcccacacccagaaagccaccctcgtgtgcctggctaccggcttctaccccgaccatgtggaactgtcttggtgggtcaacggcaaagaggtgcacagcggcgtgtctaccgacccccagccactgaaagaacagcccgccctgaacgacagccggtactgcctgagcagcagactgagagtgtccgccaccttctggcagaacccccggaaccacttcagatgccaggtgcagttctacggcctgagcgagaacgacgagtggacccaggacagagccaagcccgtgacccagatcgtgtctgccgaagcctggggcagagccgattgcggcatcaccagcgccagctaccaccagggcgtgctgagcgccaccatcctgtacgagatcctgctgggcaaggccaccctgtacgccgtgctggtgtctgccctggtgctgatggctatggtcaagcggaaggacagccggggaagggccaagcgatctggatctggagcaacaaacttctcactactcaaacaagcaggtgacgtggaggagaatcccgggcctactagaggccatatgaccgagtacaagcccacggtgcgcctcgccacccgcgacgacgtccccagggccgtacgcaccctcgccgccgcgttcgccgactaccccgccacgcgccacaccgtcgatccggaccgccacatcgagcgggtcaccgagctgcaagaactcttcctcacgcgcgtcgggctcgacatcggcaaggtgtgggtcgcggacgacggcgccgcggtggcggtctggaccacgccggagagcgtcgaagcgggggcggtgttcgccgagatcggcccgcgcatggccgagttgagcggttcccggctggccgcgcagcaacagatggaaggcctcctggcgccgcaccggcccaaggagcccgcgtggttcctggccaccgtcggcgtctcgcccgaccaccagggcaagggtctgggcagcgccgtcgtgctccccggagtggaggcggccgagcgcgccggggtgcccgccttcctggagacctccgcgccccgcaacctccccttctacgagcggctcggcttcaccgtcaccgccgacgtcgaggtgcccgaaggaccgcgcacctggtgcatgacccgcaagcccggtgcctga

SEQ ID NO: 6881 - DNA, 2103 bp, Artificial Sequence
  Synthetic Polynucloetide
atggccttaccagtgaccgccttgctcctgccgctggccttgctgctccacgccgccaggccgcagctccagctgcaagagtctggacctggcctggtcaagcctagcgagacactgagcctgacctgtaccgtgtccggcgatagcatcagcagcggcgattactactggggctggatcagacagcctcctggcaaaggactggaatggatcggccacatctactacagcggcgtgacctactacaaccccagcctgaagtccagagtgaccatcagcgtggacaccagccggaaccagttctccctgaagctgtctagcgtgacagccgccgataccgccgtgtactactgcaccagagaggacagcagcaactggcggagtagaggccagggaacactggtcacagttagctctctcgagagcggcggaggcggatctttcgaagtgcaactggtggaaagcggaggcggacttgttcaaccaggcggaagcctgagactgagctgtgccgcttccggctttaatatcaaagacacatgcatcggatgggttcgccgcgctccagggaaagaagaggaactggttgccgacatctgtccctacaagggcagcacaagatatgccgactccgtgaaaggccggtttaccatctctgccgacacctctaagaatacggcctatctgcaaatgaactctctgcgggccgaagatacagccgtgtattactgcgccatcgtgtctgccagagatggctactataactattggggacagggaaccacagtcacagtgtcctctacgcgtgggtctggaggcggaggcagcggcggaggcgggagcggcgacggtaacgaggagatgggaggaatcactcaaaccccttacaaagtctcaatttcaggaacaactgttatccttacatgtccccagtatcctggcagcgagatcctttggcagcataacgacaagaatatagggggagatgaagacgataagaatatcggatctgacgaggatcacttgagcctgaaagagttctccgagcttgaacaaagcggatattatgtgtgctatccgcgcgggtcaaagccggaagacgctaacttttacctttatctccgagccagagtgtgcgaaaattgcatggaaatggacgttatgtccgttgctacaatagttatcgtagatatatgcatcacgggtggactgcttctgctggtttattattggtccaagaatagaaaggccaaagctaaacccgtgaccagaggcgctggcgcaggcggaaggcaaaggggacaaaacaaagaacggccaccaccagtgccaaatccagattatgagcctattcggaaaggacagagggacctgtactctggcctgaatcagagaagaatccgcgccaagagaagcggatctggcgtgaagcagaccctgaatttcgacctgctgaagctggctggcgacgtggaatccaacccaggcccttctagaggccatatgaccgagtacaagcccacggtgcgcctcgccacccgcgacgacgtccccagggccgtacgcaccctcgccgccgcgttcgccgactaccccgccacgcgccacaccgtcgatccggaccgccacatcgagcgggtcaccgagctgcaagaactcttcctcacgcgcgtcgggctcgacatcggcaaggtgtgggtcgcggacgacggcgccgcggtggcggtctggaccacgccggagagcgtcgaagcgggggcggtgttcgccgagatcggcccgcgcatggccgagttgagcggttcccggctggccgcgcagcaacagatggaaggcctcctggcgccgcaccggcccaaggagcccgcgtggttcctggccaccgtcggcgtctcgcccgaccaccagggcaagggtctgggcagcgccgtcgtgctccccggagtggaggcggccgagcgcgccggggtgcccgccttcctggagacctccgcgccccgcaacctccccttctacgagcggctcggcttcaccgtcaccgccgacgtcgaggtgcccgaaggaccgcgcacctggtgcatgacccgcaagcccggtgcctga

SEQ ID NO: 6882 - DNA, 1998 bp, Artificial Sequence
  Synthetic Polynucloetide
atggccttaccagtgaccgccttgctcctgccgctggccttgctgctccacgccgccaggccgcagctccagctgcaagagtctggacctggcctggtcaagcctagcgagacactgagcctgacctgtaccgtgtccggcgatagcatcagcagcggcgattactactggggctggatcagacagcctcctggcaaaggactggaatggatcggccacatctactacagcggcgtgacctactacaaccccagcctgaagtccagagtgaccatcagcgtggacaccagccggaaccagttctccctgaagctgtctagcgtgacagccgccgataccgccgtgtactactgcaccagagaggacagcagcaactggcggagtagaggccagggaacactggtcacagttagctctctcgagagcggcggaggcggatctttcgaagtgcaactggtggaaagcggaggcggacttgttcaaccaggcggaagcctgagactgagctgtgccgcttccggctttaatatcaaagacacatgcatcggatgggttcgccgcgctccagggaaagaagaggaactggttgccgacatctgtccctacaagggcagcacaagatatgccgactccgtgaaaggccggtttaccatctctgccgacacctctaagaatacggcctatctgcaaatgaactctctgcgggccgaagatacagccgtgtattactgcgccatcgtgtctgccagagatggctactataactattggggacagggaaccacagtcacagtgtcctctacgcgtgggtctggaggcggaggcagcggcggaggcgggagcggcttcaagatccccatcgaggaactggaagatcgggtgttcgtgaactgcaacacctctatcacctgggtggaaggcaccgtgggaacactgctgagcgacatcaccagactggacctcggcaagcggattctggaccctcggggcatctacagatgcaacggcaccgacatctacaaggacaaagaaagcaccgtgcaggtccactacagaatgtgccagtcctgcgtggaactggaccctgctacagtggccggcatcatcgtgaccgatgtgatcgctactctgctgctggctctgggagtgttctgcttcgccggacacgaaacaggcagactgtctggcgctgccgatacacaggccctgctgagaaacgaccaagtgtatcagcccctgcgcgacagagatgatgcccagtattctcacctcggcggcaactgggctagaaacaagcgcgccaagagaagcggatctggcgtgaagcagaccctgaatttcgacctgctgaagctggctggcgacgtggaatccaacccaggcccttctagaggccatatgaccgagtacaagcccacggtgcgcctcgccacccgcgacgacgtccccagggccgtacgcaccctcgccgccgcgttcgccgactaccccgccacgcgccacaccgtcgatccggaccgccacatcgagcgggtcaccgagctgcaagaactcttcctcacgcgcgtcgggctcgacatcggcaaggtgtgggtcgcggacgacggcgccgcggtggcggtctggaccacgccggagagcgtcgaagcgggggcggtgttcgccgagatcggcccgcgcatggccgagttgagcggttcccggctggccgcgcagcaacagatggaaggcctcctggcgccgcaccggcccaaggagcccgcgtggttcctggccaccgtcggcgtctcgcccgaccaccagggcaagggtctgggcagcgccgtcgtgctccccggagtggaggcggccgagcgcgccggggtgcccgccttcctggagacctccgcgccccgcaacctccccttctacgagcggctcggcttcaccgtcaccgccgacgtcgaggtgcccgaaggaccgcgcacctggtgcatgacccgcaagcccggtgcctga

SEQ ID NO: 6883 - DNA, 2028 bp, Artificial Sequence
  Synthetic Polynucloetide
atggccttaccagtgaccgccttgctcctgccgctggccttgctgctccacgccgccaggccgcagctccagctgcaagagtctggacctggcctggtcaagcctagcgagacactgagcctgacctgtaccgtgtccggcgatagcatcagcagcggcgattactactggggctggatcagacagcctcctggcaaaggactggaatggatcggccacatctactacagcggcgtgacctactacaaccccagcctgaagtccagagtgaccatcagcgtggacaccagccggaaccagttctccctgaagctgtctagcgtgacagccgccgataccgccgtgtactactgcaccagagaggacagcagcaactggcggagtagaggccagggaacactggtcacagttagctctctcgagagcggcggaggcggatctttcgaagtgcaactggtggaaagcggaggcggacttgttcaaccaggcggaagcctgagactgagctgtgccgcttccggctttaatatcaaagacacatgcatcggatgggttcgccgcgctccagggaaagaagaggaactggttgccgacatctgtccctacaagggcagcacaagatatgccgactccgtgaaaggccggtttaccatctctgccgacacctctaagaatacggcctatctgcaaatgaactctctgcgggccgaagatacagccgtgtattactgcgccatcgtgtctgccagagatggctactataactattggggacagggaaccacagtcacagtgtcctctacgcgtgggtctggaggcggaggcagcggcggaggcgggagcggccagagcatcaagggcaaccacctggtcaaggtgtacgactaccaagaggacggcagcgtgctgctgacatgtgatgccgaggccaagaacatcacctggtttaaggacggcaagatgatcggcttcctgaccgaggacaagaagaagtggaacctgggcagcaacgctaaggaccccagaggcatgtatcagtgcaagggcagccagaacaagagcaagcccctccaggtgtactaccggatgtgccagaactgcatcgagctgaacgccgctaccatcagcggctttctgttcgccgagatcgtgtccatcttcgtgctggccgtgggcgtgtactttatcgctggacaggatggcgtgcggcagagcagagcttccgataagcaaaccctgctgcctaacgaccagctgtaccagcctctgaaggacagagaggacgaccagtacagccacctccagggcaatcagctgagaagaaaccgcgccaagagaagcggatctggcgtgaagcagaccctgaatttcgacctgctgaagctggctggcgacgtggaatccaacccaggcccttctagaggccatatgaccgagtacaagcccacggtgcgcctcgccacccgcgacgacgtccccagggccgtacgcaccctcgccgccgcgttcgccgactaccccgccacgcgccacaccgtcgatccggaccgccacatcgagcgggtcaccgagctgcaagaactcttcctcacgcgcgtcgggctcgacatcggcaaggtgtgggtcgcggacgacggcgccgcggtggcggtctggaccacgccggagagcgtcgaagcgggggcggtgttcgccgagatcggcccgcgcatggccgagttgagcggttcccggctggccgcgcagcaacagatggaaggcctcctggcgccgcaccggcccaaggagcccgcgtggttcctggccaccgtcggcgtctcgcccgaccaccagggcaagggtctgggcagcgccgtcgtgctccccggagtggaggcggccgagcgcgccggggtgcccgccttcctggagacctccgcgccccgcaacctccccttctacgagcggctcggcttcaccgtcaccgccgacgtcgaggtgcccgaaggaccgcgcacctggtgcatgacccgcaagcccggtgcctga

SEQ ID NO: 6884 - DNA, 1977 bp, Artificial Sequence
  Synthetic Polynucloetide
atggccttaccagtgaccgccttgctcctgccgctggccttgctgctccacgccgccaggccgcagctccagctgcaagagtctggacctggcctggtcaagcctagcgagacactgagcctgacctgtaccgtgtccggcgatagcatcagcagcggcgattactactggggctggatcagacagcctcctggcaaaggactggaatggatcggccacatctactacagcggcgtgacctactacaaccccagcctgaagtccagagtgaccatcagcgtggacaccagccggaaccagttctccctgaagctgtctagcgtgacagccgccgataccgccgtgtactactgcaccagagaggacagcagcaactggcggagtagaggccagggaacactggtcacagttagctctctcgagagcggcggaggcggatctttcgaagtgcaactggtggaaagcggaggcggacttgttcaaccaggcggaagcctgagactgagctgtgccgcttccggctttaatatcaaagacacatgcatcggatgggttcgccgcgctccagggaaagaagaggaactggttgccgacatctgtccctacaagggcagcacaagatatgccgactccgtgaaaggccggtttaccatctctgccgacacctctaagaatacggcctatctgcaaatgaactctctgcgggccgaagatacagccgtgtattactgcgccatcgtgtctgccagagatggctactataactattggggacagggaaccacagtcacagtgtcctctacgcgtgggtctggaggcggaggcagcggcggaggcgggagcggccagagttttgggttgttggaccctaaattgtgctatctgttggacggaatcctgttcatttacggagtgatcctgaccgcattgttcctgcgggttaagttttccagatccgcagacgcacccgcttaccaacaagggcagaaccaactctacaatgaacttaatttggggcggagggaagagtacgacgttctggacaaaaggaggggacgagatcccgagatgggcggaaagcctcagcgaaggaagaatccgcaagaggggctttataacgaactccagaaagataaaatggcagaagcctatagtgagattgggatgaagggagaaaggaggaggggtaaaggtcacgatgggttgtaccaaggattgagcacagccactaaagatacctatgatgcgctccacatgcaggccctgccgccaagacgcgccaagagaagcggatctggcgtgaagcagaccctgaatttcgacctgctgaagctggctggcgacgtggaatccaacccaggcccttctagaggccatatgaccgagtacaagcccacggtgcgcctcgccacccgcgacgacgtccccagggccgtacgcaccctcgccgccgcgttcgccgactaccccgccacgcgccacaccgtcgatccggaccgccacatcgagcgggtcaccgagctgcaagaactcttcctcacgcgcgtcgggctcgacatcggcaaggtgtgggtcgcggacgacggcgccgcggtggcggtctggaccacgccggagagcgtcgaagcgggggcggtgttcgccgagatcggcccgcgcatggccgagttgagcggttcccggctggccgcgcagcaacagatggaaggcctcctggcgccgcaccggcccaaggagcccgcgtggttcctggccaccgtcggcgtctcgcccgaccaccagggcaagggtctgggcagcgccgtcgtgctccccggagtggaggcggccgagcgcgccggggtgcccgccttcctggagacctccgcgccccgcaacctccccttctacgagcggctcggcttcaccgtcaccgccgacgtcgaggtgcccgaaggaccgcgcacctggtgcatgacccgcaagcccggtgcctga

SEQ ID NO: 6885 - DNA, 2601 bp, Artificial Sequence
  Synthetic Polynucloetide
atggccttaccagtgaccgccttgctcctgccgctggccttgctgctccacgccgccaggccgcagctccagctgcaagagtctggacctggcctggtcaagcctagcgagacactgagcctgacctgtaccgtgtccggcgatagcatcagcagcggcgattactactggggctggatcagacagcctcctggcaaaggactggaatggatcggccacatctactacagcggcgtgacctactacaaccccagcctgaagtccagagtgaccatcagcgtggacaccagccggaaccagttctccctgaagctgtctagcgtgacagccgccgataccgccgtgtactactgcaccagagaggacagcagcaactggcggagtagaggccagggaacactggtcacagttagctctctcgagggacagcctaaggccaatcctaccgtgacactgttccctccaagcagcgaagaactccaggccaacaaggccacacttgtgtgcctgatctccgacttctaccctggggctgtgacagtggcttggaaggccgatggatctcctgtgaaagccggcgtggaaaccaccaagccatccaagcagagcaacaacaaatacgccgccagctcctacctgagcctgacacctgagcagtggaagtcccacagatcctacagctgccaagtgacccacgaaggcagcaccgtggaaaagacagtggcccctacagagtgcagcggcagagccgattgcggctttaccagcgagagctaccagcagggcgtgctgagcgccaccatcctgtacgagatcctgctgggcaaggccaccctgtacgccgtgctggtgtctgccctggtgctgatggctatggtcaagcggaaggacagccggggaagggccaagcgatctggatctggagcaacaaacttctcactactcaaacaagcaggtgacgtggaggagaatcccgggcctactagtatggactggatttggcgcatccttttccttgtcggcgctgctaccggcgcgcattccttcgaagtgcaactggtggaaagcggaggcggacttgttcaaccaggcggaagcctgagactgagctgtgccgcttccggctttaatatcaaagacacatgcatcggatgggttcgccgcgctccagggaaagaagaggaactggttgccgacatctgtccctacaagggcagcacaagatatgccgactccgtgaaaggccggtttaccatctctgccgacacctctaagaatacggcctatctgcaaatgaactctctgcgggccgaagatacagccgtgtattactgcgccatcgtgtctgccagagatggctactataactattggggacagggaaccacagtcacagtgtcctctacgcgtgcctctacaaagggaccctccgtgtttcctctggctcccagcagcaagtctacaagcggaggaacagccgctctgggctgcctggtcaaggattactttcccgagcctgtgaccgtgtcctggaatagcggagcactgacaagcggcgtgcacacctttccagccgtgctgcaaagcagcggcctgtactctctgagcagcgtggtcacagtgcctagctctagcctgggcacccagacctacatctgcaatgtgaaccacaagcctagcaacaccaaggtggacaagagagtggaacccaagagctgtatccccgaggacacattcttcccaagccccgagagcagctgcgacgtgaagctggtggaaaagagcttcgagacagacaccaacctgaacttccagaacctgagcgtgatcggcttcagaatcctgctgctgaaagtggccggctttaacctgctgatgaccctgcggctgtggtccagccgcgccaagagaagcggatctggcgtgaagcagaccctgaatttcgacctgctgaagctggctggcgacgtggaatccaacccaggcccttctagaggccatatgaccgagtacaagcccacggtgcgcctcgccacccgcgacgacgtccccagggccgtacgcaccctcgccgccgcgttcgccgactaccccgccacgcgccacaccgtcgatccggaccgccacatcgagcgggtcaccgagctgcaagaactcttcctcacgcgcgtcgggctcgacatcggcaaggtgtgggtcgcggacgacggcgccgcggtggcggtctggaccacgccggagagcgtcgaagcgggggcggtgttcgccgagatcggcccgcgcatggccgagttgagcggttcccggctggccgcgcagcaacagatggaaggcctcctggcgccgcaccggcccaaggagcccgcgtggttcctggccaccgtcggcgtctcgcccgaccaccagggcaagggtctgggcagcgccgtcgtgctccccggagtggaggcggccgagcgcgccggggtgcccgccttcctggagacctccgcgccccgcaacctccccttctacgagcggctcggcttcaccgtcaccgccgacgtcgaggtgcccgaaggaccgcgcacctggtgcatgacccgcaagcccggtgcctga

SEQ ID NO: 6886 - DNA, 1899 bp, Artificial Sequence; identical to SEQ ID NO: 6859
  Synthetic Polynucloetide

SEQ ID NO: 6887 - DNA, 1986 bp, Artificial Sequence
  Synthetic Polynucloetide
atggccttaccagtgaccgccttgctcctgccgctggccttgctgctccacgccgccaggccgcagctccagctgcaagagtctggacctggcctggtcaagcctagcgagacactgagcctgacctgtaccgtgtccggcgatagcatcagcagcggcgattactactggggctggatcagacagcctcctggcaaaggactggaatggatcggccacatctactacagcggcgtgacctactacaaccccagcctgaagtccagagtgaccatcagcgtggacaccagccggaaccagttctccctgaagctgtctagcgtgacagccgccgataccgccgtgtactactgcaccagagaggacagcagcaactggcggagtagaggccagggaacactggtcacagttagctctctcgagggatctggcagagccgattgcggctttaccagcgagagctaccagcagggcgtgctgagcgccaccatcctgtacgagatcctgctgggcaaggccaccctgtacgccgtgctggtgtctgccctggtgctgatggctatggtcaagcggaaggacagccggggaagggccaagcgatctggatctggagcaacaaacttctcactactcaaacaagcaggtgacgtggaggagaatcccgggcctactagtatggactggatttggcgcatccttttccttgtcggcgctgctaccggcgcgcattccttcgaagtgcaactggtggaaagcggaggcggacttgttcaaccaggcggaagcctgagactgagctgtgccgcttccggctttaatatcaaagacacatgcatcggatgggttcgccgcgctccagggaaagaagaggaactggttgccgacatctgtccctacaagggcagcacaagatatgccgactccgtgaaaggccggtttaccatctctgccgacacctctaagaatacggcctatctgcaaatgaactctctgcgggccgaagatacagccgtgtattactgcgccatcgtgtctgccagagatggctactataactattggggacagggaaccacagtcacagtgtcctctacgcgtggcagcatccccgaggacacattcttcccaagccccgagagcagctgcgacgtgaagctggtggaaaagagcttcgagacagacaccaacctgaacttccagaacctgagcgtgatcggcttcagaatcctgctgctgaaagtggccggctttaacctgctgatgaccctgcggctgtggtccagccgcgccaagagaagcggatctggcgtgaagcagaccctgaatttcgacctgctgaagctggctggcgacgtggaatccaacccaggcccttctagaggccatatgaccgagtacaagcccacggtgcgcctcgccacccgcgacgacgtccccagggccgtacgcaccctcgccgccgcgttcgccgactaccccgccacgcgccacaccgtcgatccggaccgccacatcgagcgggtcaccgagctgcaagaactcttcctcacgcgcgtcgggctcgacatcggcaaggtgtgggtcgcggacgacggcgccgcggtggcggtctggaccacgccggagagcgtcgaagcgggggcggtgttcgccgagatcggcccgcgcatggccgagttgagcggttcccggctggccgcgcagcaacagatggaaggcctcctggcgccgcaccggcccaaggagcccgcgtggttcctggccaccgtcggcgtctcgcccgaccaccagggcaagggtctgggcagcgccgtcgtgctccccggagtggaggcggccgagcgcgccggggtgcccgccttcctggagacctccgcgccccgcaacctccccttctacgagcggctcggcttcaccgtcaccgccgacgtcgaggtgcccgaaggaccgcgcacctggtgcatgacccgcaagcccggtgcctga

SEQ ID NO: 6888 - DNA, 1284 bp, Artificial Sequence
  Synthetic Polynucloetide
atggccttaccagtgaccgccttgctcctgccgctggccttgctgctccacgccgccaggccgcagctccagctgcaagagtctggacctggcctggtcaagcctagcgagacactgagcctgacctgtaccgtgtccggcgatagcatcagcagcggcgattactactggggctggatcagacagcctcctggcaaaggactggaatggatcggccacatctactacagcggcgtgacctactacaaccccagcctgaagtccagagtgaccatcagcgtggacaccagccggaaccagttctccctgaagctgtctagcgtgacagccgccgataccgccgtgtactactgcaccagagaggacagcagcaactggcggagtagaggccagggaacactggtcacagttagctctctcgagggatctggcagagccgattgcggctttaccagcgagagctaccagcagggcgtgctgagcgccaccatcctgtacgagatcctgctgggcaaggccaccctgtacgccgtgctggtgtctgccctggtgctgatggctatggtcaagcggaaggacagccggggaagggccaagcgatctggatctggagcaacaaacttctcactactcaaacaagcaggtgacgtggaggagaatcccgggcctactagtatggactggatttggcgcatccttttccttgtcggcgctgctaccggcgcgcattccttcgaagtgcaactggtggaaagcggaggcggacttgttcaaccaggcggaagcctgagactgagctgtgccgcttccggctttaatatcaaagacacatgcatcggatgggttcgccgcgctccagggaaagaagaggaactggttgccgacatctgtccctacaagggcagcacaagatatgccgactccgtgaaaggccggtttaccatctctgccgacacctctaagaatacggcctatctgcaaatgaactctctgcgggccgaagatacagccgtgtattactgcgccatcgtgtctgccagagatggctactataactattggggacagggaaccacagtcacagtgtcctctacgcgtggcagcatccccgaggacacattcttcccaagccccgagagcagctgcgacgtgaagctggtggaaaagagcttcgagacagacaccaacctgaacttccagaacctgagcgtgatcggcttcagaatcctgctgctgaaagtggccggctttaacctgctgatgaccctgcggctgtggtccagc

SEQ ID NO: 6889 - DNA, 2013 bp, Artificial Sequence
  Synthetic Polynucloetide
atggccttaccagtgaccgccttgctcctgccgctggccttgctgctccacgccgccaggccgcagctccagctgcaagagtctggacctggcctggtcaagcctagcgagacactgagcctgacctgtaccgtgtccggcgatagcatcagcagcggcgattactactggggctggatcagacagcctcctggcaaaggactggaatggatcggccacatctactacagcggcgtgacctactacaaccccagcctgaagtccagagtgaccatcagcgtggacaccagccggaaccagttctccctgaagctgtctagcgtgacagccgccgataccgccgtgtactactgcaccagagaggacagcagcaactggcggagtagaggccagggaacactggtcacagttagctctctcgaggacaaaactcacacatgcccaccgtgcccagcaggcagagccgattgcggctttaccagcgagagctaccagcagggcgtgctgagcgccaccatcctgtacgagatcctgctgggcaaggccaccctgtacgccgtgctggtgtctgccctggtgctgatggctatggtcaagcggaaggacagccggggaagggccaagcgatctggatctggagcaacaaacttctcactactcaaacaagcaggtgacgtggaggagaatcccgggcctactagtatggactggatttggcgcatccttttccttgtcggcgctgctaccggcgcgcattccttcgaagtgcaactggtggaaagcggaggcggacttgttcaaccaggcggaagcctgagactgagctgtgccgcttccggctttaatatcaaagacacatgcatcggatgggttcgccgcgctccagggaaagaagaggaactggttgccgacatctgtccctacaagggcagcacaagatatgccgactccgtgaaaggccggtttaccatctctgccgacacctctaagaatacggcctatctgcaaatgaactctctgcgggccgaagatacagccgtgtattactgcgccatcgtgtctgccagagatggctactataactattggggacagggaaccacagtcacagtgtcctctacgcgtggcagcatccccgaggacacattcttcccaagccccgagagcagctgcgacgtgaagctggtggaaaagagcttcgagacagacaccaacctgaacttccagaacctgagcgtgatcggcttcagaatcctgctgctgaaagtggccggctttaacctgctgatgaccctgcggctgtggtccagccgcgccaagagaagcggatctggcgtgaagcagaccctgaatttcgacctgctgaagctggctggcgacgtggaatccaacccaggcccttctagaggccatatgaccgagtacaagcccacggtgcgcctcgccacccgcgacgacgtccccagggccgtacgcaccctcgccgccgcgttcgccgactaccccgccacgcgccacaccgtcgatccggaccgccacatcgagcgggtcaccgagctgcaagaactcttcctcacgcgcgtcgggctcgacatcggcaaggtgtgggtcgcggacgacggcgccgcggtggcggtctggaccacgccggagagcgtcgaagcgggggcggtgttcgccgagatcggcccgcgcatggccgagttgagcggttcccggctggccgcgcagcaacagatggaaggcctcctggcgccgcaccggcccaaggagcccgcgtggttcctggccaccgtcggcgtctcgcccgaccaccagggcaagggtctgggcagcgccgtcgtgctccccggagtggaggcggccgagcgcgccggggtgcccgccttcctggagacctccgcgccccgcaacctccccttctacgagcggctcggcttcaccgtcaccgccgacgtcgaggtgcccgaaggaccgcgcacctggtgcatgacccgcaagcccggtgcctga

SEQ ID NO: 6890 - DNA, 2013 bp, Artificial Sequence
  Synthetic Polynucloetide
atggccttaccagtgaccgccttgctcctgccgctggccttgctgctccacgccgccaggccgcagctccagctgcaagagtctggacctggcctggtcaagcctagcgagacactgagcctgacctgtaccgtgtccggcgatagcatcagcagcggcgattactactggggctggatcagacagcctcctggcaaaggactggaatggatcggccacatctactacagcggcgtgacctactacaaccccagcctgaagtccagagtgaccatcagcgtggacaccagccggaaccagttctccctgaagctgtctagcgtgacagccgccgataccgccgtgtactactgcaccagagaggacagcagcaactggcggagtagaggccagggaacactggtcacagttagctctctcgagggatctggcagagccgattgcggctttaccagcgagagctaccagcagggcgtgctgagcgccaccatcctgtacgagatcctgctgggcaaggccaccctgtacgccgtgctggtgtctgccctggtgctgatggctatggtcaagcggaaggacagccggggaagggccaagcgatctggatctggagcaacaaacttctcactactcaaacaagcaggtgacgtggaggagaatcccgggcctactagtatggactggatttggcgcatccttttccttgtcggcgctgctaccggcgcgcattccttcgaagtgcaactggtggaaagcggaggcggacttgttcaaccaggcggaagcctgagactgagctgtgccgcttccggctttaatatcaaagacacatgcatcggatgggttcgccgcgctccagggaaagaagaggaactggttgccgacatctgtccctacaagggcagcacaagatatgccgactccgtgaaaggccggtttaccatctctgccgacacctctaagaatacggcctatctgcaaatgaactctctgcgggccgaagatacagccgtgtattactgcgccatcgtgtctgccagagatggctactataactattggggacagggaaccacagtcacagtgtcctctacgcgtgataaaactcatacctgtccgccatgcccggcaatccccgaggacacattcttcccaagccccgagagcagctgcgacgtgaagctggtggaaaagagcttcgagacagacaccaacctgaacttccagaacctgagcgtgatcggcttcagaatcctgctgctgaaagtggccggctttaacctgctgatgaccctgcggctgtggtccagccgcgccaagagaagcggatctggcgtgaagcagaccctgaatttcgacctgctgaagctggctggcgacgtggaatccaacccaggcccttctagaggccatatgaccgagtacaagcccacggtgcgcctcgccacccgcgacgacgtccccagggccgtacgcaccctcgccgccgcgttcgccgactaccccgccacgcgccacaccgtcgatccggaccgccacatcgagcgggtcaccgagctgcaagaactcttcctcacgcgcgtcgggctcgacatcggcaaggtgtgggtcgcggacgacggcgccgcggtggcggtctggaccacgccggagagcgtcgaagcgggggcggtgttcgccgagatcggcccgcgcatggccgagttgagcggttcccggctggccgcgcagcaacagatggaaggcctcctggcgccgcaccggcccaaggagcccgcgtggttcctggccaccgtcggcgtctcgcccgaccaccagggcaagggtctgggcagcgccgtcgtgctccccggagtggaggcggccgagcgcgccggggtgcccgccttcctggagacctccgcgccccgcaacctccccttctacgagcggctcggcttcaccgtcaccgccgacgtcgaggtgcccgaaggaccgcgcacctggtgcatgacccgcaagcccggtgcctga

SEQ ID NO: 6891 - DNA, 2040 bp, Artificial Sequence
  Synthetic Polynucloetide
atggccttaccagtgaccgccttgctcctgccgctggccttgctgctccacgccgccaggccgcagctccagctgcaagagtctggacctggcctggtcaagcctagcgagacactgagcctgacctgtaccgtgtccggcgatagcatcagcagcggcgattactactggggctggatcagacagcctcctggcaaaggactggaatggatcggccacatctactacagcggcgtgacctactacaaccccagcctgaagtccagagtgaccatcagcgtggacaccagccggaaccagttctccctgaagctgtctagcgtgacagccgccgataccgccgtgtactactgcaccagagaggacagcagcaactggcggagtagaggccagggaacactggtcacagttagctctctcgaggacaaaactcacacatgcccaccgtgcccagcaggcagagccgattgcggctttaccagcgagagctaccagcagggcgtgctgagcgccaccatcctgtacgagatcctgctgggcaaggccaccctgtacgccgtgctggtgtctgccctggtgctgatggctatggtcaagcggaaggacagccggggaagggccaagcgatctggatctggagcaacaaacttctcactactcaaacaagcaggtgacgtggaggagaatcccgggcctactagtatggactggatttggcgcatccttttccttgtcggcgctgctaccggcgcgcattccttcgaagtgcaactggtggaaagcggaggcggacttgttcaaccaggcggaagcctgagactgagctgtgccgcttccggctttaatatcaaagacacatgcatcggatgggttcgccgcgctccagggaaagaagaggaactggttgccgacatctgtccctacaagggcagcacaagatatgccgactccgtgaaaggccggtttaccatctctgccgacacctctaagaatacggcctatctgcaaatgaactctctgcgggccgaagatacagccgtgtattactgcgccatcgtgtctgccagagatggctactataactattggggacagggaaccacagtcacagtgtcctctacgcgtgataaaactcatacctgtccgccatgcccggcaatccccgaggacacattcttcccaagccccgagagcagctgcgacgtgaagctggtggaaaagagcttcgagacagacaccaacctgaacttccagaacctgagcgtgatcggcttcagaatcctgctgctgaaagtggccggctttaacctgctgatgaccctgcggctgtggtccagccgcgccaagagaagcggatctggcgtgaagcagaccctgaatttcgacctgctgaagctggctggcgacgtggaatccaacccaggcccttctagaggccatatgaccgagtacaagcccacggtgcgcctcgccacccgcgacgacgtccccagggccgtacgcaccctcgccgccgcgttcgccgactaccccgccacgcgccacaccgtcgatccggaccgccacatcgagcgggtcaccgagctgcaagaactcttcctcacgcgcgtcgggctcgacatcggcaaggtgtgggtcgcggacgacggcgccgcggtggcggtctggaccacgccggagagcgtcgaagcgggggcggtgttcgccgagatcggcccgcgcatggccgagttgagcggttcccggctggccgcgcagcaacagatggaaggcctcctggcgccgcaccggcccaaggagcccgcgtggttcctggccaccgtcggcgtctcgcccgaccaccagggcaagggtctgggcagcgccgtcgtgctccccggagtggaggcggccgagcgcgccggggtgcccgccttcctggagacctccgcgccccgcaacctccccttctacgagcggctcggcttcaccgtcaccgccgacgtcgaggtgcccgaaggaccgcgcacctggtgcatgacccgcaagcccggtgcctga

SEQ ID NO: 6892 - DNA, 1338 bp, Artificial Sequence
  Synthetic Polynucloetide
atggccttaccagtgaccgccttgctcctgccgctggccttgctgctccacgccgccaggccgcagctccagctgcaagagtctggacctggcctggtcaagcctagcgagacactgagcctgacctgtaccgtgtccggcgatagcatcagcagcggcgattactactggggctggatcagacagcctcctggcaaaggactggaatggatcggccacatctactacagcggcgtgacctactacaaccccagcctgaagtccagagtgaccatcagcgtggacaccagccggaaccagttctccctgaagctgtctagcgtgacagccgccgataccgccgtgtactactgcaccagagaggacagcagcaactggcggagtagaggccagggaacactggtcacagttagctctctcgaggacaaaactcacacatgcccaccgtgcccagcaggcagagccgattgcggctttaccagcgagagctaccagcagggcgtgctgagcgccaccatcctgtacgagatcctgctgggcaaggccaccctgtacgccgtgctggtgtctgccctggtgctgatggctatggtcaagcggaaggacagccggggaagggccaagcgatctggatctggagcaacaaacttctcactactcaaacaagcaggtgacgtggaggagaatcccgggcctactagtatggactggatttggcgcatccttttccttgtcggcgctgctaccggcgcgcattccttcgaagtgcaactggtggaaagcggaggcggacttgttcaaccaggcggaagcctgagactgagctgtgccgcttccggctttaatatcaaagacacatgcatcggatgggttcgccgcgctccagggaaagaagaggaactggttgccgacatctgtccctacaagggcagcacaagatatgccgactccgtgaaaggccggtttaccatctctgccgacacctctaagaatacggcctatctgcaaatgaactctctgcgggccgaagatacagccgtgtattactgcgccatcgtgtctgccagagatggctactataactattggggacagggaaccacagtcacagtgtcctctacgcgtgataaaactcatacctgtccgccatgcccggcaatccccgaggacacattcttcccaagccccgagagcagctgcgacgtgaagctggtggaaaagagcttcgagacagacaccaacctgaacttccagaacctgagcgtgatcggcttcagaatcctgctgctgaaagtggccggctttaacctgctgatgaccctgcggctgtggtccagc

SEQ ID NO: 6893 - DNA, 1311 bp, Artificial Sequence
  Synthetic Polynucloetide
atggccttaccagtgaccgccttgctcctgccgctggccttgctgctccacgccgccaggccgcagctccagctgcaagagtctggacctggcctggtcaagcctagcgagacactgagcctgacctgtaccgtgtccggcgatagcatcagcagcggcgattactactggggctggatcagacagcctcctggcaaaggactggaatggatcggccacatctactacagcggcgtgacctactacaaccccagcctgaagtccagagtgaccatcagcgtggacaccagccggaaccagttctccctgaagctgtctagcgtgacagccgccgataccgccgtgtactactgcaccagagaggacagcagcaactggcggagtagaggccagggaacactggtcacagttagctctctcgagggatctggcagagccgattgcggctttaccagcgagagctaccagcagggcgtgctgagcgccaccatcctgtacgagatcctgctgggcaaggccaccctgtacgccgtgctggtgtctgccctggtgctgatggctatggtcaagcggaaggacagccggggaagggccaagcgatctggatctggagcaacaaacttctcactactcaaacaagcaggtgacgtggaggagaatcccgggcctactagtatggactggatttggcgcatccttttccttgtcggcgctgctaccggcgcgcattccttcgaagtgcaactggtggaaagcggaggcggacttgttcaaccaggcggaagcctgagactgagctgtgccgcttccggctttaatatcaaagacacatgcatcggatgggttcgccgcgctccagggaaagaagaggaactggttgccgacatctgtccctacaagggcagcacaagatatgccgactccgtgaaaggccggtttaccatctctgccgacacctctaagaatacggcctatctgcaaatgaactctctgcgggccgaagatacagccgtgtattactgcgccatcgtgtctgccagagatggctactataactattggggacagggaaccacagtcacagtgtcctctacgcgtgataaaactcatacctgtccgccatgcccggcaatccccgaggacacattcttcccaagccccgagagcagctgcgacgtgaagctggtggaaaagagcttcgagacagacaccaacctgaacttccagaacctgagcgtgatcggcttcagaatcctgctgctgaaagtggccggctttaacctgctgatgaccctgcggctgtggtccagc

SEQ ID NO: 6894 - DNA, 2667 bp, Artificial Sequence
  Synthetic Polynucloetide
atggccttaccagtgaccgccttgctcctgccgctggccttgctgctccacgccgccaggccgcagctccagctgcaagagtctggacctggcctggtcaagcctagcgagacactgagcctgacctgtaccgtgtccggcgatagcatcagcagcggcgattactactggggctggatcagacagcctcctggcaaaggactggaatggatcggccacatctactacagcggcgtgacctactacaaccccagcctgaagtccagagtgaccatcagcgtggacaccagccggaaccagttctccctgaagctgtctagcgtgacagccgccgataccgccgtgtactactgcaccagagaggacagcagcaactggcggagtagaggccagggaacactggtcacagttagctctctcgagggacagcctaaggccaatcctaccgtgacactgttccctccaagcagcgaagaactccaggccaacaaggccacacttgtgtgcctgatctccgacttctaccctggggctgtgacagtggcttggaaggccgatggatctcctgtgaaagccggcgtggaaaccaccaagccatccaagcagagcaacaacaaatacgccgccagctcctacctgagcctgacacctgagcagtggaagtcccacagatcctacagctgccaagtgacccacgaaggcagcaccgtggaaaagacagtggcccctacagagtgcagccccatcaagaccgatgtgattacaatggaccccaaggacaactgctccaaggacgccaacgataccctgctgctccagctgaccaacaccagcgcctactacatgtacttgttgctgctgctgaagtccgtggtgtacttcgccatcatcacatgctgcctgctgcggagaaccgccttctgctgcaacggcgagaagtctagggccaagcgatctggatctggagcaacaaacttctcactactcaaacaagcaggtgacgtggaggagaatcccgggcctactagtatggactggatttggcgcatccttttccttgtcggcgctgctaccggcgcgcattccttcgaagtgcaactggtggaaagcggaggcggacttgttcaaccaggcggaagcctgagactgagctgtgccgcttccggctttaatatcaaagacacatgcatcggatgggttcgccgcgctccagggaaagaagaggaactggttgccgacatctgtccctacaagggcagcacaagatatgccgactccgtgaaaggccggtttaccatctctgccgacacctctaagaatacggcctatctgcaaatgaactctctgcgggccgaagatacagccgtgtattactgcgccatcgtgtctgccagagatggctactataactattggggacagggaaccacagtcacagtgtcctctacgcgtgcctctacaaagggaccctccgtgtttcctctggctcccagcagcaagtctacaagcggaggaacagccgctctgggctgcctggtcaaggattactttcccgagcctgtgaccgtgtcctggaatagcggagcactgacaagcggcgtgcacacctttccagccgtgctgcaaagcagcggcctgtactctctgagcagcgtggtcacagtgcctagctctagcctgggcacccagacctacatctgcaatgtgaaccacaagcctagcaacaccaaggtggacaagagagtggaacccaagagctgtgaagtgaaaaccgactccaccgaccacgtgaagcccaaagagacagagaacaccaagcagcccagcaagagctgccacaagcccaaggccatcgtgcacaccgagaaagtgaacatgatgagcctgaccgtgctgggcctgcggatgctgttcgccaaaaccgtggccgtgaacttcctgctgaccgccaagctgttcttcctccgcgccaagagaagcggatctggcgtgaagcagaccctgaatttcgacctgctgaagctggctggcgacgtggaatccaacccaggcccttctagaggccatatgaccgagtacaagcccacggtgcgcctcgccacccgcgacgacgtccccagggccgtacgcaccctcgccgccgcgttcgccgactaccccgccacgcgccacaccgtcgatccggaccgccacatcgagcgggtcaccgagctgcaagaactcttcctcacgcgcgtcgggctcgacatcggcaaggtgtgggtcgcggacgacggcgccgcggtggcggtctggaccacgccggagagcgtcgaagcgggggcggtgttcgccgagatcggcccgcgcatggccgagttgagcggttcccggctggccgcgcagcaacagatggaaggcctcctggcgccgcaccggcccaaggagcccgcgtggttcctggccaccgtcggcgtctcgcccgaccaccagggcaagggtctgggcagcgccgtcgtgctccccggagtggaggcggccgagcgcgccggggtgcccgccttcctggagacctccgcgccccgcaacctccccttctacgagcggctcggcttcaccgtcaccgccgacgtcgaggtgcccgaaggaccgcgcacctggtgcatgacccgcaagcccggtgcctga

SEQ ID NO: 6895 - DNA, 1965 bp, Artificial Sequence; identical to SEQ ID NO: 6857
  Synthetic Polynucloetide

SEQ ID NO: 6896 - DNA, 2052 bp, Artificial Sequence
  Synthetic Polynucloetide
atggccttaccagtgaccgccttgctcctgccgctggccttgctgctccacgccgccaggccgcagctccagctgcaagagtctggacctggcctggtcaagcctagcgagacactgagcctgacctgtaccgtgtccggcgatagcatcagcagcggcgattactactggggctggatcagacagcctcctggcaaaggactggaatggatcggccacatctactacagcggcgtgacctactacaaccccagcctgaagtccagagtgaccatcagcgtggacaccagccggaaccagttctccctgaagctgtctagcgtgacagccgccgataccgccgtgtactactgcaccagagaggacagcagcaactggcggagtagaggccagggaacactggtcacagttagctctctcgagggatctcccatcaagaccgatgtgattacaatggaccccaaggacaactgctccaaggacgccaacgataccctgctgctccagctgaccaacaccagcgcctactacatgtacttgttgctgctgctgaagtccgtggtgtacttcgccatcatcacatgctgcctgctgcggagaaccgccttctgctgcaacggcgagaagtctagggccaagcgatctggatctggagcaacaaacttctcactactcaaacaagcaggtgacgtggaggagaatcccgggcctactagtatggactggatttggcgcatccttttccttgtcggcgctgctaccggcgcgcattccttcgaagtgcaactggtggaaagcggaggcggacttgttcaaccaggcggaagcctgagactgagctgtgccgcttccggctttaatatcaaagacacatgcatcggatgggttcgccgcgctccagggaaagaagaggaactggttgccgacatctgtccctacaagggcagcacaagatatgccgactccgtgaaaggccggtttaccatctctgccgacacctctaagaatacggcctatctgcaaatgaactctctgcgggccgaagatacagccgtgtattactgcgccatcgtgtctgccagagatggctactataactattggggacagggaaccacagtcacagtgtcctctacgcgtggcagcgaagtgaaaaccgactccaccgaccacgtgaagcccaaagagacagagaacaccaagcagcccagcaagagctgccacaagcccaaggccatcgtgcacaccgagaaagtgaacatgatgagcctgaccgtgctgggcctgcggatgctgttcgccaaaaccgtggccgtgaacttcctgctgaccgccaagctgttcttcctccgcgccaagagaagcggatctggcgtgaagcagaccctgaatttcgacctgctgaagctggctggcgacgtggaatccaacccaggcccttctagaggccatatgaccgagtacaagcccacggtgcgcctcgccacccgcgacgacgtccccagggccgtacgcaccctcgccgccgcgttcgccgactaccccgccacgcgccacaccgtcgatccggaccgccacatcgagcgggtcaccgagctgcaagaactcttcctcacgcgcgtcgggctcgacatcggcaaggtgtgggtcgcggacgacggcgccgcggtggcggtctggaccacgccggagagcgtcgaagcgggggcggtgttcgccgagatcggcccgcgcatggccgagttgagcggttcccggctggccgcgcagcaacagatggaaggcctcctggcgccgcaccggcccaaggagcccgcgtggttcctggccaccgtcggcgtctcgcccgaccaccagggcaagggtctgggcagcgccgtcgtgctccccggagtggaggcggccgagcgcgccggggtgcccgccttcctggagacctccgcgccccgcaacctccccttctacgagcggctcggcttcaccgtcaccgccgacgtcgaggtgcccgaaggaccgcgcacctggtgcatgacccgcaagcccggtgcctga

SEQ ID NO: 6897 - DNA, 1350 bp, Artificial Sequence
  Synthetic Polynucloetide
atggccttaccagtgaccgccttgctcctgccgctggccttgctgctccacgccgccaggccgcagctccagctgcaagagtctggacctggcctggtcaagcctagcgagacactgagcctgacctgtaccgtgtccggcgatagcatcagcagcggcgattactactggggctggatcagacagcctcctggcaaaggactggaatggatcggccacatctactacagcggcgtgacctactacaaccccagcctgaagtccagagtgaccatcagcgtggacaccagccggaaccagttctccctgaagctgtctagcgtgacagccgccgataccgccgtgtactactgcaccagagaggacagcagcaactggcggagtagaggccagggaacactggtcacagttagctctctcgagggatctcccatcaagaccgatgtgattacaatggaccccaaggacaactgctccaaggacgccaacgataccctgctgctccagctgaccaacaccagcgcctactacatgtacttgttgctgctgctgaagtccgtggtgtacttcgccatcatcacatgctgcctgctgcggagaaccgccttctgctgcaacggcgagaagtctagggccaagcgatctggatctggagcaacaaacttctcactactcaaacaagcaggtgacgtggaggagaatcccgggcctactagtatggactggatttggcgcatccttttccttgtcggcgctgctaccggcgcgcattccttcgaagtgcaactggtggaaagcggaggcggacttgttcaaccaggcggaagcctgagactgagctgtgccgcttccggctttaatatcaaagacacatgcatcggatgggttcgccgcgctccagggaaagaagaggaactggttgccgacatctgtccctacaagggcagcacaagatatgccgactccgtgaaaggccggtttaccatctctgccgacacctctaagaatacggcctatctgcaaatgaactctctgcgggccgaagatacagccgtgtattactgcgccatcgtgtctgccagagatggctactataactattggggacagggaaccacagtcacagtgtcctctacgcgtggcagcgaagtgaaaaccgactccaccgaccacgtgaagcccaaagagacagagaacaccaagcagcccagcaagagctgccacaagcccaaggccatcgtgcacaccgagaaagtgaacatgatgagcctgaccgtgctgggcctgcggatgctgttcgccaaaaccgtggccgtgaacttcctgctgaccgccaagctgttcttcctc

SEQ ID NO: 6898 - DNA, 2079 bp, Artificial Sequence
  Synthetic Polynucloetide
atggccttaccagtgaccgccttgctcctgccgctggccttgctgctccacgccgccaggccgcagctccagctgcaagagtctggacctggcctggtcaagcctagcgagacactgagcctgacctgtaccgtgtccggcgatagcatcagcagcggcgattactactggggctggatcagacagcctcctggcaaaggactggaatggatcggccacatctactacagcggcgtgacctactacaaccccagcctgaagtccagagtgaccatcagcgtggacaccagccggaaccagttctccctgaagctgtctagcgtgacagccgccgataccgccgtgtactactgcaccagagaggacagcagcaactggcggagtagaggccagggaacactggtcacagttagctctctcgaggacaaaactcacacatgcccaccgtgcccagcacccatcaagaccgatgtgattacaatggaccccaaggacaactgctccaaggacgccaacgataccctgctgctccagctgaccaacaccagcgcctactacatgtacttgttgctgctgctgaagtccgtggtgtacttcgccatcatcacatgctgcctgctgcggagaaccgccttctgctgcaacggcgagaagtctagggccaagcgatctggatctggagcaacaaacttctcactactcaaacaagcaggtgacgtggaggagaatcccgggcctactagtatggactggatttggcgcatccttttccttgtcggcgctgctaccggcgcgcattccttcgaagtgcaactggtggaaagcggaggcggacttgttcaaccaggcggaagcctgagactgagctgtgccgcttccggctttaatatcaaagacacatgcatcggatgggttcgccgcgctccagggaaagaagaggaactggttgccgacatctgtccctacaagggcagcacaagatatgccgactccgtgaaaggccggtttaccatctctgccgacacctctaagaatacggcctatctgcaaatgaactctctgcgggccgaagatacagccgtgtattactgcgccatcgtgtctgccagagatggctactataactattggggacagggaaccacagtcacagtgtcctctacgcgtggcagcgaagtgaaaaccgactccaccgaccacgtgaagcccaaagagacagagaacaccaagcagcccagcaagagctgccacaagcccaaggccatcgtgcacaccgagaaagtgaacatgatgagcctgaccgtgctgggcctgcggatgctgttcgccaaaaccgtggccgtgaacttcctgctgaccgccaagctgttcttcctccgcgccaagagaagcggatctggcgtgaagcagaccctgaatttcgacctgctgaagctggctggcgacgtggaatccaacccaggcccttctagaggccatatgaccgagtacaagcccacggtgcgcctcgccacccgcgacgacgtccccagggccgtacgcaccctcgccgccgcgttcgccgactaccccgccacgcgccacaccgtcgatccggaccgccacatcgagcgggtcaccgagctgcaagaactcttcctcacgcgcgtcgggctcgacatcggcaaggtgtgggtcgcggacgacggcgccgcggtggcggtctggaccacgccggagagcgtcgaagcgggggcggtgttcgccgagatcggcccgcgcatggccgagttgagcggttcccggctggccgcgcagcaacagatggaaggcctcctggcgccgcaccggcccaaggagcccgcgtggttcctggccaccgtcggcgtctcgcccgaccaccagggcaagggtctgggcagcgccgtcgtgctccccggagtggaggcggccgagcgcgccggggtgcccgccttcctggagacctccgcgccccgcaacctccccttctacgagcggctcggcttcaccgtcaccgccgacgtcgaggtgcccgaaggaccgcgcacctggtgcatgacccgcaagcccggtgcctga

SEQ ID NO: 6899 - DNA, 2079 bp, Artificial Sequence
  Synthetic Polynucloetide
atggccttaccagtgaccgccttgctcctgccgctggccttgctgctccacgccgccaggccgcagctccagctgcaagagtctggacctggcctggtcaagcctagcgagacactgagcctgacctgtaccgtgtccggcgatagcatcagcagcggcgattactactggggctggatcagacagcctcctggcaaaggactggaatggatcggccacatctactacagcggcgtgacctactacaaccccagcctgaagtccagagtgaccatcagcgtggacaccagccggaaccagttctccctgaagctgtctagcgtgacagccgccgataccgccgtgtactactgcaccagagaggacagcagcaactggcggagtagaggccagggaacactggtcacagttagctctctcgagggatctcccatcaagaccgatgtgattacaatggaccccaaggacaactgctccaaggacgccaacgataccctgctgctccagctgaccaacaccagcgcctactacatgtacttgttgctgctgctgaagtccgtggtgtacttcgccatcatcacatgctgcctgctgcggagaaccgccttctgctgcaacggcgagaagtctagggccaagcgatctggatctggagcaacaaacttctcactactcaaacaagcaggtgacgtggaggagaatcccgggcctactagtatggactggatttggcgcatccttttccttgtcggcgctgctaccggcgcgcattccttcgaagtgcaactggtggaaagcggaggcggacttgttcaaccaggcggaagcctgagactgagctgtgccgcttccggctttaatatcaaagacacatgcatcggatgggttcgccgcgctccagggaaagaagaggaactggttgccgacatctgtccctacaagggcagcacaagatatgccgactccgtgaaaggccggtttaccatctctgccgacacctctaagaatacggcctatctgcaaatgaactctctgcgggccgaagatacagccgtgtattactgcgccatcgtgtctgccagagatggctactataactattggggacagggaaccacagtcacagtgtcctctacgcgtgataaaactcatacctgtccgccatgcccggcagaagtgaaaaccgactccaccgaccacgtgaagcccaaagagacagagaacaccaagcagcccagcaagagctgccacaagcccaaggccatcgtgcacaccgagaaagtgaacatgatgagcctgaccgtgctgggcctgcggatgctgttcgccaaaaccgtggccgtgaacttcctgctgaccgccaagctgttcttcctccgcgccaagagaagcggatctggcgtgaagcagaccctgaatttcgacctgctgaagctggctggcgacgtggaatccaacccaggcccttctagaggccatatgaccgagtacaagcccacggtgcgcctcgccacccgcgacgacgtccccagggccgtacgcaccctcgccgccgcgttcgccgactaccccgccacgcgccacaccgtcgatccggaccgccacatcgagcgggtcaccgagctgcaagaactcttcctcacgcgcgtcgggctcgacatcggcaaggtgtgggtcgcggacgacggcgccgcggtggcggtctggaccacgccggagagcgtcgaagcgggggcggtgttcgccgagatcggcccgcgcatggccgagttgagcggttcccggctggccgcgcagcaacagatggaaggcctcctggcgccgcaccggcccaaggagcccgcgtggttcctggccaccgtcggcgtctcgcccgaccaccagggcaagggtctgggcagcgccgtcgtgctccccggagtggaggcggccgagcgcgccggggtgcccgccttcctggagacctccgcgccccgcaacctccccttctacgagcggctcggcttcaccgtcaccgccgacgtcgaggtgcccgaaggaccgcgcacctggtgcatgacccgcaagcccggtgcctga

SEQ ID NO: 6900 - DNA, 2106 bp, Artificial Sequence
  Synthetic Polynucloetide
atggccttaccagtgaccgccttgctcctgccgctggccttgctgctccacgccgccaggccgcagctccagctgcaagagtctggacctggcctggtcaagcctagcgagacactgagcctgacctgtaccgtgtccggcgatagcatcagcagcggcgattactactggggctggatcagacagcctcctggcaaaggactggaatggatcggccacatctactacagcggcgtgacctactacaaccccagcctgaagtccagagtgaccatcagcgtggacaccagccggaaccagttctccctgaagctgtctagcgtgacagccgccgataccgccgtgtactactgcaccagagaggacagcagcaactggcggagtagaggccagggaacactggtcacagttagctctctcgaggacaaaactcacacatgcccaccgtgcccagcacccatcaagaccgatgtgattacaatggaccccaaggacaactgctccaaggacgccaacgataccctgctgctccagctgaccaacaccagcgcctactacatgtacttgttgctgctgctgaagtccgtggtgtacttcgccatcatcacatgctgcctgctgcggagaaccgccttctgctgcaacggcgagaagtctagggccaagcgatctggatctggagcaacaaacttctcactactcaaacaagcaggtgacgtggaggagaatcccgggcctactagtatggactggatttggcgcatccttttccttgtcggcgctgctaccggcgcgcattccttcgaagtgcaactggtggaaagcggaggcggacttgttcaaccaggcggaagcctgagactgagctgtgccgcttccggctttaatatcaaagacacatgcatcggatgggttcgccgcgctccagggaaagaagaggaactggttgccgacatctgtccctacaagggcagcacaagatatgccgactccgtgaaaggccggtttaccatctctgccgacacctctaagaatacggcctatctgcaaatgaactctctgcgggccgaagatacagccgtgtattactgcgccatcgtgtctgccagagatggctactataactattggggacagggaaccacagtcacagtgtcctctacgcgtgataaaactcatacctgtccgccatgcccggcagaagtgaaaaccgactccaccgaccacgtgaagcccaaagagacagagaacaccaagcagcccagcaagagctgccacaagcccaaggccatcgtgcacaccgagaaagtgaacatgatgagcctgaccgtgctgggcctgcggatgctgttcgccaaaaccgtggccgtgaacttcctgctgaccgccaagctgttcttcctccgcgccaagagaagcggatctggcgtgaagcagaccctgaatttcgacctgctgaagctggctggcgacgtggaatccaacccaggcccttctagaggccatatgaccgagtacaagcccacggtgcgcctcgccacccgcgacgacgtccccagggccgtacgcaccctcgccgccgcgttcgccgactaccccgccacgcgccacaccgtcgatccggaccgccacatcgagcgggtcaccgagctgcaagaactcttcctcacgcgcgtcgggctcgacatcggcaaggtgtgggtcgcggacgacggcgccgcggtggcggtctggaccacgccggagagcgtcgaagcgggggcggtgttcgccgagatcggcccgcgcatggccgagttgagcggttcccggctggccgcgcagcaacagatggaaggcctcctggcgccgcaccggcccaaggagcccgcgtggttcctggccaccgtcggcgtctcgcccgaccaccagggcaagggtctgggcagcgccgtcgtgctccccggagtggaggcggccgagcgcgccggggtgcccgccttcctggagacctccgcgccccgcaacctccccttctacgagcggctcggcttcaccgtcaccgccgacgtcgaggtgcccgaaggaccgcgcacctggtgcatgacccgcaagcccggtgcctga

SEQ ID NO: 6901 - DNA, 1404 bp, Artificial Sequence
  Synthetic Polynucloetide
atggccttaccagtgaccgccttgctcctgccgctggccttgctgctccacgccgccaggccgcagctccagctgcaagagtctggacctggcctggtcaagcctagcgagacactgagcctgacctgtaccgtgtccggcgatagcatcagcagcggcgattactactggggctggatcagacagcctcctggcaaaggactggaatggatcggccacatctactacagcggcgtgacctactacaaccccagcctgaagtccagagtgaccatcagcgtggacaccagccggaaccagttctccctgaagctgtctagcgtgacagccgccgataccgccgtgtactactgcaccagagaggacagcagcaactggcggagtagaggccagggaacactggtcacagttagctctctcgaggacaaaactcacacatgcccaccgtgcccagcacccatcaagaccgatgtgattacaatggaccccaaggacaactgctccaaggacgccaacgataccctgctgctccagctgaccaacaccagcgcctactacatgtacttgttgctgctgctgaagtccgtggtgtacttcgccatcatcacatgctgcctgctgcggagaaccgccttctgctgcaacggcgagaagtctagggccaagcgatctggatctggagcaacaaacttctcactactcaaacaagcaggtgacgtggaggagaatcccgggcctactagtatggactggatttggcgcatccttttccttgtcggcgctgctaccggcgcgcattccttcgaagtgcaactggtggaaagcggaggcggacttgttcaaccaggcggaagcctgagactgagctgtgccgcttccggctttaatatcaaagacacatgcatcggatgggttcgccgcgctccagggaaagaagaggaactggttgccgacatctgtccctacaagggcagcacaagatatgccgactccgtgaaaggccggtttaccatctctgccgacacctctaagaatacggcctatctgcaaatgaactctctgcgggccgaagatacagccgtgtattactgcgccatcgtgtctgccagagatggctactataactattggggacagggaaccacagtcacagtgtcctctacgcgtgataaaactcatacctgtccgccatgcccggcagaagtgaaaaccgactccaccgaccacgtgaagcccaaagagacagagaacaccaagcagcccagcaagagctgccacaagcccaaggccatcgtgcacaccgagaaagtgaacatgatgagcctgaccgtgctgggcctgcggatgctgttcgccaaaaccgtggccgtgaacttcctgctgaccgccaagctgttcttcctc

SEQ ID NO: 6902 - DNA, 2190 bp, Artificial Sequence
  Synthetic Polynucloetide
atggccttaccagtgaccgccttgctcctgccgctggccttgctgctccacgccgccaggccggaggtgcagctggttgaatctggcggaggactggttcagcctggcggatctctgagactgtcttgtgccgccagcggcttcaacatcaaggatacctgtatcggctgggttcgcagagcccctggcaaagaggaagaactggtcgccaaaatctgcaagtacagcggccacaccagatacgccgacagcgtgaagggcagattcaccatcagcgccgacaccagcaagaacaccgcctacctccagatgaacagcctgagagccgaggacaccgccgtgtactattgtgccgctgtgtccgtcagagatgggcactacaattactggggccagggcaccaccgtgaccgtttcttcactcgagagcggcggaggcggatctttcgaagtgcagctgcttgaaagtggcggcggactgattcagcctggcggatctctgagactgagctgtgccgccagcggcttcaccttttctagccacgccatgacctgggtccgacaggcacctggaaaagggcttgaatgggtgtccgccatcagcggctctggcgattacacacactacgccgacagcgtgaagggcagattcaccatcagcagagacaacagcaagaacaccgtgtacctccagatgaacagcctgagagccgaggacagcgccgtgtattattgcgccaaggatgaggatggcggcagcctgcttggacacagaggacaaggcaccctggtcaccgtttcttccacgcgtgagcagaaactgatctcggaagaggatctggcgaagcccaccacgacgccagcgccgcgaccaccaacaccggcgcccaccatcgcgtcgcagcccctgtccctgcgcccagaggcgtgccggccagcggcggggggcgcagtgcacacgagggggctggacttcgcctgtgacatctacatctgggcgcccttggccgggacttgtggggtccttctcctgtcactggttatcaccctttactgcaaacggggcagaaagaaactcctgtatatattcaaacaaccatttatgagaccagtacaaactactcaagaggaagatggctgtagctgccgatttccagaagaagaagaaggaggatgtgaactgagagtgaagttcagcaggagcgcagacgcccccgcgtaccagcagggccagaaccagctctataacgagctgaatctaggacgaagagaggagtacgatgttttggacaagagacgtggccgggaccctgagatggggggaaagccgagaaggaagaaccctcaggaaggcctgtacaatgaactgcagaaagataagatggcggaggcctacagtgagattgggatgaaaggcgagcgccggaggggcaaggggcacgatggcctttaccagggtctcagtacagccaccaaggacacctacgacgcccttcacatgcaggccctgccccctcgctctagtggctccggcgagggcagaggaagtctactaacctgcggagatgtggaagaaaatcctggcccacatatgaccgagtacaagcccacggtgcgcctcgccacccgcgacgacgtccccagggccgtacgcaccctcgccgccgcgttcgccgactaccccgccacgcgccacaccgtcgatccggaccgccacatcgagcgggtcaccgagctgcaagaactcttcctcacgcgcgtcgggctcgacatcggcaaggtgtgggtcgcggacgacggcgccgcggtggcggtctggaccacgccggagagcgtcgaagcgggggcggtgttcgccgagatcggcccgcgcatggccgagttgagcggttcccggctggccgcgcagcaacagatggaaggcctcctggcgccgcaccggcccaaggagcccgcgtggttcctggccaccgtcggcgtctcgcccgaccaccagggcaagggtctgggcagcgccgtcgtgctccccggagtggaggcggccgagcgcgccggggtgcccgccttcctggagacctccgcgccccgcaacctccccttctacgagcggctcggcttcaccgtcaccgccgacgtcgaggtgcccgaaggaccgcgcacctggtgcatgacccgcaagcccggtgcctga

SEQ ID NO: 6903 - DNA, 2172 bp, Artificial Sequence
  Synthetic Polynucloetide
atggccttaccagtgaccgccttgctcctgccgctggccttgctgctccacgccgccaggccggaggtgcagctggttgaatctggcggaggactggttcagcctggcggatctctgagactgtcttgtgccgccagcggcttcaacatcaaggatacctgtatcggctgggttcgcagagcccctggcaaagaggaagaactggtcgccaaaatctgcaagtacagcggccacaccagatacgccgacagcgtgaagggcagattcaccatcagcgccgacaccagcaagaacaccgcctacctccagatgaacagcctgagagccgaggacaccgccgtgtactattgtgccgctgtgtccgtcagagatgggcactacaattactggggccagggcaccaccgtgaccgtttcttcactcgagagcggcggaggcggatctttcgaagtgcagctgcttgaaagtggcggcggactgattcagcctggcggatctctgagactgagctgtgccgccagcggcttcaccttttctagccacgccatgacctgggtccgacaggcacctggaaaagggcttgaatgggtgtccgccatcagcggctctggcgattacacacactacgccgacagcgtgaagggcagattcaccatcagcagagacaacagcaagaacaccgtgtacctccagatgaacagcctgagagccgaggacagcgccgtgtattattgcgccaaggatgaggatggcggcagcctgcttggacacagaggacaaggcaccctggtcaccgtttcttccacgcgtgagcagaaactgatctcggaagaggatctgaaaattgaagttatgtatcctcctccttacctagacaatgagaagagcaatggaaccattatccatgtgaaagggaaacacctttgtccaagtcccctatttcccggaccttctaagcccttttgggtgctggtggtggttgggggagtcctggcttgctatagcttgctagtaacagtggcctttattattttctgggtgaggagtaagaggagcaggctcctgcacagtgactacatgaacatgactccacgccgccccggacccacccgcaagcattaccagccctatgccccaccacgcgacttcgcagcctatcgctccagagtgaagttcagcaggagcgcagacgcccccgcgtaccagcagggccagaaccagctctataacgagctcaatctaggacgaagagaggagtacgatgttttggacaagagacgtggccgggaccctgagatggggggaaagccgagaaggaagaaccctcaggaaggcctgtacaatgaactgcagaaagataagatggcggaggcctacagtgagattgggatgaaaggcgagcgccggaggggcaaggggcacgatggcctttaccagggtctcagtacagccaccaaggacacctacgacgcccttcacatgcaggccctgccccctcgctctagtggctccggcgagggcagaggaagtctactaacctgcggagatgtggaagaaaatcctggcccacatatgaccgagtacaagcccacggtgcgcctcgccacccgcgacgacgtccccagggccgtacgcaccctcgccgccgcgttcgccgactaccccgccacgcgccacaccgtcgatccggaccgccacatcgagcgggtcaccgagctgcaagaactcttcctcacgcgcgtcgggctcgacatcggcaaggtgtgggtcgcggacgacggcgccgcggtggcggtctggaccacgccggagagcgtcgaagcgggggcggtgttcgccgagatcggcccgcgcatggccgagttgagcggttcccggctggccgcgcagcaacagatggaaggcctcctggcgccgcaccggcccaaggagcccgcgtggttcctggccaccgtcggcgtctcgcccgaccaccagggcaagggtctgggcagcgccgtcgtgctccccggagtggaggcggccgagcgcgccggggtgcccgccttcctggagacctccgcgccccgcaacctccccttctacgagcggctcggcttcaccgtcaccgccgacgtcgaggtgcccgaaggaccgcgcacctggtgcatgacccgcaagcccggtgcctga

SEQ ID NO: 6904 - DNA, 1500 bp, Artificial Sequence
  Synthetic Polynucloetide
atggccttaccagtgaccgccttgctcctgccgctggccttgctgctccacgccgccaggccggaggtgcagctggttgaatctggcggaggactggttcagcctggcggatctctgagactgtcttgtgccgccagcggcttcaacatcaaggatacctgtatcggctgggttcgcagagcccctggcaaagaggaagaactggtcgccaaaatctgcaagtacagcggccacaccagatacgccgacagcgtgaagggcagattcaccatcagcgccgacaccagcaagaacaccgcctacctccagatgaacagcctgagagccgaggacaccgccgtgtactattgtgccgctgtgtccgtcagagatgggcactacaattactggggccagggcaccaccgtgaccgtttcttcactcgagagcggcggaggcggatctttcgaagtgcagctgcttgaaagtggcggcggactgattcagcctggcggatctctgagactgagctgtgccgccagcggcttcaccttttctagccacgccatgacctgggtccgacaggcacctggaaaagggcttgaatgggtgtccgccatcagcggctctggcgattacacacactacgccgacagcgtgaagggcagattcaccatcagcagagacaacagcaagaacaccgtgtacctccagatgaacagcctgagagccgaggacagcgccgtgtattattgcgccaaggatgaggatggcggcagcctgcttggacacagaggacaaggcaccctggtcaccgtttcttccacgcgtgagcagaaactgatctcggaagaggatctgaaaattgaagttatgtatcctcctccttacctagacaatgagaagagcaatggaaccattatccatgtgaaagggaaacacctttgtccaagtcccctatttcccggaccttctaagcccttttgggtgctggtggtggttgggggagtcctggcttgctatagcttgctagtaacagtggcctttattattttctgggtgaggagtaagaggagcaggctcctgcacagtgactacatgaacatgactccacgccgccccggacccacccgcaagcattaccagccctatgccccaccacgcgacttcgcagcctatcgctccagagtgaagttcagcaggagcgcagacgcccccgcgtaccagcagggccagaaccagctctataacgagctcaatctaggacgaagagaggagtacgatgttttggacaagagacgtggccgggaccctgagatggggggaaagccgagaaggaagaaccctcaggaaggcctgtacaatgaactgcagaaagataagatggcggaggcctacagtgagattgggatgaaaggcgagcgccggaggggcaaggggcacgatggcctttaccagggtctcagtacagccaccaaggacacctacgacgcccttcacatgcaggccctgccccctcgc

SEQ ID NO: 6905 - DNA, 1521 bp, Artificial Sequence
  Synthetic Polynucloetide
atggccttaccagtgaccgccttgctcctgccgctggccttgctgctccacgccgccaggccggaggtgcagctggttgaatctggcggaggactggttcagcctggcggatctctgagactgtcttgtgccgccagcggcttcaacatcaaggatacctgtatcggctgggttcgcagagcccctggcaaagaggaagaactggtcgccaaaatctgcaagtacagcggccacaccagatacgccgacagcgtgaagggcagattcaccatcagcgccgacaccagcaagaacaccgcctacctccagatgaacagcctgagagccgaggacaccgccgtgtactattgtgccgctgtgtccgtcagagatgggcactacaattactggggccagggcaccaccgtgaccgtttcttcactcgagagcggcggaggcggatctttcgaagtgcagctgcttgaaagtggcggcggactgattcagcctggcggatctctgagactgagctgtgccgccagcggcttcaccttttctagccacgccatgacctgggtccgacaggcacctggaaaagggcttgaatgggtgtccgccatcagcggctctggcgattacacacactacgccgacagcgtgaagggcagattcaccatcagcagagacaacagcaagaacaccgtgtacctccagatgaacagcctgagagccgaggacagcgccgtgtattattgcgccaaggatgaggatggcggcagcctgcttggacacagaggacaaggcaccctggtcaccgtttcttccacgcgtgagcagaaactgatctcggaagaggatctggcgaagcccaccacgacgccagcgccgcgaccaccaacaccggcgcccaccatcgcgtcgcagcccctgtccctgcgcccagaggcgtgccggccagcggcggggggcgcagtgcacacgagggggctggacttcgcctgtgacatctacatctgggcgcccttggccgggacttgtggggtccttctcctgtcactggttatcaccctttactgcaaacggggcagaaagaaactcctgtatatattcaaacaaccatttatgagaccagtacaaactactcaagaggaagatggctgtagctgccgatttccagaagaagaagaaggaggatgtgaactgagagtgaagttcagcaggagcgcagacgcccccgcgtaccagcagggccagaaccagctctataacgagctgaatctaggacgaagagaggagtacgatgttttggacaagagacgtggccgggaccctgagatggggggaaagccgagaaggaagaaccctcaggaaggcctgtacaatgaactgcagaaagataagatggcggaggcctacagtgagattgggatgaaaggcgagcgccggaggggcaaggggcacgatggcctttaccagggtctcagtacagccaccaaggacacctacgacgcccttcacatgcaggccctgccccctcgctga

SEQ ID NO: 6906 - DNA, 1524 bp, Artificial Sequence
  Synthetic Polynucloetide
atggccttaccagtgaccgccttgctcctgccgctggccttgctgctccacgccgccaggccggaagtgcagctgcttgaaagtggcggcggactgattcagcctggcggatctctgagactgagctgtgccgccagcggcttcaccttttctagccacgccatgacctgggtccgacaggcacctggaaaagggcttgaatgggtgtccgccatcagcggctctggcgattacacacactacgccgacagcgtgaagggcagattcaccatcagcagagacaacagcaagaacaccgtgtacctccagatgaacagcctgagagccgaggacagcgccgtgtattattgcgccaaggatgaggatggcggcagcctgcttggacacagaggacaaggcaccctggtcaccgtttcttccctcgagagcggcggaggcggatctttcgaagaggtgcagctggttgaatctggcggaggactggttcagcctggcggatctctgagactgtcttgtgccgccagcggcttcaacatcaaggatacctgtatcggctgggttcgcagagcccctggcaaagaggaagaactggtcgccaaaatctgcaagtacagcggccacaccagatacgccgacagcgtgaagggcagattcaccatcagcgccgacaccagcaagaacaccgcctacctccagatgaacagcctgagagccgaggacaccgccgtgtactattgtgccgctgtgtccgtcagagatgggcactacaattactggggccagggcaccaccgtgaccgtttcttcaacgcgtgagcagaaactgatctcggaagaggatctggcgaagcccaccacgacgccagcgccgcgaccaccaacaccggcgcccaccatcgcgtcgcagcccctgtccctgcgcccagaggcgtgccggccagcggcggggggcgcagtgcacacgagggggctggacttcgcctgtgacatctacatctgggcgcccttggccgggacttgtggggtccttctcctgtcactggttatcaccctttactgcaaacggggcagaaagaaactcctgtatatattcaaacaaccatttatgagaccagtacaaactactcaagaggaagatggctgtagctgccgatttccagaagaagaagaaggaggatgtgaactgagagtgaagttcagcaggagcgcagacgcccccgcgtaccagcagggccagaaccagctctataacgagctgaatctaggacgaagagaggagtacgatgttttggacaagagacgtggccgggaccctgagatggggggaaagccgagaaggaagaaccctcaggaaggcctgtacaatgaactgcagaaagataagatggcggaggcctacagtgagattgggatgaaaggcgagcgccggaggggcaaggggcacgatggcctttaccagggtctcagtacagccaccaaggacacctacgacgcccttcacatgcaggccctgccccctcgctga

SEQ ID NO: 6907 - DNA, 2760 bp, Artificial Sequence
  Synthetic Polynucloetide
atggccttaccagtgaccgccttgctcctgccgctggccttgctgctccacgccgccaggccggaggtgcagctggttgaatctggcggaggactggttcagcctggcggatctctgagactgtcttgtgccgccagcggcttcaacatcaaggatacctgtatcggctgggttcgcagagcccctggcaaagaggaagaactggtcgccaaaatctgcaagtacagcggccacaccagatacgccgacagcgtgaagggcagattcaccatcagcgccgacaccagcaagaacaccgcctacctccagatgaacagcctgagagccgaggacaccgccgtgtactattgtgccgctgtgtccgtcagagatgggcactacaattactggggccagggcaccaccgtgaccgtttcttcactcgagagcggcggaggcggatctttcgaagtgcagctgcttgaaagtggcggcggactgattcagcctggcggatctctgagactgagctgtgccgccagcggcttcaccttttctagccacgccatgacctgggtccgacaggcacctggaaaagggcttgaatgggtgtccgccatcagcggctctggcgattacacacactacgccgacagcgtgaagggcagattcaccatcagcagagacaacagcaagaacaccgtgtacctccagatgaacagcctgagagccgaggacagcgccgtgtattattgcgccaaggatgaggatggcggcagcctgcttggacacagaggacaaggcaccctggtcaccgtttcttccacgcgtgagcagaaactgatctcggaagaggatctggcgaagcccaccacgacgccagcgccgcgaccaccaacaccggcgcccaccatcgcgtcgcagcccctgtccctgcgcccagaggcgtgccggccagcggcggggggcgcagtgcacacgagggggctggacttcgcctgtgacatctacatctgggcgcccttggccgggacttgtggggtccttctcctgtcactggttatcaccctttactgcgggcgcgccagagtgaagttcagcaggagcgcagacgcccccgcgtaccagcagggccagaaccagctctataacgagctgaatctaggacgaagagaggagtacgatgttttggacaagagacgtggccgggaccctgagatggggggaaagccgagaaggaagaaccctcaggaaggcctgtacaatgaactgcagaaagataagatggcggaggcctacagtgagattgggatgaaaggcgagcgccggaggggcaaggggcacgatggcctttaccagggtctcagtacagccaccaaggacacctacgacgcccttcacatgcaggccctgccccctcgctctagaggatctggagcaacaaacttctcactactcaaacaagcaggtgacgtggaggagaatcccgggcctgggatccacatggccacttacgaggttctctgtgaggtggcgcggaaactgggcacggatgacagggaagtggtattgttcctcctaaacgtgttcatacctcaacccacactggcccaattaattggagctcttagagctttaaaggaggagggcaggttaacgtttcccctgttagcggaatgtctgtttcgtgcaggtcgcagagacctcttgcgcgacctgcttcacttagacccgcgttttttagagcgccacctagcgggcacaatgagttatttcagcccttatcagctcactgttctccacgtagacggggagctgtgtgcgagggatattaggtctttgatatttttaagcaaggacactatagggtctcgcagcacaccacagacattcttacactgggtgtactgtatggaaaacttagacctactgggtcccactgacgtggatgccctaatgtcaatgcttagatctttgtcaagagtagacctacagcgccaagtgcaaaccctaatgggccttcacctttccggcccatcacactcccaacactatcgccatacaccactcgagaccgatttctacgactacaaggacgacgatgacaagactagtggctccggcgagggcagaggaagtctactaacctgcggagatgtggaagaaaatcctggcccacatatgaccgagtacaagcccacggtgcgcctcgccacccgcgacgacgtccccagggccgtacgcaccctcgccgccgcgttcgccgactaccccgccacgcgccacaccgtcgatccggaccgccacatcgagcgggtcaccgagctgcaagaactcttcctcacgcgcgtcgggctcgacatcggcaaggtgtgggtcgcggacgacggcgccgcggtggcggtctggaccacgccggagagcgtcgaagcgggggcggtgttcgccgagatcggcccgcgcatggccgagttgagcggttcccggctggccgcgcagcaacagatggaaggcctcctggcgccgcaccggcccaaggagcccgcgtggttcctggccaccgtcggcgtctcgcccgaccaccagggcaagggtctgggcagcgccgtcgtgctccccggagtggaggcggccgagcgcgccggggtgcccgccttcctggagacctccgcgccccgcaacctccccttctacgagcggctcggcttcaccgtcaccgccgacgtcgaggtgcccgaaggaccgcgcacctggtgcatgacccgcaagcccggtgcctga

SEQ ID NO: 6908 - DNA, 2595 bp, Artificial Sequence
  Synthetic Polynucloetide
atggccttaccagtgaccgccttgctcctgccgctggccttgctgctccacgccgccaggccggaggtgcagctggttgaatctggcggaggactggttcagcctggcggatctctgagactgtcttgtgccgccagcggcttcaacatcaaggatacctgtatcggctgggttcgcagagcccctggcaaagaggaagaactggtcgccaaaatctgcaagtacagcggccacaccagatacgccgacagcgtgaagggcagattcaccatcagcgccgacaccagcaagaacaccgcctacctccagatgaacagcctgagagccgaggacaccgccgtgtactattgtgccgctgtgtccgtcagagatgggcactacaattactggggccagggcaccaccgtgaccgtttcttcactcgagatccagaaccctgatcctgccgtgtaccagctgcgggatagcaagagcagcgacaagagcgtgtgtctgttcaccgacttcgacagccagaccaacgtgtcccagagcaaggactccgacgtgtacatcaccgataagtgcgtgctggacatgcggagcatggacttcaagagcaactccgccgtggcctggtccaacaagtccgatttcgcctgcgccaacgccttcaacaacagcattatccccgaggacacattcttcccaagcagcgacgtgccctgcgacgtgaagctggtggaaaagagcttcgagacagacaccaacctgaacttccagaacctgagcgtgatcggcttcagaatcctgctgctgaaagtggccggctttaacctgctgatgaccctgcggctgtggtccagccgcgccaagagaagcggatctggcgtgaagcagaccctgaatttcgacctgctgaagctggctggcgacgtggaatccaacccaggccctactagtatggactggatttggcgcatccttttccttgtcggcgctgctaccggcgcgcattccttcgaagtgcagctgcttgaaagtggcggcggactgattcagcctggcggatctctgagactgagctgtgccgccagcggcttcaccttttctagccacgccatgacctgggtccgacaggcacctggaaaagggcttgaatgggtgtccgccatcagcggctctggcgattacacacactacgccgacagcgtgaagggcagattcaccatcagcagagacaacagcaagaacaccgtgtacctccagatgaacagcctgagagccgaggacagcgccgtgtattattgcgccaaggatgaggatggcggcagcctgcttggacacagaggacaaggcaccctggtcaccgtttcttccacgcgtgaggacctgaagaacgtgttcccacctgaggtggccgtgttcgagcctagcaaggccgagatcgcccacacccagaaagccaccctcgtgtgcctggctaccggcttctaccccgaccatgtggaactgtcttggtgggtcaacggcaaagaggtgcacagcggcgtgtgtaccgacccccagccactgaaagaacagcccgccctgaacgacagccggtactgcctgagcagcagactgagagtgtccgccaccttctggcagaacccccggaaccacttcagatgccaggtgcagttctacggcctgagcgagaacgacgagtggacccaggacagagccaagcccgtgacccagatcgtgtctgccgaagcctggggcagagccgattgcggcatcaccagcgccagctaccaccagggcgtgctgagcgccaccatcctgtacgagatcctgctgggcaaggccaccctgtacgccgtgctggtgtctgccctggtgctgatggctatggtcaagcggaaggacagccggggaagggccaagcgatctggatctggagcaacaaacttctcactactcaaacaagcaggtgacgtggaggagaatcccgggccttctagaggccatatgaccgagtacaagcccacggtgcgcctcgccacccgcgacgacgtccccagggccgtacgcaccctcgccgccgcgttcgccgactaccccgccacgcgccacaccgtcgatccggaccgccacatcgagcgggtcaccgagctgcaagaactcttcctcacgcgcgtcgggctcgacatcggcaaggtgtgggtcgcggacgacggcgccgcggtggcggtctggaccacgccggagagcgtcgaagcgggggcggtgttcgccgagatcggcccgcgcatggccgagttgagcggttcccggctggccgcgcagcaacagatggaaggcctcctggcgccgcaccggcccaaggagcccgcgtggttcctggccaccgtcggcgtctcgcccgaccaccagggcaagggtctgggcagcgccgtcgtgctccccggagtggaggcggccgagcgcgccggggtgcccgccttcctggagacctccgcgccccgcaacctccccttctacgagcggctcggcttcaccgtcaccgccgacgtcgaggtgcccgaaggaccgcgcacctggtgcatgacccgcaagcccggtgcctga

SEQ ID NO: 6909 - DNA, 2592 bp, Artificial Sequence
  Synthetic Polynucloetide
atggccttaccagtgaccgccttgctcctgccgctggccttgctgctccacgccgccaggccggaggtgcagctggttgaatctggcggaggactggttcagcctggcggatctctgagactgtcttgtgccgccagcggcttcaacatcaaggatacctgtatcggctgggttcgcagagcccctggcaaagaggaagaactggtcgccaaaatctgcaagtacagcggccacaccagatacgccgacagcgtgaagggcagattcaccatcagcgccgacaccagcaagaacaccgcctacctccagatgaacagcctgagagccgaggacaccgccgtgtactattgtgccgctgtgtccgtcagagatgggcactacaattactggggccagggcaccaccgtgaccgtttcttcactcgaggacctgaagaacgtgttcccacctgaggtggccgtgttcgagcctagcaaggccgagatcgcccacacccagaaagccaccctcgtgtgcctggctaccggcttctaccccgaccatgtggaactgtcttggtgggtcaacggcaaagaggtgcacagcggcgtgtgtaccgacccccagccactgaaagaacagcccgccctgaacgacagccggtactgcctgagcagcagactgagagtgtccgccaccttctggcagaacccccggaaccacttcagatgccaggtgcagttctacggcctgagcgagaacgacgagtggacccaggacagagccaagcccgtgacccagatcgtgtctgccgaagcctggggcagagccgattgcggcatcaccagcgccagctaccaccagggcgtgctgagcgccaccatcctgtacgagatcctgctgggcaaggccaccctgtacgccgtgctggtgtctgccctggtgctgatggctatggtcaagcggaaggacagccggggaagggccaagcgatctggatctggagcaacaaacttctcactactcaaacaagcaggtgacgtggaggagaatcccgggcctactagtatggactggatttggcgcatccttttccttgtcggcgctgctaccggcgcgcattccttcgaagtgcagctgcttgaaagtggcggcggactgattcagcctggcggatctctgagactgagctgtgccgccagcggcttcaccttttctagccacgccatgacctgggtccgacaggcacctggaaaagggcttgaatgggtgtccgccatcagcggctctggcgattacacacactacgccgacagcgtgaagggcagattcaccatcagcagagacaacagcaagaacaccgtgtacctccagatgaacagcctgagagccgaggacagcgccgtgtattattgcgccaaggatgaggatggcggcagcctgcttggacacagaggacaaggcaccctggtcaccgtttcttccacgcgtatccagaaccctgatcctgccgtgtaccagctgcgggatagcaagagcagcgacaagagcgtgtgtctgttcaccgacttcgacagccagaccaacgtgtcccagagcaaggactccgacgtgtacatcaccgataagtgcgtgctggacatgcggagcatggacttcaagagcaactccgccgtggcctggtccaacaagtccgatttcgcctgcgccaacgccttcaacaacagcattatccccgaggacacattcttcccaagcagcgacgtgccctgcgacgtgaagctggtggaaaagagcttcgagacagacaccaacctgaacttccagaacctgagcgtgatcggcttcagaatcctgctgctgaaagtggccggctttaacctgctgatgaccctgcggctgtggtccagccgcgccaagagaagcggatctggcgtgaagcagaccctgaatttcgacctgctgaagctggctggcgacgtggaatccaacccaggcccttctagaggccatatgaccgagtacaagcccacggtgcgcctcgccacccgcgacgacgtccccagggccgtacgcaccctcgccgccgcgttcgccgactaccccgccacgcgccacaccgtcgatccggaccgccacatcgagcgggtcaccgagctgcaagaactcttcctcacgcgcgtcgggctcgacatcggcaaggtgtgggtcgcggacgacggcgccgcggtggcggtctggaccacgccggagagcgtcgaagcgggggcggtgttcgccgagatcggcccgcgcatggccgagttgagcggttcccggctggccgcgcagcaacagatggaaggcctcctggcgccgcaccggcccaaggagcccgcgtggttcctggccaccgtcggcgtctcgcccgaccaccagggcaagggtctgggcagcgccgtcgtgctccccggagtggaggcggccgagcgcgccggggtgcccgccttcctggagacctccgcgccccgcaacctccccttctacgagcggctcggcttcaccgtcaccgccgacgtcgaggtgcccgaaggaccgcgcacctggtgcatgacccgcaagcccggtgcctga

SEQ ID NO: 6910 - DNA, 1890 bp, Artificial Sequence
  Synthetic Polynucloetide
atggccttaccagtgaccgccttgctcctgccgctggccttgctgctccacgccgccaggccggaggtgcagctggttgaatctggcggaggactggttcagcctggcggatctctgagactgtcttgtgccgccagcggcttcaacatcaaggatacctgtatcggctgggttcgcagagcccctggcaaagaggaagaactggtcgccaaaatctgcaagtacagcggccacaccagatacgccgacagcgtgaagggcagattcaccatcagcgccgacaccagcaagaacaccgcctacctccagatgaacagcctgagagccgaggacaccgccgtgtactattgtgccgctgtgtccgtcagagatgggcactacaattactggggccagggcaccaccgtgaccgtttcttcactcgaggacctgaagaacgtgttcccacctgaggtggccgtgttcgagcctagcgaggccgagatcagccacacccagaaagccaccctcgtgtgcctggctaccggcttctaccccgaccatgtggaactgtcttggtgggtcaacggcaaagaggtgcacagcggcgtgtgtaccgacccccagccactgaaagaacagcccgccctgaacgacagccggtactgcctgagcagcagactgagagtgtccgccaccttctggcagaacccccggaaccacttcagatgccaggtgcagttctacggcctgagcgagaacgacgagtggacccaggacagagccaagcccgtgacccagatcgtgtctgccgaagcctggggcagagccgattgcggctttaccagcgagagctaccagcagggcgtgctgagcgccaccatcctgtacgagatcctgctgggcaaggccaccctgtacgccgtgctggtgtctgccctggtgctgatggctatggtcaagcggaaggacagccggggaagggccaagcgatctggatctggagcaacaaacttctcactactcaaacaagcaggtgacgtggaggagaatcccgggcctactagtatggactggatttggcgcatccttttccttgtcggcgctgctaccggcgcgcattccttcgaagtgcagctgcttgaaagtggcggcggactgattcagcctggcggatctctgagactgagctgtgccgccagcggcttcaccttttctagccacgccatgacctgggtccgacaggcacctggaaaagggcttgaatgggtgtccgccatcagcggctctggcgattacacacactacgccgacagcgtgaagggcagattcaccatcagcagagacaacagcaagaacaccgtgtacctccagatgaacagcctgagagccgaggacagcgccgtgtattattgcgccaaggatgaggatggcggcagcctgcttggacacagaggacaaggcaccctggtcaccgtttcttccacgcgtatccagaaccctgatcctgccgtgtaccagctgcgggatagcaagagcagcgacaagagcgtgtgtctgttcaccgacttcgacagccagaccaacgtgtcccagagcaaggactccgacgtgtacatcaccgataagtgcgtgctggacatgcggagcatggacttcaagagcaactccgccgtggcctggtccaacaagtccgatttcgcctgcgccaacgccttcaacaacagcattatccccgaggacacattcttcccaagccccgagagcagctgcgacgtgaagctggtggaaaagagcttcgagacagacaccaacctgaacttccagaacctgagcgtgatcggcttcagaatcctgctgctgaaagtggccggctttaacctgctgatgaccctgcggctgtggtccagc

SEQ ID NO: 6911 - DNA, 2565 bp, Artificial Sequence
  Synthetic Polynucloetide
atggccttaccagtgaccgccttgctcctgccgctggccttgctgctccacgccgccaggccggaggtgcagctggttgaatctggcggaggactggttcagcctggcggatctctgagactgtcttgtgccgccagcggcttcaacatcaaggatacctgtatcggctgggttcgcagagcccctggcaaagaggaagaactggtcgccaaaatctgcaagtacagcggccacaccagatacgccgacagcgtgaagggcagattcaccatcagcgccgacaccagcaagaacaccgcctacctccagatgaacagcctgagagccgaggacaccgccgtgtactattgtgccgctgtgtccgtcagagatgggcactacaattactggggccagggcaccaccgtgaccgtttcttcactcgaggacctgaagaacgtgttcccacctgaggtggccgtgttcgagcctagcgaggccgagatcagccacacccagaaagccaccctcgtgtgcctggctaccggcttctaccccgaccatgtggaactgtcttggtgggtcaacggcaaagaggtgcacagcggcgtgtgtaccgacccccagccactgaaagaacagcccgccctgaacgacagccggtactgcctgagcagcagactgagagtgtccgccaccttctggcagaacccccggaaccacttcagatgccaggtgcagttctacggcctgagcgagaacgacgagtggacccaggacagagccaagcccgtgacccagatcgtgtctgccgaagcctggggcagagccgattgcggctttaccagcgagagctaccagcagggcgtgctgagcgccaccatcctgtacgagatcctgctgggcaaggccaccctgtacgccgtgctggtgtctgccctggtgctgatggctatggtcaagcggaaggacagccggggaagggccaagcgatctggatctggagcaacaaacttctcactactcaaacaagcaggtgacgtggaggagaatcccgggcctactagtatggactggatttggcgcatccttttccttgtcggcgctgctaccggcgcgcattccttcgaagtgcagctgcttgaaagtggcggcggactgattcagcctggcggatctctgagactgagctgtgccgccagcggcttcaccttttctagccacgccatgacctgggtccgacaggcacctggaaaagggcttgaatgggtgtccgccatcagcggctctggcgattacacacactacgccgacagcgtgaagggcagattcaccatcagcagagacaacagcaagaacaccgtgtacctccagatgaacagcctgagagccgaggacagcgccgtgtattattgcgccaaggatgaggatggcggcagcctgcttggacacagaggacaaggcaccctggtcaccgtttcttccacgcgtatccagaaccctgatcctgccgtgtaccagctgcgggatagcaagagcagcgacaagagcgtgtgtctgttcaccgacttcgacagccagaccaacgtgtcccagagcaaggactccgacgtgtacatcaccgataagtgcgtgctggacatgcggagcatggacttcaagagcaactccgccgtggcctggtccaacaagtccgatttcgcctgcgccaacgccttcaacaacagcattatccccgaggacacattcttcccaagccccgagagcagctgcgacgtgaagctggtggaaaagagcttcgagacagacaccaacctgaacttccagaacctgagcgtgatcggcttcagaatcctgctgctgaaagtggccggctttaacctgctgatgaccctgcggctgtggtccagccgcgccaagagaagcggatctggcgtgaagcagaccctgaatttcgacctgctgaagctggctggcgacgtggaatccaacccaggcccttctagaggcgggatccacaccatggctacctacgaggtgctgtgcgaggtggcaagaaagctgggcaccgacgacagagaagtggtgctgttcctgctgaacgtgttcatccctcagcctacactggcccagctgatcggtgcactgagagccctgaaagaggaaggccggctgacctttcctctgctggccgaatgcctgttcagagccggaagaagggatctgctgcgggacctgctgcatctggaccccagatttctggaaagacacctggccggcaccatgagctacttcagcccttaccagctgaccgtgctgcacgttgacggcgaactgtgcgccagagatattcggagcctgatcttcctgagcaaggacaccatcggcagccggtctacccctcagacatttctgcactgggtgtactgcatggaaaacctggacctgctcggccccacagatgtggatgccctgatgtccatgctgagaagcctgagcagagtggacctccagagacaggtgcagacactgatgggactgcacctgagcggacctagccacagccagcactacagacacacccct

SEQ ID NO: 6912 - DNA, 1902 bp, Artificial Sequence
  Synthetic Polynucloetide
atggccttaccagtgaccgccttgctcctgccgctggccttgctgctccacgccgccaggccggaggtgcagctggttgaatctggcggaggactggttcagcctggcggatctctgagactgtcttgtgccgccagcggcttcaacatcaaggatacctgtatcggctgggttcgcagagcccctggcaaagaggaagaactggtcgccaaaatctgcaagtacagcggccacaccagatacgccgacagcgtgaagggcagattcaccatcagcgccgacaccagcaagaacaccgcctacctccagatgaacagcctgagagccgaggacaccgccgtgtactattgtgccgctgtgtccgtcagagatgggcactacaattactggggccagggcaccaccgtgaccgtttcttcactcgagatccagaaccctgatcctgccgtgtaccagctgcgggatagcaagagcagcgacaagagcgtgtgtctgttcaccgacttcgacagccagaccaacgtgtcccagagcaaggactccgacgtgtacatcaccgataagtgcgtgctggacatgcggagcatggacttcaagagcaactccgccgtggcctggtccaacaagtccgatttcgcctgcgccaacgccttcaacaacagcattatccccgaggacacattcttcccaagccccgagagcagctgcgacgtgaagctggtggaaaagagcttcgagacagacaccaacctgaacttccagaacctgagcgtgatcggcttcagaatcctgctgctgaaagtggccggctttaacctgctgatgaccctgcggctgtggtccagccgcgccaagagaagcggatctggcgtgaagcagaccctgaatttcgacctgctgaagctggctggcgacgtggaatccaacccaggccctactagtatggactggatttggcgcatccttttccttgtcggcgctgctaccggcgcgcattccttcgaagtgcagctgcttgaaagtggcggcggactgattcagcctggcggatctctgagactgagctgtgccgccagcggcttcaccttttctagccacgccatgacctgggtccgacaggcacctggaaaagggcttgaatgggtgtccgccatcagcggctctggcgattacacacactacgccgacagcgtgaagggcagattcaccatcagcagagacaacagcaagaacaccgtgtacctccagatgaacagcctgagagccgaggacagcgccgtgtattattgcgccaaggatgaggatggcggcagcctgcttggacacagaggacaaggcaccctggtcaccgtttcttccacgcgtgaggacctgaagaacgtgttcccacctgaggtggccgtgttcgagcctagcgaggccgagatcagccacacccagaaagccaccctcgtgtgcctggctaccggcttctaccccgaccatgtggaactgtcttggtgggtcaacggcaaagaggtgcacagcggcgtgtgtaccgacccccagccactgaaagaacagcccgccctgaacgacagccggtactgcctgagcagcagactgagagtgtccgccaccttctggcagaacccccggaaccacttcagatgccaggtgcagttctacggcctgagcgagaacgacgagtggacccaggacagagccaagcccgtgacccagatcgtgtctgccgaagcctggggcagagccgattgcggctttaccagcgagagctaccagcagggcgtgctgagcgccaccatcctgtacgagatcctgctgggcaaggccaccctgtacgccgtgctggtgtctgccctggtgctgatggctatggtcaagcggaaggacagccgggga

SEQ ID NO: 6913 - DNA, 2568 bp, Artificial Sequence
  Synthetic Polynucloetide
atggccttaccagtgaccgccttgctcctgccgctggccttgctgctccacgccgccaggccggaggtgcagctggttgaatctggcggaggactggttcagcctggcggatctctgagactgtcttgtgccgccagcggcttcaacatcaaggatacctgtatcggctgggttcgcagagcccctggcaaagaggaagaactggtcgccaaaatctgcaagtacagcggccacaccagatacgccgacagcgtgaagggcagattcaccatcagcgccgacaccagcaagaacaccgcctacctccagatgaacagcctgagagccgaggacaccgccgtgtactattgtgccgctgtgtccgtcagagatgggcactacaattactggggccagggcaccaccgtgaccgtttcttcactcgagatccagaaccctgatcctgccgtgtaccagctgcgggatagcaagagcagcgacaagagcgtgtgtctgttcaccgacttcgacagccagaccaacgtgtcccagagcaaggactccgacgtgtacatcaccgataagtgcgtgctggacatgcggagcatggacttcaagagcaactccgccgtggcctggtccaacaagtccgatttcgcctgcgccaacgccttcaacaacagcattatccccgaggacacattcttcccaagccccgagagcagctgcgacgtgaagctggtggaaaagagcttcgagacagacaccaacctgaacttccagaacctgagcgtgatcggcttcagaatcctgctgctgaaagtggccggctttaacctgctgatgaccctgcggctgtggtccagccgcgccaagagaagcggatctggcgtgaagcagaccctgaatttcgacctgctgaagctggctggcgacgtggaatccaacccaggccctactagtatggactggatttggcgcatccttttccttgtcggcgctgctaccggcgcgcattccttcgaagtgcagctgcttgaaagtggcggcggactgattcagcctggcggatctctgagactgagctgtgccgccagcggcttcaccttttctagccacgccatgacctgggtccgacaggcacctggaaaagggcttgaatgggtgtccgccatcagcggctctggcgattacacacactacgccgacagcgtgaagggcagattcaccatcagcagagacaacagcaagaacaccgtgtacctccagatgaacagcctgagagccgaggacagcgccgtgtattattgcgccaaggatgaggatggcggcagcctgcttggacacagaggacaaggcaccctggtcaccgtttcttccacgcgtgaggacctgaagaacgtgttcccacctgaggtggccgtgttcgagcctagcgaggccgagatcagccacacccagaaagccaccctcgtgtgcctggctaccggcttctaccccgaccatgtggaactgtcttggtgggtcaacggcaaagaggtgcacagcggcgtgtgtaccgacccccagccactgaaagaacagcccgccctgaacgacagccggtactgcctgagcagcagactgagagtgtccgccaccttctggcagaacccccggaaccacttcagatgccaggtgcagttctacggcctgagcgagaacgacgagtggacccaggacagagccaagcccgtgacccagatcgtgtctgccgaagcctggggcagagccgattgcggctttaccagcgagagctaccagcagggcgtgctgagcgccaccatcctgtacgagatcctgctgggcaaggccaccctgtacgccgtgctggtgtctgccctggtgctgatggctatggtcaagcggaaggacagccggggaagggccaagcgatctggatctggagcaacaaacttctcactactcaaacaagcaggtgacgtggaggagaatcccgggccttctagaggcgggatccacaccatggctacctacgaggtgctgtgcgaggtggcaagaaagctgggcaccgacgacagagaagtggtgctgttcctgctgaacgtgttcatccctcagcctacactggcccagctgatcggtgcactgagagccctgaaagaggaaggccggctgacctttcctctgctggccgaatgcctgttcagagccggaagaagggatctgctgcgggacctgctgcatctggaccccagatttctggaaagacacctggccggcaccatgagctacttcagcccttaccagctgaccgtgctgcacgttgacggcgaactgtgcgccagagatattcggagcctgatcttcctgagcaaggacaccatcggcagccggtctacccctcagacatttctgcactgggtgtactgcatggaaaacctggacctgctcggccccacagatgtggatgccctgatgtccatgctgagaagcctgagcagagtggacctccagagacaggtgcagacactgatgggactgcacctgagcggacctagccacagccagcactacagacacacccct

SEQ ID NO: 6914 - DNA, 2712 bp, Artificial Sequence
  Synthetic Polynucloetide
atggccttaccagtgaccgccttgctcctgccgctggccttgctgctccacgccgccaggccgctcgaggggaaaccaattcccaaccctcttctgggactggattcaaccggcagcggcgaggacctgaagaacgtgttcccacctgaggtggccgtgttcgagcctagcaaggccgagatcgcccacacccagaaagccaccctcgtgtgcctggctaccggcttctaccccgaccatgtggaactgtcttggtgggtcaacggcaaagaggtgcacagcggcgtgtgtaccgacccccagccactgaaagaacagcccgccctgaacgacagccggtactgcctgagcagcagactgagagtgtccgccaccttctggcagaacccccggaaccacttcagatgccaggtgcagttctacggcctgagcgagaacgacgagtggacccaggacagagccaagcccgtgacccagatcgtgtctgccgaagcctggggcagagccgattgcggcatcaccagcgccagctaccaccagggcgtgctgagcgccaccatcctgtacgagatcctgctgggcaaggccaccctgtacgccgtgctggtgtctgccctggtgctgatggctatggtcaagcggaaggacagccggggaagggccaagcgatctggatctggagcaacaaacttctcactactcaaacaagcaggtgacgtggaggagaatcccgggcctactagcatggccttaccagtgaccgccttgctcctgccgctggccttgctgctccacgccgccaggccggaggtgcagctggttgaatctggcggaggactggttcagcctggcggatctctgagactgtcttgtgccgccagcggcttcaacatcaaggatacctgtatcggctgggttcgcagagcccctggcaaagaggaagaactggtcgccaaaatctgcaagtacagcggccacaccagatacgccgacagcgtgaagggcagattcaccatcagcgccgacaccagcaagaacaccgcctacctccagatgaacagcctgagagccgaggacaccgccgtgtactattgtgccgctgtgtccgtcagagatgggcactacaattactggggccagggcaccaccgtgaccgtttcttcactcgagagcggcggaggcggatctttcgaagtgcagctgcttgaaagtggcggcggactgattcagcctggcggatctctgagactgagctgtgccgccagcggcttcaccttttctagccacgccatgacctgggtccgacaggcacctggaaaagggcttgaatgggtgtccgccatcagcggctctggcgattacacacactacgccgacagcgtgaagggcagattcaccatcagcagagacaacagcaagaacaccgtgtacctccagatgaacagcctgagagccgaggacagcgccgtgtattattgcgccaaggatgaggatggcggcagcctgcttggacacagaggacaaggcaccctggtcaccgtttcttccacgcgtgagcagaaactgatctcggaagaggatgggagcggcatccagaaccctgatcctgccgtgtaccagctgcgggatagcaagagcagcgacaagagcgtgtgtctgttcaccgacttcgacagccagaccaacgtgtcccagagcaaggactccgacgtgtacatcaccgataagtgcgtgctggacatgcggagcatggacttcaagagcaactccgccgtggcctggtccaacaagtccgatttcgcctgcgccaacgccttcaacaacagcattatccccgaggacacattcttcccaagcagcgacgtgccctgcgacgtgaagctggtggaaaagagcttcgagacagacaccaacctgaacttccagaacctgagcgtgatcggcttcagaatcctgctgctgaaagtggccggctttaacctgctgatgaccctgcggctgtggtccagccgcgccaagagaagcggatctggcgtgaagcagaccctgaatttcgacctgctgaagctggctggcgacgtggaatccaacccaggcccttctagaggccatatgaccgagtacaagcccacggtgcgcctcgccacccgcgacgacgtccccagggccgtacgcaccctcgccgccgcgttcgccgactaccccgccacgcgccacaccgtcgatccggaccgccacatcgagcgggtcaccgagctgcaagaactcttcctcacgcgcgtcgggctcgacatcggcaaggtgtgggtcgcggacgacggcgccgcggtggcggtctggaccacgccggagagcgtcgaagcgggggcggtgttcgccgagatcggcccgcgcatggccgagttgagcggttcccggctggccgcgcagcaacagatggaaggcctcctggcgccgcaccggcccaaggagcccgcgtggttcctggccaccgtcggcgtctcgcccgaccaccagggcaagggtctgggcagcgccgtcgtgctccccggagtggaggcggccgagcgcgccggggtgcccgccttcctggagacctccgcgccccgcaacctccccttctacgagcggctcggcttcaccgtcaccgccgacgtcgaggtgcccgaaggaccgcgcacctggtgcatgacccgcaagcccggtgcctga

SEQ ID NO: 6915 - DNA, 2715 bp, Artificial Sequence
  Synthetic Polynucloetide
atggccttaccagtgaccgccttgctcctgccgctggccttgctgctccacgccgccaggccgctcgagcagaaactgatctcggaagaggatctgggctccggcgatcgccctgatcctgccgtgtaccagctgcgggatagcaagagcagcgacaagagcgtgtgtctgttcaccgacttcgacagccagaccaacgtgtcccagagcaaggactccgacgtgtacatcaccgataagtgcgtgctggacatgcggagcatggacttcaagagcaactccgccgtggcctggtccaacaagtccgatttcgcctgcgccaacgccttcaacaacagcattatccccgaggacacattcttcccaagccccgagagcagctgcgacgtgaagctggtggaaaagagcttcgagacagacaccaacctgaacttccagaacctgagcgtgatcggcttcagaatcctgctgctgaaagtggccggctttaacctgctgatgaccctgcggctgtggtccagctctagtcgcgccaagagaagcggatctggcgtgaagcagaccctgaatttcgacctgctgaagctggctggcgacgtggaatccaacccaggccccactagcatggccttaccagtgaccgccttgctcctgccgctggccttgctgctccacgccgccaggccggaggtgcagctggttgaatctggcggaggactggttcagcctggcggatctctgagactgtcttgtgccgccagcggcttcaacatcaaggatacctgtatcggctgggttcgcagagcccctggcaaagaggaagaactggtcgccaaaatctgcaagtacagcggccacaccagatacgccgacagcgtgaagggcagattcaccatcagcgccgacaccagcaagaacaccgcctacctccagatgaacagcctgagagccgaggacaccgccgtgtactattgtgccgctgtgtccgtcagagatgggcactacaattactggggccagggcaccaccgtgaccgtttcttcactcgagagcggcggaggcggatctttcgaagtgcagctgcttgaaagtggcggcggactgattcagcctggcggatctctgagactgagctgtgccgccagcggcttcaccttttctagccacgccatgacctgggtccgacaggcacctggaaaagggcttgaatgggtgtccgccatcagcggctctggcgattacacacactacgccgacagcgtgaagggcagattcaccatcagcagagacaacagcaagaacaccgtgtacctccagatgaacagcctgagagccgaggacagcgccgtgtattattgcgccaaggatgaggatggcggcagcctgcttggacacagaggacaaggcaccctggtcaccgtttcttccacgcgtgggaaaccaattcccaaccctcttctgggactggattcaaccggcagcggcgaggacctgaagaacgtgttcccacctgaggtggccgtgttcgagcctagcgaggccgagatcagccacacccagaaagccaccctcgtgtgcctggctaccggcttctaccccgaccatgtggaactgtcttggtgggtcaacggcaaagaggtgcacagcggcgtgtgtaccgacccccagccactgaaagaacagcccgccctgaacgacagccggtactgcctgagcagcagactgagagtgtccgccaccttctggcagaacccccggaaccacttcagatgccaggtgcagttctacggcctgagcgagaacgacgagtggacccaggacagagccaagcccgtgacccagatcgtgtctgccgaagcctggggcagagccgattgcggctttaccagcgagagctaccagcagggcgtgctgagcgccaccatcctgtacgagatcctgctgggcaaggccaccctgtacgccgtgctggtgtctgccctggtgctgatggctatggtcaagcggaaggacagccggggaagggccaagcgatctggatctggagcaacaaacttctcactactcaaacaagcaggtgacgtggaggagaatcccgggccttctagaggccatatgaccgagtacaagcccacggtgcgcctcgccacccgcgacgacgtccccagggccgtacgcaccctcgccgccgcgttcgccgactaccccgccacgcgccacaccgtcgatccggaccgccacatcgagcgggtcaccgagctgcaagaactcttcctcacgcgcgtcgggctcgacatcggcaaggtgtgggtcgcggacgacggcgccgcggtggcggtctggaccacgccggagagcgtcgaagcgggggcggtgttcgccgagatcggcccgcgcatggccgagttgagcggttcccggctggccgcgcagcaacagatggaaggcctcctggcgccgcaccggcccaaggagcccgcgtggttcctggccaccgtcggcgtctcgcccgaccaccagggcaagggtctgggcagcgccgtcgtgctccccggagtggaggcggccgagcgcgccggggtgcccgccttcctggagacctccgcgccccgcaacctccccttctacgagcggctcggcttcaccgtcaccgccgacgtcgaggtgcccgaaggaccgcgcacctggtgcatgacccgcaagcccggtgcctga

SEQ ID NO: 6916 - DNA, 2592 bp, Artificial Sequence
  Synthetic Polynucloetide
atggccttaccagtgaccgccttgctcctgccgctggccttgctgctccacgccgccaggccggaggtgcagctggttgaatctggcggaggactggttcagcctggcggatctctgagactgtcttgtgccgccagcggcttcaacatcaaggatacctgtatcggctgggttcgcagagcccctggcaaagaggaagaactggtcgccaaaatctgcaagtacagcggccacaccagatacgccgacagcgtgaagggcagattcaccatcagcgccgacaccagcaagaacaccgcctacctccagatgaacagcctgagagccgaggacaccgccgtgtactattgtgccgctgtgtccgtcagagatgggcactacaattactggggccagggcaccaccgtgaccgtttcttcactcgaggacctgaagaacgtgttcccacctgaggtggccgtgttcgagcctagcgaggccgagatcagccacacccagaaagccaccctcgtgtgcctggctaccggcttctaccccgaccatgtggaactgtcttggtgggtcaacggcaaagaggtgcacagcggcgtgtctaccgacccccagccactgaaagaacagcccgccctgaacgacagccggtactgcctgagcagcagactgagagtgtccgccaccttctggcagaacccccggaaccacttcagatgccaggtgcagttctacggcctgagcgagaacgacgagtggacccaggacagagccaagcccgtgacccagatcgtgtctgccgaagcctggggcagagccgattgcggctttaccagcgagagctaccagcagggcgtgctgagcgccaccatcctgtacgagatcctgctgggcaaggccaccctgtacgccgtgctggtgtctgccctggtgctgatggctatggtcaagcggaaggacagccggggaagggccaagcgatctggatctggagcaacaaacttctcactactcaaacaagcaggtgacgtggaggagaatcccgggcctactagtatggactggatttggcgcatccttttccttgtcggcgctgctaccggcgcgcattccttcgaagtgcagctgcttgaaagtggcggcggactgattcagcctggcggatctctgagactgagctgtgccgccagcggcttcaccttttctagccacgccatgacctgggtccgacaggcacctggaaaagggcttgaatgggtgtccgccatcagcggctctggcgattacacacactacgccgacagcgtgaagggcagattcaccatcagcagagacaacagcaagaacaccgtgtacctccagatgaacagcctgagagccgaggacagcgccgtgtattattgcgccaaggatgaggatggcggcagcctgcttggacacagaggacaaggcaccctggtcaccgtttcttccacgcgtatccagaaccctgatcctgccgtgtaccagctgcgggatagcaagagcagcgacaagagcgtgtgtctgttcaccgacttcgacagccagaccaacgtgtcccagagcaaggactccgacgtgtacatcaccgataagaccgtgctggacatgcggagcatggacttcaagagcaactccgccgtggcctggtccaacaagtccgatttcgcctgcgccaacgccttcaacaacagcattatccccgaggacacattcttcccaagccccgagagcagctgcgacgtgaagctggtggaaaagagcttcgagacagacaccaacctgaacttccagaacctgagcgtgatcggcttcagaatcctgctgctgaaagtggccggctttaacctgctgatgaccctgcggctgtggtccagccgcgccaagagaagcggatctggcgtgaagcagaccctgaatttcgacctgctgaagctggctggcgacgtggaatccaacccaggcccttctagaggccatatgaccgagtacaagcccacggtgcgcctcgccacccgcgacgacgtccccagggccgtacgcaccctcgccgccgcgttcgccgactaccccgccacgcgccacaccgtcgatccggaccgccacatcgagcgggtcaccgagctgcaagaactcttcctcacgcgcgtcgggctcgacatcggcaaggtgtgggtcgcggacgacggcgccgcggtggcggtctggaccacgccggagagcgtcgaagcgggggcggtgttcgccgagatcggcccgcgcatggccgagttgagcggttcccggctggccgcgcagcaacagatggaaggcctcctggcgccgcaccggcccaaggagcccgcgtggttcctggccaccgtcggcgtctcgcccgaccaccagggcaagggtctgggcagcgccgtcgtgctccccggagtggaggcggccgagcgcgccggggtgcccgccttcctggagacctccgcgccccgcaacctccccttctacgagcggctcggcttcaccgtcaccgccgacgtcgaggtgcccgaaggaccgcgcacctggtgcatgacccgcaagcccggtgcctga

SEQ ID NO: 6917 - DNA, 2838 bp, Artificial Sequence
  Synthetic Polynucloetide
atggccttaccagtgaccgccttgctcctgccgctggccttgctgctccacgccgccaggccggaggtgcagctggttgaatctggcggaggactggttcagcctggcggatctctgagactgtcttgtgccgccagcggcttcaacatcaaggatacctgtatcggctgggttcgcagagcccctggcaaagaggaagaactggtcgccaaaatctgcaagtacagcggccacaccagatacgccgacagcgtgaagggcagattcaccatcagcgccgacaccagcaagaacaccgcctacctccagatgaacagcctgagagccgaggacaccgccgtgtactattgtgccgctgtgtccgtcagagatgggcactacaattactggggccagggcaccaccgtgaccgtttcttcactcgaggacctgaagaacgtgttcccacctgaggtggccgtgttcgagcctagcgaggccgagatcagccacacccagaaagccaccctcgtgtgcctggctaccggcttctaccccgaccatgtggaactgtcttggtgggtcaacggcaaagaggtgcacagcggcgtgtctaccgacccccagccactgaaagaacagcccgccctgaacgacagccggtactgcctgagcagcagactgagagtgtccgccaccttctggcagaacccccggaaccacttcagatgccaggtgcagttctacggcctgagcgagaacgacgagtggacccaggacagagccaagcccgtgacccagatcgtgtctgccgaagcctggggcagagccgattgcggctttaccagcgagagctaccagcagggcgtgctgagcgccaccatcctgtacgagatcctgctgggcaaggccaccctgtacgccgtgctggtgtctgccctggtgctgatggctatggtcaagcggaaggacagccggggaagggccaagcgatctggatctggagcaacaaacttctcactactcaaacaagcaggtgacgtggaggagaatcccgggcctactagtatggactggatttggcgcatccttttccttgtcggcgctgctaccggcgcgcattccttcgaagtgcagctgcttgaaagtggcggcggactgattcagcctggcggatctctgagactgagctgtgccgccagcggcttcaccttttctagccacgccatgacctgggtccgacaggcacctggaaaagggcttgaatgggtgtccgccatcagcggctctggcgattacacacactacgccgacagcgtgaagggcagattcaccatcagcagagacaacagcaagaacaccgtgtacctccagatgaacagcctgagagccgaggacagcgccgtgtattattgcgccaaggatgaggatggcggcagcctgcttggacacagaggacaaggcaccctggtcaccgtttcttccacgcgtgagcagaaactgatctcggaagaggatgggagcggcaccccattcccttctctggcccctcccatcatgctgctggtggacggcaagcagcagatggtggtcgtgtgcctggtgctggatgtggccccacctggactggacagccccatctggtttagcgccggcaatggctctgccctggacgcctttacctacggcccaagccctgccaccgatggcacctggacaaatctggcccacctgagcctgcccagcgaggaactggcttcttgggagcctctcgtgtgccacacaggacctggcgctgagggacacagcagatccacccagcctatgcacctgtctggcgaggccagcaccgccagaacctgtcctcaggaacctctgagaggcacccctggcggagcactgtggctgggagtgctgagactgctgctgttcaagctgctgctgtttgacctgctgctgacctgctcctgtctgtgcgatcctgccggccctctgccttctcctgccaccaccacaagactgagagccctgggcagccacagactgcaccctgccacagagacaggcggcagagaggccacaagcagccctagaccccagcccagagacagaagatggggcgataccccccctggcagaaagcctggatctccagtccgcgccaagagaagcggatctggcgtgaagcagaccctgaatttcgacctgctgaagctggctggcgacgtggaatccaacccaggcccttctagaggccatatgaccgagtacaagcccacggtgcgcctcgccacccgcgacgacgtccccagggccgtacgcaccctcgccgccgcgttcgccgactaccccgccacgcgccacaccgtcgatccggaccgccacatcgagcgggtcaccgagctgcaagaactcttcctcacgcgcgtcgggctcgacatcggcaaggtgtgggtcgcggacgacggcgccgcggtggcggtctggaccacgccggagagcgtcgaagcgggggcggtgttcgccgagatcggcccgcgcatggccgagttgagcggttcccggctggccgcgcagcaacagatggaaggcctcctggcgccgcaccggcccaaggagcccgcgtggttcctggccaccgtcggcgtctcgcccgaccaccagggcaagggtctgggcagcgccgtcgtgctccccggagtggaggcggccgagcgcgccggggtgcccgccttcctggagacctccgcgccccgcaacctccccttctacgagcggctcggcttcaccgtcaccgccgacgtcgaggtgcccgaaggaccgcgcacctggtgcatgacccgcaagcccggtgcctga

SEQ ID NO: 6918 - DNA, 2877 bp, Artificial Sequence
  Synthetic Polynucloetide
atggccttaccagtgaccgccttgctcctgccgctggccttgctgctccacgccgccaggccgctcgaggacctgaagaacgtgttcccacctgaggtggccgtgttcgagcctagcgaggccgagatcagccacacccagaaagccaccctcgtgtgcctggctaccggcttctaccccgaccatgtggaactgtcttggtgggtcaacggcaaagaggtgcacagcggcgtgtctaccgacccccagccactgaaagaacagcccgccctgaacgacagccggtactgcctgagcagcagactgagagtgtccgccaccttctggcagaacccccggaaccacttcagatgccaggtgcagttctacggcctgagcgagaacgacgagtggacccaggacagagccaagcccgtgacccagatcgtgtctgccgaagcctggggcagagccgattgcggctttaccagcgagagctaccagcagggcgtgctgagcgccaccatcctgtacgagatcctgctgggcaaggccaccctgtacgccgtgctggtgtctgccctggtgctgatggctatggtcaagcggaaggacagccggggaagggccaagcgatctggatctggagcaacaaacttctcactactcaaacaagcaggtgacgtggaggagaatcccgggcctactagcatggccttaccagtgaccgccttgctcctgccgctggccttgctgctccacgccgccaggccggaggtgcagctggttgaatctggcggaggactggttcagcctggcggatctctgagactgtcttgtgccgccagcggcttcaacatcaaggatacctgtatcggctgggttcgcagagcccctggcaaagaggaagaactggtcgccaaaatctgcaagtacagcggccacaccagatacgccgacagcgtgaagggcagattcaccatcagcgccgacaccagcaagaacaccgcctacctccagatgaacagcctgagagccgaggacaccgccgtgtactattgtgccgctgtgtccgtcagagatgggcactacaattactggggccagggcaccaccgtgaccgtttcttcactcgagagcggcggaggcggatctttcgaagtgcagctgcttgaaagtggcggcggactgattcagcctggcggatctctgagactgagctgtgccgccagcggcttcaccttttctagccacgccatgacctgggtccgacaggcacctggaaaagggcttgaatgggtgtccgccatcagcggctctggcgattacacacactacgccgacagcgtgaagggcagattcaccatcagcagagacaacagcaagaacaccgtgtacctccagatgaacagcctgagagccgaggacagcgccgtgtattattgcgccaaggatgaggatggcggcagcctgcttggacacagaggacaaggcaccctggtcaccgtttcttccacgcgtgagcagaaactgatctcggaagaggatctggggagcggcaccccattcccttctctggcccctcccatcatgctgctggtggacggcaagcagcagatggtggtcgtgtgcctggtgctggatgtggccccacctggactggacagccccatctggtttagcgccggcaatggctctgccctggacgcctttacctacggcccaagccctgccaccgatggcacctggacaaatctggcccacctgagcctgcccagcgaggaactggcttcttgggagcctctcgtgtgccacacaggacctggcgctgagggacacagcagatccacccagcctatgcacctgtctggcgaggccagcaccgccagaacctgtcctcaggaacctctgagaggcacccctggcggagcactgtggctgggagtgctgagactgctgctgttcaagctgctgctgtttgacctgctgctgacctgctcctgtctgtgcgatcctgccggccctctgccttctcctgccaccaccacaagactgagagccctgggcagccacagactgcaccctgccacagagacaggcggcagagaggccacaagcagccctagaccccagcccagagacagaagatggggcgataccccccctggcagaaagcctggatctccagtccgcgccaagagaagcggatctggcgtgaagcagaccctgaatttcgacctgctgaagctggctggcgacgtggaatccaacccaggcccttctagatctagaggccatatgaccgagtacaagcccacggtgcgcctcgccacccgcgacgacgtccccagggccgtacgcaccctcgccgccgcgttcgccgactaccccgccacgcgccacaccgtcgatccggaccgccacatcgagcgggtcaccgagctgcaagaactcttcctcacgcgcgtcgggctcgacatcggcaaggtgtgggtcgcggacgacggcgccgcggtggcggtctggaccacgccggagagcgtcgaagcgggggcggtgttcgccgagatcggcccgcgcatggccgagttgagcggttcccggctggccgcgcagcaacagatggaaggcctcctggcgccgcaccggcccaaggagcccgcgtggttcctggccaccgtcggcgtctcgcccgaccaccagggcaagggtctgggcagcgccgtcgtgctccccggagtggaggcggccgagcgcgccggggtgcccgccttcctggagacctccgcgccccgcaacctccccttctacgagcggctcggcttcaccgtcaccgccgacgtcgaggtgcccgaaggaccgcgcacctggtgcatgacccgcaagcccggtgcctga

SEQ ID NO: 6919 - DNA, 2703 bp, Artificial Sequence
  Synthetic Polynucloetide
atggccttaccagtgaccgccttgctcctgccgctggccttgctgctccacgccgccaggccggaggtgcagctggttgaatctggcggaggactggttcagcctggcggatctctgagactgtcttgtgccgccagcggcttcaacatcaaggatacctgtatcggctgggttcgcagagcccctggcaaagaggaagaactggtcgccaaaatctgcaagtacagcggccacaccagatacgccgacagcgtgaagggcagattcaccatcagcgccgacaccagcaagaacaccgcctacctccagatgaacagcctgagagccgaggacaccgccgtgtactattgtgccgctgtgtccgtcagagatgggcactacaattactggggccagggcaccaccgtgaccgtttcttcactcgaggggaaaccaattcccaaccctcttctgggactggattcaaccggcagcggcgacaagcagctggacgccgacgtgtcccccaagcctaccatcttcctgccctctatcgccgagacaaagctccagaaggccggcacctacctgtgcctgctggaaaagttcttcccagatgtgattaagatccactggcaggaaaagaagtccaacaccatcctgggcagccaggaaggcaacaccatgaagaccaacgacacctacatgaagttcagctggctgaccgtgcccgagaagtccctggacaaagaacacagatgcatcgtgcggcacgaaaacaacaagaacggcgtggaccaggaaatcatcttcccacccatcaagaccgatgtgattacaatggaccccaaggacaactgctccaaggacgccaacgataccctgctgctccagctgaccaacaccagcgcctactacatgtacttgttgctgctgctgaagtccgtggtgtacttcgccatcatcacatgctgcctgctgcggagaaccgccttctgctgcaacggcgagaagtctagggccaagcgatctggatctggagcaacaaacttctcactactcaaacaagcaggtgacgtggaggagaatcccgggcctactagtatggactggatttggcgcatccttttccttgtcggcgctgctaccggcgcgcattccttcgaagtgcagctgcttgaaagtggcggcggactgattcagcctggcggatctctgagactgagctgtgccgccagcggcttcaccttttctagccacgccatgacctgggtccgacaggcacctggaaaagggcttgaatgggtgtccgccatcagcggctctggcgattacacacactacgccgacagcgtgaagggcagattcaccatcagcagagacaacagcaagaacaccgtgtacctccagatgaacagcctgagagccgaggacagcgccgtgtattattgcgccaaggatgaggatggcggcagcctgcttggacacagaggacaaggcaccctggtcaccgtttcttccacgcgtgagcagaaactgatctcggaagaggatgggagcggcagccagcctcacaccaagcccagcgtgttcgtgatgaagaacggcaccaacgtggcctgcctcgtgaaagagttctaccccaaggacatcaggatcaacctggtgtccagcaagaagatcaccgagttcgaccccgccatcgtgatctcccccagcggcaagtacaacgccgtgaagctggggaagtacgaggacagcaacagcgtgacctgctccgtgcagcacgacaacaagaccgtgcacagcaccgactttgaagtgaaaaccgactccaccgaccacgtgaagcccaaagagacagagaacaccaagcagcccagcaagagctgccacaagcccaaggccatcgtgcacaccgagaaagtgaacatgatgagcctgaccgtgctgggcctgcggatgctgttcgccaaaaccgtggccgtgaacttcctgctgaccgccaagctgttcttcctccgcgccaagagaagcggatctggcgtgaagcagaccctgaatttcgacctgctgaagctggctggcgacgtggaatccaacccaggcccttctagaggccatatgaccgagtacaagcccacggtgcgcctcgccacccgcgacgacgtccccagggccgtacgcaccctcgccgccgcgttcgccgactaccccgccacgcgccacaccgtcgatccggaccgccacatcgagcgggtcaccgagctgcaagaactcttcctcacgcgcgtcgggctcgacatcggcaaggtgtgggtcgcggacgacggcgccgcggtggcggtctggaccacgccggagagcgtcgaagcgggggcggtgttcgccgagatcggcccgcgcatggccgagttgagcggttcccggctggccgcgcagcaacagatggaaggcctcctggcgccgcaccggcccaaggagcccgcgtggttcctggccaccgtcggcgtctcgcccgaccaccagggcaagggtctgggcagcgccgtcgtgctccccggagtggaggcggccgagcgcgccggggtgcccgccttcctggagacctccgcgccccgcaacctccccttctacgagcggctcggcttcaccgtcaccgccgacgtcgaggtgcccgaaggaccgcgcacctggtgcatgacccgcaagcccggtgcctga

SEQ ID NO: 6920 - DNA, 1914 bp, Artificial Sequence
  Synthetic Polynucloetide
atggccttaccagtgaccgccttgctcctgccgctggccttgctgctccacgccgccaggccggaggtgcagctggttgaatctggcggaggactggttcagcctggcggatctctgagactgtcttgtgccgccagcggcttcaacatcaaggatacctgtatcggctgggttcgcagagcccctggcaaagaggaagaactggtcgccaaaatctgcaagtacagcggccacaccagatacgccgacagcgtgaagggcagattcaccatcagcgccgacaccagcaagaacaccgcctacctccagatgaacagcctgagagccgaggacaccgccgtgtactattgtgccgctgtgtccgtcagagatgggcactacaattactggggccagggcaccaccgtgaccgtttcttcactcgagagccagcctcacaccaagcccagcgtgttcgtgatgaagaacggcaccaacgtggcctgcctcgtgaaagagttctaccccaaggacatcaggatcaacctggtgtccagcaagaagatcaccgagttcgaccccgccatcgtgatctcccccagcggcaagtacaacgccgtgaagctggggaagtacgaggacagcaacagcgtgacctgctccgtgcagcacgacaacaagaccgtgcacagcaccgactttgaagtgaaaaccgactccaccgaccacgtgaagcccaaagagacagagaacaccaagcagcccagcaagagctgccacaagcccaaggccatcgtgcacaccgagaaagtgaacatgatgagcctgaccgtgctgggcctgcggatgctgttcgccaaaaccgtggccgtgaacttcctgctgaccgccaagctgttcttcctcagggccaagcgatctggatctggagcaacaaacttctcactactcaaacaagcaggtgacgtggaggagaatcccgggcctactagtatggactggatttggcgcatccttttccttgtcggcgctgctaccggcgcgcattccttcgaagtgcagctgcttgaaagtggcggcggactgattcagcctggcggatctctgagactgagctgtgccgccagcggcttcaccttttctagccacgccatgacctgggtccgacaggcacctggaaaagggcttgaatgggtgtccgccatcagcggctctggcgattacacacactacgccgacagcgtgaagggcagattcaccatcagcagagacaacagcaagaacaccgtgtacctccagatgaacagcctgagagccgaggacagcgccgtgtattattgcgccaaggatgaggatggcggcagcctgcttggacacagaggacaaggcaccctggtcaccgtttcttccacgcgtgacaagcagctggacgccgacgtgtcccccaagcctaccatcttcctgccctctatcgccgagacaaagctccagaaggccggcacctacctgtgcctgctggaaaagttcttcccagatgtgattaagatccactggcaggaaaagaagtccaacaccatcctgggcagccaggaaggcaacaccatgaagaccaacgacacctacatgaagttcagctggctgaccgtgcccgagaagtccctggacaaagaacacagatgcatcgtgcggcacgaaaacaacaagaacggcgtggaccaggaaatcatcttcccacccatcaagaccgatgtgattacaatggaccccaaggacaactgctccaaggacgccaacgataccctgctgctccagctgaccaacaccagcgcctactacatgtacttgttgctgctgctgaagtccgtggtgtacttcgccatcatcacatgctgcctgctgcggagaaccgccttctgctgcaacggcgagaagtct

SEQ ID NO: 6921 - DNA, 2733 bp, Artificial Sequence
  Synthetic Polynucloetide
atggccttaccagtgaccgccttgctcctgccgctggccttgctgctccacgccgccaggccgctcgaggggaaaccaattcccaaccctcttctgggactggattcaaccggcagcggcgacaagcagctggacgccgacgtgtcccccaagcctaccatcttcctgccctctatcgccgagacaaagctccagaaggccggcacctacctgtgcctgctggaaaagttcttcccagatgtgattaagatccactggcaggaaaagaagtccaacaccatcctgggcagccaggaaggcaacaccatgaagaccaacgacacctacatgaagttcagctggctgaccgtgcccgagaagtccctggacaaagaacacagatgcatcgtgcggcacgaaaacaacaagaacggcgtggaccaggaaatcatcttcccacccatcaagaccgatgtgattacaatggaccccaaggacaactgctccaaggacgccaacgataccctgctgctccagctgaccaacaccagcgcctactacatgtacttgttgctgctgctgaagtccgtggtgtacttcgccatcatcacatgctgcctgctgcggagaaccgccttctgctgcaacggcgagaagtctagggccaagcgatctggatctggagcaacaaacttctcactactcaaacaagcaggtgacgtggaggagaatcccgggcctactagcatggccttaccagtgaccgccttgctcctgccgctggccttgctgctccacgccgccaggccggaggtgcagctggttgaatctggcggaggactggttcagcctggcggatctctgagactgtcttgtgccgccagcggcttcaacatcaaggatacctgtatcggctgggttcgcagagcccctggcaaagaggaagaactggtcgccaaaatctgcaagtacagcggccacaccagatacgccgacagcgtgaagggcagattcaccatcagcgccgacaccagcaagaacaccgcctacctccagatgaacagcctgagagccgaggacaccgccgtgtactattgtgccgctgtgtccgtcagagatgggcactacaattactggggccagggcaccaccgtgaccgtttcttcactcgagagcggcggaggcggatctttcgaagtgcagctgcttgaaagtggcggcggactgattcagcctggcggatctctgagactgagctgtgccgccagcggcttcaccttttctagccacgccatgacctgggtccgacaggcacctggaaaagggcttgaatgggtgtccgccatcagcggctctggcgattacacacactacgccgacagcgtgaagggcagattcaccatcagcagagacaacagcaagaacaccgtgtacctccagatgaacagcctgagagccgaggacagcgccgtgtattattgcgccaaggatgaggatggcggcagcctgcttggacacagaggacaaggcaccctggtcaccgtttcttccacgcgtgagcagaaactgatctcggaagaggatgggagcggcagccagcctcacaccaagcccagcgtgttcgtgatgaagaacggcaccaacgtggcctgcctcgtgaaagagttctaccccaaggacatcaggatcaacctggtgtccagcaagaagatcaccgagttcgaccccgccatcgtgatctcccccagcggcaagtacaacgccgtgaagctggggaagtacgaggacagcaacagcgtgacctgctccgtgcagcacgacaacaagaccgtgcacagcaccgactttgaagtgaaaaccgactccaccgaccacgtgaagcccaaagagacagagaacaccaagcagcccagcaagagctgccacaagcccaaggccatcgtgcacaccgagaaagtgaacatgatgagcctgaccgtgctgggcctgcggatgctgttcgccaaaaccgtggccgtgaacttcctgctgaccgccaagctgttcttcctccgcgccaagagaagcggatctggcgtgaagcagaccctgaatttcgacctgctgaagctggctggcgacgtggaatccaacccaggcccttctagaggccatatgaccgagtacaagcccacggtgcgcctcgccacccgcgacgacgtccccagggccgtacgcaccctcgccgccgcgttcgccgactaccccgccacgcgccacaccgtcgatccggaccgccacatcgagcgggtcaccgagctgcaagaactcttcctcacgcgcgtcgggctcgacatcggcaaggtgtgggtcgcggacgacggcgccgcggtggcggtctggaccacgccggagagcgtcgaagcgggggcggtgttcgccgagatcggcccgcgcatggccgagttgagcggttcccggctggccgcgcagcaacagatggaaggcctcctggcgccgcaccggcccaaggagcccgcgtggttcctggccaccgtcggcgtctcgcccgaccaccagggcaagggtctgggcagcgccgtcgtgctccccggagtggaggcggccgagcgcgccggggtgcccgccttcctggagacctccgcgccccgcaacctccccttctacgagcggctcggcttcaccgtcaccgccgacgtcgaggtgcccgaaggaccgcgcacctggtgcatgacccgcaagcccggtgcctga

SEQ ID NO: 6922 - DNA, 3123 bp, Artificial Sequence
  Synthetic Polynucloetide
atggccttaccagtgaccgccttgctcctgccgctggccttgctgctccacgccgccaggccggaggtgcagctggttgaatctggcggaggactggttcagcctggcggatctctgagactgtcttgtgccgccagcggcttcaacatcaaggatacctgtatcggctgggttcgcagagcccctggcaaagaggaagaactggtcgccaaaatctgcaagtacagcggccacaccagatacgccgacagcgtgaagggcagattcaccatcagcgccgacaccagcaagaacaccgcctacctccagatgaacagcctgagagccgaggacaccgccgtgtactattgtgccgctgtgtccgtcagagatgggcactacaattactggggccagggcaccaccgtgaccgtttcttcaggacagcctaaggccaatcctaccgtgacactgttccctccaagcagcgaagaactccaggccaacaaggccacacttgtgtgcctgatctccgacttctaccctggggctgtgacagtggcttggaaggccgatggatctcctgtgaaagccggcgtggaaaccaccaagccatccaagcagagcaacaacaaatacgccgccagctcctacctgagcctgacacctgagcagtggaagtcccacagatcctacagctgccaagtgacccacgaaggcagcaccgtggaaaagacagtggcccctacagagtgcagcggatcccagagcttcggcctgctggaccccaagctgtgctacctgctggatggcatcctgttcatctacggcgtgatcctgaccgccctgttcctgagagtgaagttcagcagaagcgccgacgcccctgcctaccagcagggacagaaccaactgtacaacgagctgaacctgggcagacgggaagagtacgacgtgctggacaagcggagaggcagggaccctgagatgggcggaaagccccagcggagaaagaacccccaggaaggactgtataacgaactccagaaagacaagatggccgaagcctacagcgagatcggcatgaagggcgagcggagaagaggcaagggccacgatggcctgtaccagggcctgagcaccgccaccaaggacacctatgacgccctgcacatgcaggccctgcctccaagaagggccaagcgatctggatctggagcaacaaacttctcactactcaaacaagcaggtgacgtggaggagaatcccgggcctactagtatggactggatttggcgcatccttttccttgtcggcgctgctaccggcgcgcattccttcgaagtgcagctgcttgaaagtggcggcggactgattcagcctggcggatctctgagactgagctgtgccgccagcggcttcaccttttctagccacgccatgacctgggtccgacaggcacctggaaaagggcttgaatgggtgtccgccatcagcggctctggcgattacacacactacgccgacagcgtgaagggcagattcaccatcagcagagacaacagcaagaacaccgtgtacctccagatgaacagcctgagagccgaggacagcgccgtgtattattgcgccaaggatgaggatggcggcagcctgcttggacacagaggacaaggcaccctggtcaccgtttcttccgcctctacaaagggaccctccgtgtttcctctggctcccagcagcaagtctacaagcggaggaacagccgctctgggctgcctggtcaaggattactttcccgagcctgtgaccgtgtcctggaatagcggagcactgacaagcggcgtgcacacctttccagccgtgctgcaaagcagcggcctgtactctctgagcagcgtggtcacagtgcctagctctagcctgggcacccagacctacatctgcaatgtgaaccacaagcctagcaacaccaaggtggacaagagagtggaacccaagagctgtggtacccagagttttgggttgttggaccctaaattgtgctatctgttggacggaatcctgttcatttacggagtgatcctgaccgcattgttcctgcgggttaagttttccagatccgcagacgcacccgcttaccaacaagggcagaaccaactctacaatgaacttaatttggggcggagggaagagtacgacgttctggacaaaaggaggggacgagatcccgagatgggcggaaagcctcagcgaaggaagaatccgcaagaggggctttataacgaactccagaaagataaaatggcagaagcctatagtgagattgggatgaagggagaaaggaggaggggtaaaggtcacgatgggttgtaccaaggattgagcacagccactaaagatacctatgatgcgctccacatgcaggccctgccgccaagacgcgccaagagaagcggatctggcgtgaagcagaccctgaatttcgacctgctgaagctggctggcgacgtggaatccaacccaggcccttctagaggccatatgaccgagtacaagcccacggtgcgcctcgccacccgcgacgacgtccccagggccgtacgcaccctcgccgccgcgttcgccgactaccccgccacgcgccacaccgtcgatccggaccgccacatcgagcgggtcaccgagctgcaagaactcttcctcacgcgcgtcgggctcgacatcggcaaggtgtgggtcgcggacgacggcgccgcggtggcggtctggaccacgccggagagcgtcgaagcgggggcggtgttcgccgagatcggcccgcgcatggccgagttgagcggttcccggctggccgcgcagcaacagatggaaggcctcctggcgccgcaccggcccaaggagcccgcgtggttcctggccaccgtcggcgtctcgcccgaccaccagggcaagggtctgggcagcgccgtcgtgctccccggagtggaggcggccgagcgcgccggggtgcccgccttcctggagacctccgcgccccgcaacctccccttctacgagcggctcggcttcaccgtcaccgccgacgtcgaggtgcccgaaggaccgcgcacctggtgcatgacccgcaagcccggtgcctga

SEQ ID NO: 6923 - DNA, 2478 bp, Artificial Sequence
  Synthetic Polynucloetide
atggccttaccagtgaccgccttgctcctgccgctggccttgctgctccacgccgccaggccggaggtgcagctggttgaatctggcggaggactggttcagcctggcggatctctgagactgtcttgtgccgccagcggcttcaacatcaaggatacctgtatcggctgggttcgcagagcccctggcaaagaggaagaactggtcgccaaaatctgcaagtacagcggccacaccagatacgccgacagcgtgaagggcagattcaccatcagcgccgacaccagcaagaacaccgcctacctccagatgaacagcctgagagccgaggacaccgccgtgtactattgtgccgctgtgtccgtcagagatgggcactacaattactggggccagggcaccaccgtgaccgtttcttcactcgaggacctgaagaacgtgttcccacctgaggtggccgtgttcgagcctagcgaggccgagatcagccacacccagaaagccaccctcgtgtgcctggctaccggcttctaccccgaccatgtggaactgtcttggtgggtcaacggcaaagaggtgcacagcggcgtgtctaccgacccccagccactgaaagaacagcccgccctgaacgacagccggtactgcctgagcagcagactgagagtgtccgccaccttctggcagaacccccggaaccacttcagatgccaggtgcagttctacggcctgagcgagaacgacgagtggacccaggacagagccaagcccgtgacccagatcgtgtctgccgaagcctggggcagagccgattgcggatcccagagcttcggcctgctggaccccaagctgtgctacctgctggatggcatcctgttcatctacggcgtgatcctgaccgccctgttcctgagagtgaagttcagcagaagcgccgacgcccctgcctaccagcagggacagaaccaactgtacaacgagctgaacctgggcagacgggaagagtacgacgtgctggacaagcggagaggcagggaccctgagatgggcggaaagccccagcggagaaagaacccccaggaaggactgtataacgaactccagaaagacaagatggccgaagcctacagcgagatcggcatgaagggcgagcggagaagaggcaagggccacgatggcctgtaccagggcctgagcaccgccaccaaggacacctatgacgccctgcacatgcaggccctgcctccaagaagggccaagcgatctggatctggagcaacaaacttctcactactcaaacaagcaggtgacgtggaggagaatcccgggcctactagtatggactggatttggcgcatccttttccttgtcggcgctgctaccggcgcgcattccttcgaagtgcagctgcttgaaagtggcggcggactgattcagcctggcggatctctgagactgagctgtgccgccagcggcttcaccttttctagccacgccatgacctgggtccgacaggcacctggaaaagggcttgaatgggtgtccgccatcagcggctctggcgattacacacactacgccgacagcgtgaagggcagattcaccatcagcagagacaacagcaagaacaccgtgtacctccagatgaacagcctgagagccgaggacagcgccgtgtattattgcgccaaggatgaggatggcggcagcctgcttggacacagaggacaaggcaccctggtcaccgtttcttccacgcgtatccagaaccctgatcctgccgtgtaccagctgcgggatagcaagagcagcgacaagagcgtgtgtctgttcaccgacttcgacagccagaccaacgtgtcccagagcaaggactccgacgtgtacatcaccgataagaccgtgctggacatgcggagcatggacttcaagagcaactccgccgtggcctggtccaacaagtccgatttcgcctgcgccaacgccttcaacaacagcattatccccgaggacacattcttcccaagccccgagagcagctgcggtacccagagttttgggttgttggaccctaaattgtgctatctgttggacggaatcctgttcatttacggagtgatcctgaccgcattgttcctgcgggttaagttttccagatccgcagacgcacccgcttaccaacaagggcagaaccaactctacaatgaacttaatttggggcggagggaagagtacgacgttctggacaaaaggaggggacgagatcccgagatgggcggaaagcctcagcgaaggaagaatccgcaagaggggctttataacgaactccagaaagataaaatggcagaagcctatagtgagattgggatgaagggagaaaggaggaggggtaaaggtcacgatgggttgtaccaaggattgagcacagccactaaagatacctatgatgcgctccacatgcaggccctgccgccaaga

SEQ ID NO: 6924 - DNA, 2478 bp, Artificial Sequence
  Synthetic Polynucloetide
atggccttaccagtgaccgccttgctcctgccgctggccttgctgctccacgccgccaggccggaggtgcagctggttgaatctggcggaggactggttcagcctggcggatctctgagactgtcttgtgccgccagcggcttcaacatcaaggatacctgtatcggctgggttcgcagagcccctggcaaagaggaagaactggtcgccaaaatctgcaagtacagcggccacaccagatacgccgacagcgtgaagggcagattcaccatcagcgccgacaccagcaagaacaccgcctacctccagatgaacagcctgagagccgaggacaccgccgtgtactattgtgccgctgtgtccgtcagagatgggcactacaattactggggccagggcaccaccgtgaccgtttcttcactcgaggacctgaagaacgtgttcccacctgaggtggccgtgttcgagcctagcaaggccgagatcgcccacacccagaaagccaccctcgtgtgcctggctaccggcttctaccccgaccatgtggaactgtcttggtgggtcaacggcaaagaggtgcacagcggcgtgtgtaccgacccccagccactgaaagaacagcccgccctgaacgacagccggtactgcctgagcagcagactgagagtgtccgccaccttctggcagaacccccggaaccacttcagatgccaggtgcagttctacggcctgagcgagaacgacgagtggacccaggacagagccaagcccgtgacccagatcgtgtctgccgaagcctggggcagagccgattgcggatcccagagcttcggcctgctggaccccaagctgtgctacctgctggatggcatcctgttcatctacggcgtgatcctgaccgccctgttcctgagagtgaagttcagcagaagcgccgacgcccctgcctaccagcagggacagaaccaactgtacaacgagctgaacctgggcagacgggaagagtacgacgtgctggacaagcggagaggcagggaccctgagatgggcggaaagccccagcggagaaagaacccccaggaaggactgtataacgaactccagaaagacaagatggccgaagcctacagcgagatcggcatgaagggcgagcggagaagaggcaagggccacgatggcctgtaccagggcctgagcaccgccaccaaggacacctatgacgccctgcacatgcaggccctgcctccaagaagggccaagcgatctggatctggagcaacaaacttctcactactcaaacaagcaggtgacgtggaggagaatcccgggcctactagtatggactggatttggcgcatccttttccttgtcggcgctgctaccggcgcgcattccttcgaagtgcagctgcttgaaagtggcggcggactgattcagcctggcggatctctgagactgagctgtgccgccagcggcttcaccttttctagccacgccatgacctgggtccgacaggcacctggaaaagggcttgaatgggtgtccgccatcagcggctctggcgattacacacactacgccgacagcgtgaagggcagattcaccatcagcagagacaacagcaagaacaccgtgtacctccagatgaacagcctgagagccgaggacagcgccgtgtattattgcgccaaggatgaggatggcggcagcctgcttggacacagaggacaaggcaccctggtcaccgtttcttccacgcgtatccagaaccctgatcctgccgtgtaccagctgcgggatagcaagagcagcgacaagagcgtgtgtctgttcaccgacttcgacagccagaccaacgtgtcccagagcaaggactccgacgtgtacatcaccgataagtgcgtgctggacatgcggagcatggacttcaagagcaactccgccgtggcctggtccaacaagtccgatttcgcctgcgccaacgccttcaacaacagcattatccccgaggacacattcttcccaagcagcgacgtgccctgcggtacccagagttttgggttgttggaccctaaattgtgctatctgttggacggaatcctgttcatttacggagtgatcctgaccgcattgttcctgcgggttaagttttccagatccgcagacgcacccgcttaccaacaagggcagaaccaactctacaatgaacttaatttggggcggagggaagagtacgacgttctggacaaaaggaggggacgagatcccgagatgggcggaaagcctcagcgaaggaagaatccgcaagaggggctttataacgaactccagaaagataaaatggcagaagcctatagtgagattgggatgaagggagaaaggaggaggggtaaaggtcacgatgggttgtaccaaggattgagcacagccactaaagatacctatgatgcgctccacatgcaggccctgccgccaaga

SEQ ID NO: 6925 - DNA, 2691 bp, Artificial Sequence
  Synthetic Polynucloetide
atggccttaccagtgaccgccttgctcctgccgctggccttgctgctccacgccgccaggccggaggtgcagctggttgaatctggcggaggactggttcagcctggcggatctctgagactgtcttgtgccgccagcggcttcaacatcaaggatacctgtatcggctgggttcgcagagcccctggcaaagaggaagaactggtcgccaaaatctgcaagtacagcggccacaccagatacgccgacagcgtgaagggcagattcaccatcagcgccgacaccagcaagaacaccgcctacctccagatgaacagcctgagagccgaggacaccgccgtgtactattgtgccgctgtgtccgtcagagatgggcactacaattactggggccagggcaccaccgtgaccgtttcttcactcgaggggaaaccaattcccaaccctcttctgggactggattcaaccggcagcggcgaggacctgaagaacgtgttcccacctgaggtggccgtgttcgagcctagcgaggccgagatcagccacacccagaaagccaccctcgtgtgcctggctaccggcttctaccccgaccatgtggaactgtcttggtgggtcaacggcaaagaggtgcacagcggcgtgtctaccgacccccagccactgaaagaacagcccgccctgaacgacagccggtactgcctgagcagcagactgagagtgtccgccaccttctggcagaacccccggaaccacttcagatgccaggtgcagttctacggcctgagcgagaacgacgagtggacccaggacagagccaagcccgtgacccagatcgtgtctgccgaagcctggggcagagccgattgcggatcccagagcttcggcctgctggaccccaagctgtgctacctgctggatggcatcctgttcatctacggcgtgatcctgaccgccctgttcctgagagtgaagttcagcagaagcgccgacgcccctgcctaccagcagggacagaaccaactgtacaacgagctgaacctgggcagacgggaagagtacgacgtgctggacaagcggagaggcagggaccctgagatgggcggaaagccccagcggagaaagaacccccaggaaggactgtataacgaactccagaaagacaagatggccgaagcctacagcgagatcggcatgaagggcgagcggagaagaggcaagggccacgatggcctgtaccagggcctgagcaccgccaccaaggacacctatgacgccctgcacatgcaggccctgcctccaagaagggccaagcgatctggatctggagcaacaaacttctcactactcaaacaagcaggtgacgtggaggagaatcccgggcctactagtatggactggatttggcgcatccttttccttgtcggcgctgctaccggcgcgcattccttcgaagtgcagctgcttgaaagtggcggcggactgattcagcctggcggatctctgagactgagctgtgccgccagcggcttcaccttttctagccacgccatgacctgggtccgacaggcacctggaaaagggcttgaatgggtgtccgccatcagcggctctggcgattacacacactacgccgacagcgtgaagggcagattcaccatcagcagagacaacagcaagaacaccgtgtacctccagatgaacagcctgagagccgaggacagcgccgtgtattattgcgccaaggatgaggatggcggcagcctgcttggacacagaggacaaggcaccctggtcaccgtttcttccacgcgtgagcagaaactgatctcggaagaggatgggagcggcatccagaaccctgatcctgccgtgtaccagctgcgggatagcaagagcagcgacaagagcgtgtgtctgttcaccgacttcgacagccagaccaacgtgtcccagagcaaggactccgacgtgtacatcaccgataagaccgtgctggacatgcggagcatggacttcaagagcaactccgccgtggcctggtccaacaagtccgatttcgcctgcgccaacgccttcaacaacagcattatccccgaggacacattcttcccaagccccgagagcagctgcggtacccagagttttgggttgttggaccctaaattgtgctatctgttggacggaatcctgttcatttacggagtgatcctgaccgcattgttcctgaggagcaagcggtcacggctgctccacagcgattacatgaatatgacaccacgaagaccgggtcctactcgcaaacactaccaaccctacgcacctccccgcgactttgcagcgtaccgatctcgggttaagttttccagatccgcagacgcacccgcttaccaacaagggcagaaccaactctacaatgaacttaatttggggcggagggaagagtacgacgttctggacaaaaggaggggacgagatcccgagatgggcggaaagcctcagcgaaggaagaatccgcaagaggggctttataacgaactccagaaagataaaatggcagaagcctatagtgagattgggatgaagggagaaaggaggaggggtaaaggtcacgatgggttgtaccaaggattgagcacagccactaaagatacctatgatgcgctccacatgcaggccctgccgccaaga

SEQ ID NO: 6926 - DNA, 2814 bp, Artificial Sequence
  Synthetic Polynucloetide
atggccttaccagtgaccgccttgctcctgccgctggccttgctgctccacgccgccaggccggaggtgcagctggttgaatctggcggaggactggttcagcctggcggatctctgagactgtcttgtgccgccagcggcttcaacatcaaggatacctgtatcggctgggttcgcagagcccctggcaaagaggaagaactggtcgccaaaatctgcaagtacagcggccacaccagatacgccgacagcgtgaagggcagattcaccatcagcgccgacaccagcaagaacaccgcctacctccagatgaacagcctgagagccgaggacaccgccgtgtactattgtgccgctgtgtccgtcagagatgggcactacaattactggggccagggcaccaccgtgaccgtttcttcactcgaggggaaaccaattcccaaccctcttctgggactggattcaaccggcagcggcgaggacctgaagaacgtgttcccacctgaggtggccgtgttcgagcctagcgaggccgagatcagccacacccagaaagccaccctcgtgtgcctggctaccggcttctaccccgaccatgtggaactgtcttggtgggtcaacggcaaagaggtgcacagcggcgtgtctaccgacccccagccactgaaagaacagcccgccctgaacgacagccggtactgcctgagcagcagactgagagtgtccgccaccttctggcagaacccccggaaccacttcagatgccaggtgcagttctacggcctgagcgagaacgacgagtggacccaggacagagccaagcccgtgacccagatcgtgtctgccgaagcctggggcagagccgattgcggatcccagagcttcggcctgctggaccccaagctgtgctacctgctggatggcatcctgttcatctacggcgtgatcctgaccgccctgttcctgaggagtaagaggagcaggctcctgcacagtgactacatgaacatgactccacgccgccccggacccacccgcaagcattaccagccctatgccccaccacgcgacttcgcagcctatcgctccagagtgaagttcagcagaagcgccgacgcccctgcctaccagcagggacagaaccaactgtacaacgagctgaacctgggcagacgggaagagtacgacgtgctggacaagcggagaggcagggaccctgagatgggcggaaagccccagcggagaaagaacccccaggaaggactgtataacgaactccagaaagacaagatggccgaagcctacagcgagatcggcatgaagggcgagcggagaagaggcaagggccacgatggcctgtaccagggcctgagcaccgccaccaaggacacctatgacgccctgcacatgcaggccctgcctccaagaagggccaagcgatctggatctggagcaacaaacttctcactactcaaacaagcaggtgacgtggaggagaatcccgggcctactagtatggactggatttggcgcatccttttccttgtcggcgctgctaccggcgcgcattccttcgaagtgcagctgcttgaaagtggcggcggactgattcagcctggcggatctctgagactgagctgtgccgccagcggcttcaccttttctagccacgccatgacctgggtccgacaggcacctggaaaagggcttgaatgggtgtccgccatcagcggctctggcgattacacacactacgccgacagcgtgaagggcagattcaccatcagcagagacaacagcaagaacaccgtgtacctccagatgaacagcctgagagccgaggacagcgccgtgtattattgcgccaaggatgaggatggcggcagcctgcttggacacagaggacaaggcaccctggtcaccgtttcttccacgcgtgagcagaaactgatctcggaagaggatgggagcggcatccagaaccctgatcctgccgtgtaccagctgcgggatagcaagagcagcgacaagagcgtgtgtctgttcaccgacttcgacagccagaccaacgtgtcccagagcaaggactccgacgtgtacatcaccgataagaccgtgctggacatgcggagcatggacttcaagagcaactccgccgtggcctggtccaacaagtccgatttcgcctgcgccaacgccttcaacaacagcattatccccgaggacacattcttcccaagccccgagagcagctgcggtacccagagttttgggttgttggaccctaaattgtgctatctgttggacggaatcctgttcatttacggagtgatcctgaccgcattgttcctgaggagcaagcggtcacggctgctccacagcgattacatgaatatgacaccacgaagaccgggtcctactcgcaaacactaccaaccctacgcacctccccgcgactttgcagcgtaccgatctcgggttaagttttccagatccgcagacgcacccgcttaccaacaagggcagaaccaactctacaatgaacttaatttggggcggagggaagagtacgacgttctggacaaaaggaggggacgagatcccgagatgggcggaaagcctcagcgaaggaagaatccgcaagaggggctttataacgaactccagaaagataaaatggcagaagcctatagtgagattgggatgaagggagaaaggaggaggggtaaaggtcacgatgggttgtaccaaggattgagcacagccactaaagatacctatgatgcgctccacatgcaggccctgccgccaaga

SEQ ID NO: 6927 - DNA, 2697 bp, Artificial Sequence
  Synthetic Polynucloetide
atggccttaccagtgaccgccttgctcctgccgctggccttgctgctccacgccgccaggccggaggtgcagctggttgaatctggcggaggactggttcagcctggcggatctctgagactgtcttgtgccgccagcggcttcaacatcaaggatacctgtatcggctgggttcgcagagcccctggcaaagaggaagaactggtcgccaaaatctgcaagtacagcggccacaccagatacgccgacagcgtgaagggcagattcaccatcagcgccgacaccagcaagaacaccgcctacctccagatgaacagcctgagagccgaggacaccgccgtgtactattgtgccgctgtgtccgtcagagatgggcactacaattactggggccagggcaccaccgtgaccgtttcttcactcgaggggaaaccaattcccaaccctcttctgggactggattcaaccggcagcggcgaggacctgaagaacgtgttcccacctgaggtggccgtgttcgagcctagcgaggccgagatcagccacacccagaaagccaccctcgtgtgcctggctaccggcttctaccccgaccatgtggaactgtcttggtgggtcaacggcaaagaggtgcacagcggcgtgtctaccgacccccagccactgaaagaacagcccgccctgaacgacagccggtactgcctgagcagcagactgagagtgtccgccaccttctggcagaacccccggaaccacttcagatgccaggtgcagttctacggcctgagcgagaacgacgagtggacccaggacagagccaagcccgtgacccagatcgtgtctgccgaagcctggggcagagccgattgcggatcccagagcttcggcctgctggaccccaagctgtgctacctgctggatggcatcctgttcatctacggcgtgatcctgaccgccctgttcctgagagtgaagttcagcagaagcgccgacgcccctgcctaccagcagggacagaaccaactgtacaacgagctgaacctgggcagacgggaagagtacgacgtgctggacaagcggagaggcagggaccctgagatgggcggaaagccccagcggagaaagaacccccaggaaggactgtataacgaactccagaaagacaagatggccgaagcctacagcgagatcggcatgaagggcgagcggagaagaggcaagggccacgatggcctgtaccagggcctgagcaccgccaccaaggacacctatgacgccctgcacatgcaggccctgcctccaagaagggccaagcgatctggatctggagcaacaaacttctcactactcaaacaagcaggtgacgtggaggagaatcccgggcctactagtatggactggatttggcgcatccttttccttgtcggcgctgctaccggcgcgcattccttcgaagtgcagctgcttgaaagtggcggcggactgattcagcctggcggatctctgagactgagctgtgccgccagcggcttcaccttttctagccacgccatgacctgggtccgacaggcacctggaaaagggcttgaatgggtgtccgccatcagcggctctggcgattacacacactacgccgacagcgtgaagggcagattcaccatcagcagagacaacagcaagaacaccgtgtacctccagatgaacagcctgagagccgaggacagcgccgtgtattattgcgccaaggatgaggatggcggcagcctgcttggacacagaggacaaggcaccctggtcaccgtttcttccacgcgtgagcagaaactgatctcggaagaggatctggggagcggcatccagaaccctgatcctgccgtgtaccagctgcgggatagcaagagcagcgacaagagcgtgtgtctgttcaccgacttcgacagccagaccaacgtgtcccagagcaaggactccgacgtgtacatcaccgataagaccgtgctggacatgcggagcatggacttcaagagcaactccgccgtggcctggtccaacaagtccgatttcgcctgcgccaacgccttcaacaacagcattatccccgaggacacattcttcccaagccccgagagcagctgcggtacccagagttttgggttgttggaccctaaattgtgctatctgttggacggaatcctgttcatttacggagtgatcctgaccgcattgttcctgaagagaggccggaagaagctgctgtacatcttcaagcagcctttcatgcggcccgtgcagaccacccaggaagaggacggctgctcctgccggttccccgaggaagaagaaggcggctgcgagctgcgggttaagttttccagatccgcagacgcacccgcttaccaacaagggcagaaccaactctacaatgaacttaatttggggcggagggaagagtacgacgttctggacaaaaggaggggacgagatcccgagatgggcggaaagcctcagcgaaggaagaatccgcaagaggggctttataacgaactccagaaagataaaatggcagaagcctatagtgagattgggatgaagggagaaaggaggaggggtaaaggtcacgatgggttgtaccaaggattgagcacagccactaaagatacctatgatgcgctccacatgcaggccctgccgccaaga

SEQ ID NO: 6928 - DNA, 2823 bp, Artificial Sequence
  Synthetic Polynucloetide
atggccttaccagtgaccgccttgctcctgccgctggccttgctgctccacgccgccaggccggaggtgcagctggttgaatctggcggaggactggttcagcctggcggatctctgagactgtcttgtgccgccagcggcttcaacatcaaggatacctgtatcggctgggttcgcagagcccctggcaaagaggaagaactggtcgccaaaatctgcaagtacagcggccacaccagatacgccgacagcgtgaagggcagattcaccatcagcgccgacaccagcaagaacaccgcctacctccagatgaacagcctgagagccgaggacaccgccgtgtactattgtgccgctgtgtccgtcagagatgggcactacaattactggggccagggcaccaccgtgaccgtttcttcactcgaggggaaaccaattcccaaccctcttctgggactggattcaaccggcagcggcgaggacctgaagaacgtgttcccacctgaggtggccgtgttcgagcctagcgaggccgagatcagccacacccagaaagccaccctcgtgtgcctggctaccggcttctaccccgaccatgtggaactgtcttggtgggtcaacggcaaagaggtgcacagcggcgtgtctaccgacccccagccactgaaagaacagcccgccctgaacgacagccggtactgcctgagcagcagactgagagtgtccgccaccttctggcagaacccccggaaccacttcagatgccaggtgcagttctacggcctgagcgagaacgacgagtggacccaggacagagccaagcccgtgacccagatcgtgtctgccgaagcctggggcagagccgattgcggatcccagagcttcggcctgctggaccccaagctgtgctacctgctggatggcatcctgttcatctacggcgtgatcctgaccgccctgttcctgaaacggggcagaaagaaactcctgtatatattcaaacaaccatttatgagaccagtacaaactactcaagaggaagatggctgtagctgccgatttccagaagaagaagaaggaggatgtgaactgagagtgaagttcagcagaagcgccgacgcccctgcctaccagcagggacagaaccaactgtacaacgagctgaacctgggcagacgggaagagtacgacgtgctggacaagcggagaggcagggaccctgagatgggcggaaagccccagcggagaaagaacccccaggaaggactgtataacgaactccagaaagacaagatggccgaagcctacagcgagatcggcatgaagggcgagcggagaagaggcaagggccacgatggcctgtaccagggcctgagcaccgccaccaaggacacctatgacgccctgcacatgcaggccctgcctccaagaagggccaagcgatctggatctggagcaacaaacttctcactactcaaacaagcaggtgacgtggaggagaatcccgggcctactagtatggactggatttggcgcatccttttccttgtcggcgctgctaccggcgcgcattccttcgaagtgcagctgcttgaaagtggcggcggactgattcagcctggcggatctctgagactgagctgtgccgccagcggcttcaccttttctagccacgccatgacctgggtccgacaggcacctggaaaagggcttgaatgggtgtccgccatcagcggctctggcgattacacacactacgccgacagcgtgaagggcagattcaccatcagcagagacaacagcaagaacaccgtgtacctccagatgaacagcctgagagccgaggacagcgccgtgtattattgcgccaaggatgaggatggcggcagcctgcttggacacagaggacaaggcaccctggtcaccgtttcttccacgcgtgagcagaaactgatctcggaagaggatctggggagcggcatccagaaccctgatcctgccgtgtaccagctgcgggatagcaagagcagcgacaagagcgtgtgtctgttcaccgacttcgacagccagaccaacgtgtcccagagcaaggactccgacgtgtacatcaccgataagaccgtgctggacatgcggagcatggacttcaagagcaactccgccgtggcctggtccaacaagtccgatttcgcctgcgccaacgccttcaacaacagcattatccccgaggacacattcttcccaagccccgagagcagctgcggtacccagagttttgggttgttggaccctaaattgtgctatctgttggacggaatcctgttcatttacggagtgatcctgaccgcattgttcctgaagagaggccggaagaagctgctgtacatcttcaagcagcctttcatgcggcccgtgcagaccacccaggaagaggacggctgctcctgccggttccccgaggaagaagaaggcggctgcgagctgcgggttaagttttccagatccgcagacgcacccgcttaccaacaagggcagaaccaactctacaatgaacttaatttggggcggagggaagagtacgacgttctggacaaaaggaggggacgagatcccgagatgggcggaaagcctcagcgaaggaagaatccgcaagaggggctttataacgaactccagaaagataaaatggcagaagcctatagtgagattgggatgaagggagaaaggaggaggggtaaaggtcacgatgggttgtaccaaggattgagcacagccactaaagatacctatgatgcgctccacatgcaggccctgccgccaaga

SEQ ID NO: 6929 - DNA, 2496 bp, Artificial Sequence
  Synthetic Polynucloetide
atggccttaccagtgaccgccttgctcctgccgctggccttgctgctccacgccgccaggccggaggtgcagctggttgaatctggcggaggactggttcagcctggcggatctctgagactgtcttgtgccgccagcggcttcaacatcaaggatacctgtatcggctgggttcgcagagcccctggcaaagaggaagaactggtcgccaaaatctgcaagtacagcggccacaccagatacgccgacagcgtgaagggcagattcaccatcagcgccgacaccagcaagaacaccgcctacctccagatgaacagcctgagagccgaggacaccgccgtgtactattgtgccgctgtgtccgtcagagatgggcactacaattactggggccagggcaccaccgtgaccgtttcttcactcgagcagagcttcggcctgctggaccccaagctgtgctacctgctggatggcatcctgttcatctacggcgtgatcctgaccgccctgttcctgagagtgaagttcagcagaagcgccgacgcccctgcctaccagcagggacagaaccaactgtacaacgagctgaacctgggcagacgggaagagtacgacgtgctggacaagcggagaggcagggaccctgagatgggcggaaagccccagcggagaaagaacccccaggaaggactgtataacgaactccagaaagacaagatggccgaagcctacagcgagatcggcatgaagggcgagcggagaagaggcaagggccacgatggcctgtaccagggcctgagcaccgccaccaaggacacctatgacgccctgcacatgcaggccctgcctccaagaagggccaagcgatctggatctggagcaacaaacttctcactactcaaacaagcaggtgacgtggaggagaatcccgggcctactagtatggactggatttggcgcatccttttccttgtcggcgctgctaccggcgcgcattccttcgaagtgcagctgcttgaaagtggcggcggactgattcagcctggcggatctctgagactgagctgtgccgccagcggcttcaccttttctagccacgccatgacctgggtccgacaggcacctggaaaagggcttgaatgggtgtccgccatcagcggctctggcgattacacacactacgccgacagcgtgaagggcagattcaccatcagcagagacaacagcaagaacaccgtgtacctccagatgaacagcctgagagccgaggacagcgccgtgtattattgcgccaaggatgaggatggcggcagcctgcttggacacagaggacaaggcaccctggtcaccgtttcttccacgcgtcagagttttgggttgttggaccctaaattgtgctatctgttggacggaatcctgttcatttacggagtgatcctgaccgcattgttcctgcgggttaagttttccagatccgcagacgcacccgcttaccaacaagggcagaaccaactctacaatgaacttaatttggggcggagggaagagtacgacgttctggacaaaaggaggggacgagatcccgagatgggcggaaagcctcagcgaaggaagaatccgcaagaggggctttataacgaactccagaaagataaaatggcagaagcctatagtgagattgggatgaagggagaaaggaggaggggtaaaggtcacgatgggttgtaccaaggattgagcacagccactaaagatacctatgatgcgctccacatgcaggccctgccgccaagacgcgccaagagaagcggatctggcgtgaagcagaccctgaatttcgacctgctgaagctggctggcgacgtggaatccaacccaggcccttctagaggccatatgaccgagtacaagcccacggtgcgcctcgccacccgcgacgacgtccccagggccgtacgcaccctcgccgccgcgttcgccgactaccccgccacgcgccacaccgtcgatccggaccgccacatcgagcgggtcaccgagctgcaagaactcttcctcacgcgcgtcgggctcgacatcggcaaggtgtgggtcgcggacgacggcgccgcggtggcggtctggaccacgccggagagcgtcgaagcgggggcggtgttcgccgagatcggcccgcgcatggccgagttgagcggttcccggctggccgcgcagcaacagatggaaggcctcctggcgccgcaccggcccaaggagcccgcgtggttcctggccaccgtcggcgtctcgcccgaccaccagggcaagggtctgggcagcgccgtcgtgctccccggagtggaggcggccgagcgcgccggggtgcccgccttcctggagacctccgcgccccgcaacctccccttctacgagcggctcggcttcaccgtcaccgccgacgtcgaggtgcccgaaggaccgcgcacctggtgcatgacccgcaagcccggtgcctga

SEQ ID NO: 6930 - DNA, 1968 bp, Artificial Sequence
  Synthetic Polynucloetide
atggccttaccagtgaccgccttgctcctgccgctggccttgctgctccacgccgccaggccggaggtgcagctggttgaatctggcggaggactggttcagcctggcggatctctgagactgtcttgtgccgccagcggcttcaacatcaaggatacctgtatcggctgggttcgcagagcccctggcaaagaggaagaactggtcgccaaaatctgcaagtacagcggccacaccagatacgccgacagcgtgaagggcagattcaccatcagcgccgacaccagcaagaacaccgcctacctccagatgaacagcctgagagccgaggacaccgccgtgtactattgtgccgctgtgtccgtcagagatgggcactacaattactggggccagggcaccaccgtgaccgtttcttcactcgagggacagcctaaggccaatcctaccgtgacactgttccctccaagcagcgaagaactccaggccaacaaggccacacttgtgtgcctgatctccgacttctaccctggggctgtgacagtggcttggaaggccgatggatctcctgtgaaagccggcgtggaaaccaccaagccatccaagcagagcaacaacaaatacgccgccagctcctacctgagcctgacacctgagcagtggaagtcccacagatcctacagctgccaagtgacccacgaaggcagcaccgtggaaaagacagtggcccctacagagtgcagccccatcaagaccgatgtgattacaatggaccccaaggacaactgctccaaggacgccaacgataccctgctgctccagctgaccaacaccagcgcctactacatgtacttgttgctgctgctgaagtccgtggtgtacttcgccatcatcacatgctgcctgctgcggagaaccgccttctgctgcaacggcgagaagtctagggccaagcgatctggatctggagcaacaaacttctcactactcaaacaagcaggtgacgtggaggagaatcccgggcctactagtatggactggatttggcgcatccttttccttgtcggcgctgctaccggcgcgcattccttcgaagtgcagctgcttgaaagtggcggcggactgattcagcctggcggatctctgagactgagctgtgccgccagcggcttcaccttttctagccacgccatgacctgggtccgacaggcacctggaaaagggcttgaatgggtgtccgccatcagcggctctggcgattacacacactacgccgacagcgtgaagggcagattcaccatcagcagagacaacagcaagaacaccgtgtacctccagatgaacagcctgagagccgaggacagcgccgtgtattattgcgccaaggatgaggatggcggcagcctgcttggacacagaggacaaggcaccctggtcaccgtttcttccacgcgtgcctctacaaagggaccctccgtgtttcctctggctcccagcagcaagtctacaagcggaggaacagccgctctgggctgcctggtcaaggattactttcccgagcctgtgaccgtgtcctggaatagcggagcactgacaagcggcgtgcacacctttccagccgtgctgcaaagcagcggcctgtactctctgagcagcgtggtcacagtgcctagctctagcctgggcacccagacctacatctgcaatgtgaaccacaagcctagcaacaccaaggtggacaagagagtggaacccaagagctgtgaagtgaaaaccgactccaccgaccacgtgaagcccaaagagacagagaacaccaagcagcccagcaagagctgccacaagcccaaggccatcgtgcacaccgagaaagtgaacatgatgagcctgaccgtgctgggcctgcggatgctgttcgccaaaaccgtggccgtgaacttcctgctgaccgccaagctgttcttcctc

SEQ ID NO: 6931 - DNA, 1902 bp, Artificial Sequence
  Synthetic Polynucloetide
atggccttaccagtgaccgccttgctcctgccgctggccttgctgctccacgccgccaggccggaggtgcagctggttgaatctggcggaggactggttcagcctggcggatctctgagactgtcttgtgccgccagcggcttcaacatcaaggatacctgtatcggctgggttcgcagagcccctggcaaagaggaagaactggtcgccaaaatctgcaagtacagcggccacaccagatacgccgacagcgtgaagggcagattcaccatcagcgccgacaccagcaagaacaccgcctacctccagatgaacagcctgagagccgaggacaccgccgtgtactattgtgccgctgtgtccgtcagagatgggcactacaattactggggccagggcaccaccgtgaccgtttcttcactcgagggacagcctaaggccaatcctaccgtgacactgttccctccaagcagcgaagaactccaggccaacaaggccacacttgtgtgcctgatctccgacttctaccctggggctgtgacagtggcttggaaggccgatggatctcctgtgaaagccggcgtggaaaccaccaagccatccaagcagagcaacaacaaatacgccgccagctcctacctgagcctgacacctgagcagtggaagtcccacagatcctacagctgccaagtgacccacgaaggcagcaccgtggaaaagacagtggcccctacagagtgcagcggcagagccgattgcggcatcaccagcgccagctaccaccagggcgtgctgagcgccaccatcctgtacgagatcctgctgggcaaggccaccctgtacgccgtgctggtgtctgccctggtgctgatggctatggtcaagcggaaggacagccggggaagggccaagcgatctggatctggagcaacaaacttctcactactcaaacaagcaggtgacgtggaggagaatcccgggcctactagtatggactggatttggcgcatccttttccttgtcggcgctgctaccggcgcgcattccttcgaagtgcagctgcttgaaagtggcggcggactgattcagcctggcggatctctgagactgagctgtgccgccagcggcttcaccttttctagccacgccatgacctgggtccgacaggcacctggaaaagggcttgaatgggtgtccgccatcagcggctctggcgattacacacactacgccgacagcgtgaagggcagattcaccatcagcagagacaacagcaagaacaccgtgtacctccagatgaacagcctgagagccgaggacagcgccgtgtattattgcgccaaggatgaggatggcggcagcctgcttggacacagaggacaaggcaccctggtcaccgtttcttccacgcgtgcctctacaaagggaccctccgtgtttcctctggctcccagcagcaagtctacaagcggaggaacagccgctctgggctgcctggtcaaggattactttcccgagcctgtgaccgtgtcctggaatagcggagcactgacaagcggcgtgcacacctttccagccgtgctgcaaagcagcggcctgtactctctgagcagcgtggtcacagtgcctagctctagcctgggcacccagacctacatctgcaatgtgaaccacaagcctagcaacaccaaggtggacaagagagtggaacccaagagctgtatccccgaggacacattcttcccaagcagcgacgtgccctgcgacgtgaagctggtggaaaagagcttcgagacagacaccaacctgaacttccagaacctgagcgtgatcggcttcagaatcctgctgctgaaagtggccggctttaacctgctgatgaccctgcggctgtggtccagc

SEQ ID NO: 6932 - DNA, 1902 bp, Artificial Sequence
  Synthetic Polynucloetide
atggccttaccagtgaccgccttgctcctgccgctggccttgctgctccacgccgccaggccggaggtgcagctggttgaatctggcggaggactggttcagcctggcggatctctgagactgtcttgtgccgccagcggcttcaacatcaaggatacctgtatcggctgggttcgcagagcccctggcaaagaggaagaactggtcgccaaaatctgcaagtacagcggccacaccagatacgccgacagcgtgaagggcagattcaccatcagcgccgacaccagcaagaacaccgcctacctccagatgaacagcctgagagccgaggacaccgccgtgtactattgtgccgctgtgtccgtcagagatgggcactacaattactggggccagggcaccaccgtgaccgtttcttcactcgagggacagcctaaggccaatcctaccgtgacactgttccctccaagcagcgaagaactccaggccaacaaggccacacttgtgtgcctgatctccgacttctaccctggggctgtgacagtggcttggaaggccgatggatctcctgtgaaagccggcgtggaaaccaccaagccatccaagcagagcaacaacaaatacgccgccagctcctacctgagcctgacacctgagcagtggaagtcccacagatcctacagctgccaagtgacccacgaaggcagcaccgtggaaaagacagtggcccctacagagtgcagcggcagagccgattgcggctttaccagcgagagctaccagcagggcgtgctgagcgccaccatcctgtacgagatcctgctgggcaaggccaccctgtacgccgtgctggtgtctgccctggtgctgatggctatggtcaagcggaaggacagccggggaagggccaagcgatctggatctggagcaacaaacttctcactactcaaacaagcaggtgacgtggaggagaatcccgggcctactagtatggactggatttggcgcatccttttccttgtcggcgctgctaccggcgcgcattccttcgaagtgcagctgcttgaaagtggcggcggactgattcagcctggcggatctctgagactgagctgtgccgccagcggcttcaccttttctagccacgccatgacctgggtccgacaggcacctggaaaagggcttgaatgggtgtccgccatcagcggctctggcgattacacacactacgccgacagcgtgaagggcagattcaccatcagcagagacaacagcaagaacaccgtgtacctccagatgaacagcctgagagccgaggacagcgccgtgtattattgcgccaaggatgaggatggcggcagcctgcttggacacagaggacaaggcaccctggtcaccgtttcttccacgcgtgcctctacaaagggaccctccgtgtttcctctggctcccagcagcaagtctacaagcggaggaacagccgctctgggctgcctggtcaaggattactttcccgagcctgtgaccgtgtcctggaatagcggagcactgacaagcggcgtgcacacctttccagccgtgctgcaaagcagcggcctgtactctctgagcagcgtggtcacagtgcctagctctagcctgggcacccagacctacatctgcaatgtgaaccacaagcctagcaacaccaaggtggacaagagagtggaacccaagagctgtatccccgaggacacattcttcccaagccccgagagcagctgcgacgtgaagctggtggaaaagagcttcgagacagacaccaacctgaacttccagaacctgagcgtgatcggcttcagaatcctgctgctgaaagtggccggctttaacctgctgatgaccctgcggctgtggtccagc

SEQ ID NO: 6933 - DNA, 1365 bp, Artificial Sequence
  Synthetic Polynucloetide
atggccttaccagtgaccgccttgctcctgccgctggccttgctgctccacgccgccaggccggaggtgcagctggttgaatctggcggaggactggttcagcctggcggatctctgagactgtcttgtgccgccagcggcttcaacatcaaggatacctgtatcggctgggttcgcagagcccctggcaaagaggaagaactggtcgccaaaatctgcaagtacagcggccacaccagatacgccgacagcgtgaagggcagattcaccatcagcgccgacaccagcaagaacaccgcctacctccagatgaacagcctgagagccgaggacaccgccgtgtactattgtgccgctgtgtccgtcagagatgggcactacaattactggggccagggcaccaccgtgaccgtttcttcactcgagagcggcggaggcggatctttcgaagtgcagctgcttgaaagtggcggcggactgattcagcctggcggatctctgagactgagctgtgccgccagcggcttcaccttttctagccacgccatgacctgggtccgacaggcacctggaaaagggcttgaatgggtgtccgccatcagcggctctggcgattacacacactacgccgacagcgtgaagggcagattcaccatcagcagagacaacagcaagaacaccgtgtacctccagatgaacagcctgagagccgaggacagcgccgtgtattattgcgccaaggatgaggatggcggcagcctgcttggacacagaggacaaggcaccctggtcaccgtttcttccacgcgtgacggtaacgaggagatgggaggaatcactcaaaccccttacaaagtctcaatttcaggaacaactgttatccttacatgtccccagtatcctggcagcgagatcctttggcagcataacgacaagaatatagggggagatgaagacgataagaatatcggatctgacgaggatcacttgagcctgaaagagttctccgagcttgaacaaagcggatattatgtgtgctatccgcgcgggtcaaagccggaagacgctaacttttacctttatctccgagccagagtgtgcgaaaattgcatggaaatggacgttatgtccgttgctacaatagttatcgtagatatatgcatcacgggtggactgcttctgctggtttattattggtccaagaatagaaaggccaaagctaaacccgtgaccagaggcgctggcgcaggcggaaggcaaaggggacaaaacaaagaacggccaccaccagtgccaaatccagattatgagcctattcggaaaggacagagggacctgtactctggcctgaatcagagaagaatc

SEQ ID NO: 6934 - DNA, 1260 bp, Artificial Sequence
  Synthetic Polynucloetide
atggccttaccagtgaccgccttgctcctgccgctggccttgctgctccacgccgccaggccggaggtgcagctggttgaatctggcggaggactggttcagcctggcggatctctgagactgtcttgtgccgccagcggcttcaacatcaaggatacctgtatcggctgggttcgcagagcccctggcaaagaggaagaactggtcgccaaaatctgcaagtacagcggccacaccagatacgccgacagcgtgaagggcagattcaccatcagcgccgacaccagcaagaacaccgcctacctccagatgaacagcctgagagccgaggacaccgccgtgtactattgtgccgctgtgtccgtcagagatgggcactacaattactggggccagggcaccaccgtgaccgtttcttcactcgagagcggcggaggcggatctttcgaagtgcagctgcttgaaagtggcggcggactgattcagcctggcggatctctgagactgagctgtgccgccagcggcttcaccttttctagccacgccatgacctgggtccgacaggcacctggaaaagggcttgaatgggtgtccgccatcagcggctctggcgattacacacactacgccgacagcgtgaagggcagattcaccatcagcagagacaacagcaagaacaccgtgtacctccagatgaacagcctgagagccgaggacagcgccgtgtattattgcgccaaggatgaggatggcggcagcctgcttggacacagaggacaaggcaccctggtcaccgtttcttccacgcgtttcaagatccccatcgaggaactggaagatcgggtgttcgtgaactgcaacacctctatcacctgggtggaaggcaccgtgggaacactgctgagcgacatcaccagactggacctcggcaagcggattctggaccctcggggcatctacagatgcaacggcaccgacatctacaaggacaaagaaagcaccgtgcaggtccactacagaatgtgccagtcctgcgtggaactggaccctgctacagtggccggcatcatcgtgaccgatgtgatcgctactctgctgctggctctgggagtgttctgcttcgccggacacgaaacaggcagactgtctggcgctgccgatacacaggccctgctgagaaacgaccaagtgtatcagcccctgcgcgacagagatgatgcccagtattctcacctcggcggcaactgggctagaaacaag

SEQ ID NO: 6935 - DNA, 1290 bp, Artificial Sequence
  Synthetic Polynucloetide
atggccttaccagtgaccgccttgctcctgccgctggccttgctgctccacgccgccaggccggaggtgcagctggttgaatctggcggaggactggttcagcctggcggatctctgagactgtcttgtgccgccagcggcttcaacatcaaggatacctgtatcggctgggttcgcagagcccctggcaaagaggaagaactggtcgccaaaatctgcaagtacagcggccacaccagatacgccgacagcgtgaagggcagattcaccatcagcgccgacaccagcaagaacaccgcctacctccagatgaacagcctgagagccgaggacaccgccgtgtactattgtgccgctgtgtccgtcagagatgggcactacaattactggggccagggcaccaccgtgaccgtttcttcactcgagagcggcggaggcggatctttcgaagtgcagctgcttgaaagtggcggcggactgattcagcctggcggatctctgagactgagctgtgccgccagcggcttcaccttttctagccacgccatgacctgggtccgacaggcacctggaaaagggcttgaatgggtgtccgccatcagcggctctggcgattacacacactacgccgacagcgtgaagggcagattcaccatcagcagagacaacagcaagaacaccgtgtacctccagatgaacagcctgagagccgaggacagcgccgtgtattattgcgccaaggatgaggatggcggcagcctgcttggacacagaggacaaggcaccctggtcaccgtttcttccacgcgtcagagcatcaagggcaaccacctggtcaaggtgtacgactaccaagaggacggcagcgtgctgctgacatgtgatgccgaggccaagaacatcacctggtttaaggacggcaagatgatcggcttcctgaccgaggacaagaagaagtggaacctgggcagcaacgctaaggaccccagaggcatgtatcagtgcaagggcagccagaacaagagcaagcccctccaggtgtactaccggatgtgccagaactgcatcgagctgaacgccgctaccatcagcggctttctgttcgccgagatcgtgtccatcttcgtgctggccgtgggcgtgtactttatcgctggacaggatggcgtgcggcagagcagagcttccgataagcaaaccctgctgcctaacgaccagctgtaccagcctctgaaggacagagaggacgaccagtacagccacctccagggcaatcagctgagaagaaac

SEQ ID NO: 6936 - DNA, 1239 bp, Artificial Sequence
  Synthetic Polynucloetide
atggccttaccagtgaccgccttgctcctgccgctggccttgctgctccacgccgccaggccggaggtgcagctggttgaatctggcggaggactggttcagcctggcggatctctgagactgtcttgtgccgccagcggcttcaacatcaaggatacctgtatcggctgggttcgcagagcccctggcaaagaggaagaactggtcgccaaaatctgcaagtacagcggccacaccagatacgccgacagcgtgaagggcagattcaccatcagcgccgacaccagcaagaacaccgcctacctccagatgaacagcctgagagccgaggacaccgccgtgtactattgtgccgctgtgtccgtcagagatgggcactacaattactggggccagggcaccaccgtgaccgtttcttcactcgagagcggcggaggcggatctttcgaagtgcagctgcttgaaagtggcggcggactgattcagcctggcggatctctgagactgagctgtgccgccagcggcttcaccttttctagccacgccatgacctgggtccgacaggcacctggaaaagggcttgaatgggtgtccgccatcagcggctctggcgattacacacactacgccgacagcgtgaagggcagattcaccatcagcagagacaacagcaagaacaccgtgtacctccagatgaacagcctgagagccgaggacagcgccgtgtattattgcgccaaggatgaggatggcggcagcctgcttggacacagaggacaaggcaccctggtcaccgtttcttccacgcgtcagagttttgggttgttggaccctaaattgtgctatctgttggacggaatcctgttcatttacggagtgatcctgaccgcattgttcctgcgggttaagttttccagatccgcagacgcacccgcttaccaacaagggcagaaccaactctacaatgaacttaatttggggcggagggaagagtacgacgttctggacaaaaggaggggacgagatcccgagatgggcggaaagcctcagcgaaggaagaatccgcaagaggggctttataacgaactccagaaagataaaatggcagaagcctatagtgagattgggatgaagggagaaaggaggaggggtaaaggtcacgatgggttgtaccaaggattgagcacagccactaaagatacctatgatgcgctccacatgcaggccctgccgccaaga

SEQ ID NO: 6937 - DNA, 1368 bp, Artificial Sequence
  Synthetic Polynucloetide
atggccttaccagtgaccgccttgctcctgccgctggccttgctgctccacgccgccaggccggaagtgcagctgcttgaaagtggcggcggactgattcagcctggcggatctctgagactgagctgtgccgccagcggcttcaccttttctagccacgccatgacctgggtccgacaggcacctggaaaagggcttgaatgggtgtccgccatcagcggctctggcgattacacacactacgccgacagcgtgaagggcagattcaccatcagcagagacaacagcaagaacaccgtgtacctccagatgaacagcctgagagccgaggacagcgccgtgtattattgcgccaaggatgaggatggcggcagcctgcttggacacagaggacaaggcaccctggtcaccgtttcttccctcgagagcggcggaggcggatctttcgaagaggtgcagctggttgaatctggcggaggactggttcagcctggcggatctctgagactgtcttgtgccgccagcggcttcaacatcaaggatacctgtatcggctgggttcgcagagcccctggcaaagaggaagaactggtcgccaaaatctgcaagtacagcggccacaccagatacgccgacagcgtgaagggcagattcaccatcagcgccgacaccagcaagaacaccgcctacctccagatgaacagcctgagagccgaggacaccgccgtgtactattgtgccgctgtgtccgtcagagatgggcactacaattactggggccagggcaccaccgtgaccgtttcttcaacgcgtgacggtaacgaggagatgggaggaatcactcaaaccccttacaaagtctcaatttcaggaacaactgttatccttacatgtccccagtatcctggcagcgagatcctttggcagcataacgacaagaatatagggggagatgaagacgataagaatatcggatctgacgaggatcacttgagcctgaaagagttctccgagcttgaacaaagcggatattatgtgtgctatccgcgcgggtcaaagccggaagacgctaacttttacctttatctccgagccagagtgtgcgaaaattgcatggaaatggacgttatgtccgttgctacaatagttatcgtagatatatgcatcacgggtggactgcttctgctggtttattattggtccaagaatagaaaggccaaagctaaacccgtgaccagaggcgctggcgcaggcggaaggcaaaggggacaaaacaaagaacggccaccaccagtgccaaatccagattatgagcctattcggaaaggacagagggacctgtactctggcctgaatcagagaagaatc

SEQ ID NO: 6938 - DNA, 1263 bp, Artificial Sequence
  Synthetic Polynucloetide
atggccttaccagtgaccgccttgctcctgccgctggccttgctgctccacgccgccaggccggaagtgcagctgcttgaaagtggcggcggactgattcagcctggcggatctctgagactgagctgtgccgccagcggcttcaccttttctagccacgccatgacctgggtccgacaggcacctggaaaagggcttgaatgggtgtccgccatcagcggctctggcgattacacacactacgccgacagcgtgaagggcagattcaccatcagcagagacaacagcaagaacaccgtgtacctccagatgaacagcctgagagccgaggacagcgccgtgtattattgcgccaaggatgaggatggcggcagcctgcttggacacagaggacaaggcaccctggtcaccgtttcttccctcgagagcggcggaggcggatctttcgaagaggtgcagctggttgaatctggcggaggactggttcagcctggcggatctctgagactgtcttgtgccgccagcggcttcaacatcaaggatacctgtatcggctgggttcgcagagcccctggcaaagaggaagaactggtcgccaaaatctgcaagtacagcggccacaccagatacgccgacagcgtgaagggcagattcaccatcagcgccgacaccagcaagaacaccgcctacctccagatgaacagcctgagagccgaggacaccgccgtgtactattgtgccgctgtgtccgtcagagatgggcactacaattactggggccagggcaccaccgtgaccgtttcttcaacgcgtttcaagatccccatcgaggaactggaagatcgggtgttcgtgaactgcaacacctctatcacctgggtggaaggcaccgtgggaacactgctgagcgacatcaccagactggacctcggcaagcggattctggaccctcggggcatctacagatgcaacggcaccgacatctacaaggacaaagaaagcaccgtgcaggtccactacagaatgtgccagtcctgcgtggaactggaccctgctacagtggccggcatcatcgtgaccgatgtgatcgctactctgctgctggctctgggagtgttctgcttcgccggacacgaaacaggcagactgtctggcgctgccgatacacaggccctgctgagaaacgaccaagtgtatcagcccctgcgcgacagagatgatgcccagtattctcacctcggcggcaactgggctagaaacaag

SEQ ID NO: 6939 - DNA, 1293 bp, Artificial Sequence
  Synthetic Polynucloetide
atggccttaccagtgaccgccttgctcctgccgctggccttgctgctccacgccgccaggccggaagtgcagctgcttgaaagtggcggcggactgattcagcctggcggatctctgagactgagctgtgccgccagcggcttcaccttttctagccacgccatgacctgggtccgacaggcacctggaaaagggcttgaatgggtgtccgccatcagcggctctggcgattacacacactacgccgacagcgtgaagggcagattcaccatcagcagagacaacagcaagaacaccgtgtacctccagatgaacagcctgagagccgaggacagcgccgtgtattattgcgccaaggatgaggatggcggcagcctgcttggacacagaggacaaggcaccctggtcaccgtttcttccctcgagagcggcggaggcggatctttcgaagaggtgcagctggttgaatctggcggaggactggttcagcctggcggatctctgagactgtcttgtgccgccagcggcttcaacatcaaggatacctgtatcggctgggttcgcagagcccctggcaaagaggaagaactggtcgccaaaatctgcaagtacagcggccacaccagatacgccgacagcgtgaagggcagattcaccatcagcgccgacaccagcaagaacaccgcctacctccagatgaacagcctgagagccgaggacaccgccgtgtactattgtgccgctgtgtccgtcagagatgggcactacaattactggggccagggcaccaccgtgaccgtttcttcaacgcgtcagagcatcaagggcaaccacctggtcaaggtgtacgactaccaagaggacggcagcgtgctgctgacatgtgatgccgaggccaagaacatcacctggtttaaggacggcaagatgatcggcttcctgaccgaggacaagaagaagtggaacctgggcagcaacgctaaggaccccagaggcatgtatcagtgcaagggcagccagaacaagagcaagcccctccaggtgtactaccggatgtgccagaactgcatcgagctgaacgccgctaccatcagcggctttctgttcgccgagatcgtgtccatcttcgtgctggccgtgggcgtgtactttatcgctggacaggatggcgtgcggcagagcagagcttccgataagcaaaccctgctgcctaacgaccagctgtaccagcctctgaaggacagagaggacgaccagtacagccacctccagggcaatcagctgagaagaaac

SEQ ID NO: 6940 - DNA, 1242 bp, Artificial Sequence
  Synthetic Polynucloetide
atggccttaccagtgaccgccttgctcctgccgctggccttgctgctccacgccgccaggccggaagtgcagctgcttgaaagtggcggcggactgattcagcctggcggatctctgagactgagctgtgccgccagcggcttcaccttttctagccacgccatgacctgggtccgacaggcacctggaaaagggcttgaatgggtgtccgccatcagcggctctggcgattacacacactacgccgacagcgtgaagggcagattcaccatcagcagagacaacagcaagaacaccgtgtacctccagatgaacagcctgagagccgaggacagcgccgtgtattattgcgccaaggatgaggatggcggcagcctgcttggacacagaggacaaggcaccctggtcaccgtttcttccctcgagagcggcggaggcggatctttcgaagaggtgcagctggttgaatctggcggaggactggttcagcctggcggatctctgagactgtcttgtgccgccagcggcttcaacatcaaggatacctgtatcggctgggttcgcagagcccctggcaaagaggaagaactggtcgccaaaatctgcaagtacagcggccacaccagatacgccgacagcgtgaagggcagattcaccatcagcgccgacaccagcaagaacaccgcctacctccagatgaacagcctgagagccgaggacaccgccgtgtactattgtgccgctgtgtccgtcagagatgggcactacaattactggggccagggcaccaccgtgaccgtttcttcaacgcgtcagagttttgggttgttggaccctaaattgtgctatctgttggacggaatcctgttcatttacggagtgatcctgaccgcattgttcctgcgggttaagttttccagatccgcagacgcacccgcttaccaacaagggcagaaccaactctacaatgaacttaatttggggcggagggaagagtacgacgttctggacaaaaggaggggacgagatcccgagatgggcggaaagcctcagcgaaggaagaatccgcaagaggggctttataacgaactccagaaagataaaatggcagaagcctatagtgagattgggatgaagggagaaaggaggaggggtaaaggtcacgatgggttgtaccaaggattgagcacagccactaaagatacctatgatgcgctccacatgcaggccctgccgccaaga

SEQ ID NO: 6941 - DNA, 1941 bp, Artificial Sequence
  Synthetic Polynucloetide
atggccttaccagtgaccgccttgctcctgccgctggccttgctgctccacgccgccaggccggaggtgcagctggttgaatctggcggaggactggttcagcctggcggatctctgagactgtcttgtgccgccagcggcttcaacatcaaggatacctgtatcggctgggttcgcagagcccctggcaaagaggaagaactggtcgccaaaatctgcaagtacagcggccacaccagatacgccgacagcgtgaagggcagattcaccatcagcgccgacaccagcaagaacaccgcctacctccagatgaacagcctgagagccgaggacaccgccgtgtactattgtgccgctgtgtccgtcagagatgggcactacaattactggggccagggcaccaccgtgaccgtttcttcactcgagagcggcggaggcggatctttcgaagtgcagctgcttgaaagtggcggcggactgattcagcctggcggatctctgagactgagctgtgccgccagcggcttcaccttttctagccacgccatgacctgggtccgacaggcacctggaaaagggcttgaatgggtgtccgccatcagcggctctggcgattacacacactacgccgacagcgtgaagggcagattcaccatcagcagagacaacagcaagaacaccgtgtacctccagatgaacagcctgagagccgaggacagcgccgtgtattattgcgccaaggatgaggatggcggcagcctgcttggacacagaggacaaggcaccctggtcaccgtttcttccacgcgtgggagcggcatccagaaccctgatcctgccgtgtaccagctgcgggatagcaagagcagcgacaagagcgtgtgtctgttcaccgacttcgacagccagaccaacgtgtcccagagcaaggactccgacgtgtacatcaccgataagaccgtgctggacatgcggagcatggacttcaagagcaactccgccgtggcctggtccaacaagtccgatttcgcctgcgccaacgccttcaacaacagcattatccccgaggacacattcttcccaagccccgagagcagctgcgacgtgaagctggtggaaaagagcttcgagacagacaccaacctgaacttccagaacctgagcgtgatcggcttcagaatcctgctgctgaaagtggccggctttaacctgctgatgaccctgcggctgtggtccagccgcgccaagagaagcggatctggcgtgaagcagaccctgaatttcgacctgctgaagctggctggcgacgtggaatccaacccaggcccttctagaggccatatgaccgagtacaagcccacggtgcgcctcgccacccgcgacgacgtccccagggccgtacgcaccctcgccgccgcgttcgccgactaccccgccacgcgccacaccgtcgatccggaccgccacatcgagcgggtcaccgagctgcaagaactcttcctcacgcgcgtcgggctcgacatcggcaaggtgtgggtcgcggacgacggcgccgcggtggcggtctggaccacgccggagagcgtcgaagcgggggcggtgttcgccgagatcggcccgcgcatggccgagttgagcggttcccggctggccgcgcagcaacagatggaaggcctcctggcgccgcaccggcccaaggagcccgcgtggttcctggccaccgtcggcgtctcgcccgaccaccagggcaagggtctgggcagcgccgtcgtgctccccggagtggaggcggccgagcgcgccggggtgcccgccttcctggagacctccgcgccccgcaacctccccttctacgagcggctcggcttcaccgtcaccgccgacgtcgaggtgcccgaaggaccgcgcacctggtgcatgacccgcaagcccggtgcctga

SEQ ID NO: 6942 - DNA, 2037 bp, Artificial Sequence
  Synthetic Polynucloetide
atggccttaccagtgaccgccttgctcctgccgctggccttgctgctccacgccgccaggccggaggtgcagctggttgaatctggcggaggactggttcagcctggcggatctctgagactgtcttgtgccgccagcggcttcaacatcaaggatacctgtatcggctgggttcgcagagcccctggcaaagaggaagaactggtcgccaaaatctgcaagtacagcggccacaccagatacgccgacagcgtgaagggcagattcaccatcagcgccgacaccagcaagaacaccgcctacctccagatgaacagcctgagagccgaggacaccgccgtgtactattgtgccgctgtgtccgtcagagatgggcactacaattactggggccagggcaccaccgtgaccgtttcttcactcgagagcggcggaggcggatctttcgaagtgcagctgcttgaaagtggcggcggactgattcagcctggcggatctctgagactgagctgtgccgccagcggcttcaccttttctagccacgccatgacctgggtccgacaggcacctggaaaagggcttgaatgggtgtccgccatcagcggctctggcgattacacacactacgccgacagcgtgaagggcagattcaccatcagcagagacaacagcaagaacaccgtgtacctccagatgaacagcctgagagccgaggacagcgccgtgtattattgcgccaaggatgaggatggcggcagcctgcttggacacagaggacaaggcaccctggtcaccgtttcttccctcgaggacctgaagaacgtgttcccacctgaggtggccgtgttcgagcctagcgaggccgagatcagccacacccagaaagccaccctcgtgtgcctggctaccggcttctaccccgaccatgtggaactgtcttggtgggtcaacggcaaagaggtgcacagcggcgtgtctaccgacccccagccactgaaagaacagcccgccctgaacgacagccggtactgcctgagcagcagactgagagtgtccgccaccttctggcagaacccccggaaccacttcagatgccaggtgcagttctacggcctgagcgagaacgacgagtggacccaggacagagccaagcccgtgacccagatcgtgtctgccgaagcctggggcagagccgattgcggctttaccagcgagagctaccagcagggcgtgctgagcgccaccatcctgtacgagatcctgctgggcaaggccaccctgtacgccgtgctggtgtctgccctggtgctgatggctatggtcaagcggaaggacagccggggaagggccaagcgatctggatctggagcaacaaacttctcactactcaaacaagcaggtgacgtggaggagaatcccgggcctactagaggccatatgaccgagtacaagcccacggtgcgcctcgccacccgcgacgacgtccccagggccgtacgcaccctcgccgccgcgttcgccgactaccccgccacgcgccacaccgtcgatccggaccgccacatcgagcgggtcaccgagctgcaagaactcttcctcacgcgcgtcgggctcgacatcggcaaggtgtgggtcgcggacgacggcgccgcggtggcggtctggaccacgccggagagcgtcgaagcgggggcggtgttcgccgagatcggcccgcgcatggccgagttgagcggttcccggctggccgcgcagcaacagatggaaggcctcctggcgccgcaccggcccaaggagcccgcgtggttcctggccaccgtcggcgtctcgcccgaccaccagggcaagggtctgggcagcgccgtcgtgctccccggagtggaggcggccgagcgcgccggggtgcccgccttcctggagacctccgcgccccgcaacctccccttctacgagcggctcggcttcaccgtcaccgccgacgtcgaggtgcccgaaggaccgcgcacctggtgcatgacccgcaagcccggtgcctga

SEQ ID NO: 6943 - DNA, 2187 bp, Artificial Sequence
  Synthetic Polynucloetide
atggccttaccagtgaccgccttgctcctgccgctggccttgctgctccacgccgccaggccggaggtgcagctggttgaatctggcggaggactggttcagcctggcggatctctgagactgtcttgtgccgccagcggcttcaacatcaaggatacctgtatcggctgggttcgcagagcccctggcaaagaggaagaactggtcgccaaaatctgcaagtacagcggccacaccagatacgccgacagcgtgaagggcagattcaccatcagcgccgacaccagcaagaacaccgcctacctccagatgaacagcctgagagccgaggacaccgccgtgtactattgtgccgctgtgtccgtcagagatgggcactacaattactggggccagggcaccaccgtgaccgtttcttcactcgagagcggcggaggcggatctttcgaagtgcagctgcttgaaagtggcggcggactgattcagcctggcggatctctgagactgagctgtgccgccagcggcttcaccttttctagccacgccatgacctgggtccgacaggcacctggaaaagggcttgaatgggtgtccgccatcagcggctctggcgattacacacactacgccgacagcgtgaagggcagattcaccatcagcagagacaacagcaagaacaccgtgtacctccagatgaacagcctgagagccgaggacagcgccgtgtattattgcgccaaggatgaggatggcggcagcctgcttggacacagaggacaaggcaccctggtcaccgtttcttccacgcgtgagcagaaactgatctcggaagaggatctggggagcggcaccccattcccttctctggcccctcccatcatgctgctggtggacggcaagcagcagatggtggtcgtgtgcctggtgctggatgtggccccacctggactggacagccccatctggtttagcgccggcaatggctctgccctggacgcctttacctacggcccaagccctgccaccgatggcacctggacaaatctggcccacctgagcctgcccagcgaggaactggcttcttgggagcctctcgtgtgccacacaggacctggcgctgagggacacagcagatccacccagcctatgcacctgtctggcgaggccagcaccgccagaacctgtcctcaggaacctctgagaggcacccctggcggagcactgtggctgggagtgctgagactgctgctgttcaagctgctgctgtttgacctgctgctgacctgctcctgtctgtgcgatcctgccggccctctgccttctcctgccaccaccacaagactgagagccctgggcagccacagactgcaccctgccacagagacaggcggcagagaggccacaagcagccctagaccccagcccagagacagaagatggggcgataccccccctggcagaaagcctggatctccagtccgcgccaagagaagcggatctggcgtgaagcagaccctgaatttcgacctgctgaagctggctggcgacgtggaatccaacccaggcccttctagatctagaggccatatgaccgagtacaagcccacggtgcgcctcgccacccgcgacgacgtccccagggccgtacgcaccctcgccgccgcgttcgccgactaccccgccacgcgccacaccgtcgatccggaccgccacatcgagcgggtcaccgagctgcaagaactcttcctcacgcgcgtcgggctcgacatcggcaaggtgtgggtcgcggacgacggcgccgcggtggcggtctggaccacgccggagagcgtcgaagcgggggcggtgttcgccgagatcggcccgcgcatggccgagttgagcggttcccggctggccgcgcagcaacagatggaaggcctcctggcgccgcaccggcccaaggagcccgcgtggttcctggccaccgtcggcgtctcgcccgaccaccagggcaagggtctgggcagcgccgtcgtgctccccggagtggaggcggccgagcgcgccggggtgcccgccttcctggagacctccgcgccccgcaacctccccttctacgagcggctcggcttcaccgtcaccgccgacgtcgaggtgcccgaaggaccgcgcacctggtgcatgacccgcaagcccggtgcctga

SEQ ID NO: 6944 - DNA, 1653 bp, Artificial Sequence
  Synthetic Polynucloetide
atggccttaccagtgaccgccttgctcctgccgctggccttgctgctccacgccgccaggccggaggtgcagctggttgaatctggcggaggactggttcagcctggcggatctctgagactgtcttgtgccgccagcggcttcaacatcaaggatacctgtatcggctgggttcgcagagcccctggcaaagaggaagaactggtcgccaaaatctgcaagtacagcggccacaccagatacgccgacagcgtgaagggcagattcaccatcagcgccgacaccagcaagaacaccgcctacctccagatgaacagcctgagagccgaggacaccgccgtgtactattgtgccgctgtgtccgtcagagatgggcactacaattactggggccagggcaccaccgtgaccgtttcttcactcgaggacctgaagaacgtgttcccacctgaggtggccgtgttcgagcctagcgaggccgagatcagccacacccagaaagccaccctcgtgtgcctggctaccggcttctaccccgaccatgtggaactgtcttggtgggtcaacggcaaagaggtgcacagcggcgtgtctaccgacccccagccactgaaagaacagcccgccctgaacgacagccggtactgcctgagcagcagactgagagtgtccgccaccttctggcagaacccccggaaccacttcagatgccaggtgcagttctacggcctgagcgagaacgacgagtggacccaggacagagccaagcccgtgacccagatcgtgtctgccgaagcctggggcagagccgattgcggctttaccagcgagagctaccagcagggcgtgctgagcgccaccatcctgtacgagatcctgctgggcaaggccaccctgtacgccgtgctggtgtctgccctggtgctgatggctatggtcaagcggaaggacagccggggaagggccaagcgatctggatctggagcaacaaacttctcactactcaaacaagcaggtgacgtggaggagaatcccgggcctactagaggccatatgaccgagtacaagcccacggtgcgcctcgccacccgcgacgacgtccccagggccgtacgcaccctcgccgccgcgttcgccgactaccccgccacgcgccacaccgtcgatccggaccgccacatcgagcgggtcaccgagctgcaagaactcttcctcacgcgcgtcgggctcgacatcggcaaggtgtgggtcgcggacgacggcgccgcggtggcggtctggaccacgccggagagcgtcgaagcgggggcggtgttcgccgagatcggcccgcgcatggccgagttgagcggttcccggctggccgcgcagcaacagatggaaggcctcctggcgccgcaccggcccaaggagcccgcgtggttcctggccaccgtcggcgtctcgcccgaccaccagggcaagggtctgggcagcgccgtcgtgctccccggagtggaggcggccgagcgcgccggggtgcccgccttcctggagacctccgcgccccgcaacctccccttctacgagcggctcggcttcaccgtcaccgccgacgtcgaggtgcccgaaggaccgcgcacctggtgcatgacccgcaagcccggtgcctga

SEQ ID NO: 6945 - DNA, 960 bp, Artificial Sequence
  Synthetic Polynucloetide
atggccttaccagtgaccgccttgctcctgccgctggccttgctgctccacgccgccaggccggaggtgcagctggttgaatctggcggaggactggttcagcctggcggatctctgagactgtcttgtgccgccagcggcttcaacatcaaggatacctgtatcggctgggttcgcagagcccctggcaaagaggaagaactggtcgccaaaatctgcaagtacagcggccacaccagatacgccgacagcgtgaagggcagattcaccatcagcgccgacaccagcaagaacaccgcctacctccagatgaacagcctgagagccgaggacaccgccgtgtactattgtgccgctgtgtccgtcagagatgggcactacaattactggggccagggcaccaccgtgaccgtttcttcactcgaggacctgaagaacgtgttcccacctgaggtggccgtgttcgagcctagcgaggccgagatcagccacacccagaaagccaccctcgtgtgcctggctaccggcttctaccccgaccatgtggaactgtcttggtgggtcaacggcaaagaggtgcacagcggcgtgtctaccgacccccagccactgaaagaacagcccgccctgaacgacagccggtactgcctgagcagcagactgagagtgtccgccaccttctggcagaacccccggaaccacttcagatgccaggtgcagttctacggcctgagcgagaacgacgagtggacccaggacagagccaagcccgtgacccagatcgtgtctgccgaagcctggggcagagccgattgcggctttaccagcgagagctaccagcagggcgtgctgagcgccaccatcctgtacgagatcctgctgggcaaggccaccctgtacgccgtgctggtgtctgccctggtgctgatggctatggtcaagcggaaggacagccgggga

SEQ ID NO: 6946 - DNA, 1344 bp, Artificial Sequence; identical to SEQ ID NO: 6800
  Synthetic Polynucloetide

SEQ ID NO: 6947 - DNA, 843 bp, Artificial Sequence; identical to SEQ ID NO: 6801
  Synthetic Polynucloetide

SEQ ID NO: 6948 - DNA, 1707 bp, Artificial Sequence
  Synthetic Polynucloetide
atggccttaccagtgaccgccttgctcctgccgctggccttgctgctccacgccgccaggccggaggtgcagctggttgaatctggcggaggactggttcagcctggcggatctctgagactgtcttgtgccgccagcggcttcaacatcaaggatacctgtatcggctgggttcgcagagcccctggcaaagaggaagaactggtcgccaaaatctgcaagtacagcggccacaccagatacgccgacagcgtgaagggcagattcaccatcagcgccgacaccagcaagaacaccgcctacctccagatgaacagcctgagagccgaggacaccgccgtgtactattgtgccgctgtgtccgtcagagatgggcactacaattactggggccagggcaccaccgtgaccgtttcttcactcgaggggaaaccaattcccaaccctcttctgggactggattcaaccggcagcggcgaggacctgaagaacgtgttcccacctgaggtggccgtgttcgagcctagcgaggccgagatcagccacacccagaaagccaccctcgtgtgcctggctaccggcttctaccccgaccatgtggaactgtcttggtgggtcaacggcaaagaggtgcacagcggcgtgtgtaccgacccccagccactgaaagaacagcccgccctgaacgacagccggtactgcctgagcagcagactgagagtgtccgccaccttctggcagaacccccggaaccacttcagatgccaggtgcagttctacggcctgagcgagaacgacgagtggacccaggacagagccaagcccgtgacccagatcgtgtctgccgaagcctggggcagagccgattgcggctttaccagcgagagctaccagcagggcgtgctgagcgccaccatcctgtacgagatcctgctgggcaaggccaccctgtacgccgtgctggtgtctgccctggtgctgatggctatggtcaagcggaaggacagccggggaagggccaagcgatctggatctggagcaacaaacttctcactactcaaacaagcaggtgacgtggaggagaatcccgggcctactagaggccatatgaccgagtacaagcccacggtgcgcctcgccacccgcgacgacgtccccagggccgtacgcaccctcgccgccgcgttcgccgactaccccgccacgcgccacaccgtcgatccggaccgccacatcgagcgggtcaccgagctgcaagaactcttcctcacgcgcgtcgggctcgacatcggcaaggtgtgggtcgcggacgacggcgccgcggtggcggtctggaccacgccggagagcgtcgaagcgggggcggtgttcgccgagatcggcccgcgcatggccgagttgagcggttcccggctggccgcgcagcaacagatggaaggcctcctggcgccgcaccggcccaaggagcccgcgtggttcctggccaccgtcggcgtctcgcccgaccaccagggcaagggtctgggcagcgccgtcgtgctccccggagtggaggcggccgagcgcgccggggtgcccgccttcctggagacctccgcgccccgcaacctccccttctacgagcggctcggcttcaccgtcaccgccgacgtcgaggtgcccgaaggaccgcgcacctggtgcatgacccgcaagcccggtgcctga

SEQ ID NO: 6949 - DNA, 1017 bp, Artificial Sequence
  Synthetic Polynucloetide
atggccttaccagtgaccgccttgctcctgccgctggccttgctgctccacgccgccaggccggaggtgcagctggttgaatctggcggaggactggttcagcctggcggatctctgagactgtcttgtgccgccagcggcttcaacatcaaggatacctgtatcggctgggttcgcagagcccctggcaaagaggaagaactggtcgccaaaatctgcaagtacagcggccacaccagatacgccgacagcgtgaagggcagattcaccatcagcgccgacaccagcaagaacaccgcctacctccagatgaacagcctgagagccgaggacaccgccgtgtactattgtgccgctgtgtccgtcagagatgggcactacaattactggggccagggcaccaccgtgaccgtttcttcactcgaggggaaaccaattcccaaccctcttctgggactggattcaaccggcagcggcgaggacctgaagaacgtgttcccacctgaggtggccgtgttcgagcctagcgaggccgagatcagccacacccagaaagccaccctcgtgtgcctggctaccggcttctaccccgaccatgtggaactgtcttggtgggtcaacggcaaagaggtgcacagcggcgtgtgtaccgacccccagccactgaaagaacagcccgccctgaacgacagccggtactgcctgagcagcagactgagagtgtccgccaccttctggcagaacccccggaaccacttcagatgccaggtgcagttctacggcctgagcgagaacgacgagtggacccaggacagagccaagcccgtgacccagatcgtgtctgccgaagcctggggcagagccgattgcggctttaccagcgagagctaccagcagggcgtgctgagcgccaccatcctgtacgagatcctgctgggcaaggccaccctgtacgccgtgctggtgtctgccctggtgctgatggctatggtcaagcggaaggacagccggggatga

SEQ ID NO: 6950 - DNA, 1380 bp, Artificial Sequence; identical to SEQ ID NO: 6804
  Synthetic Polynucloetide

SEQ ID NO: 6951 - DNA, 882 bp, Artificial Sequence; identical to SEQ ID NO: 6805
  Synthetic Polynucloetide

SEQ ID NO: 6952 - DNA, 1941 bp, Artificial Sequence
  Synthetic Polynucloetide
atggccttaccagtgaccgccttgctcctgccgctggccttgctgctccacgccgccaggccggaggtgcagctggttgaatctggcggaggactggttcagcctggcggatctctgagactgtcttgtgccgccagcggcttcaacatcaaggatacctgtatcggctgggttcgcagagcccctggcaaagaggaagaactggtcgccaaaatctgcaagtacagcggccacaccagatacgccgacagcgtgaagggcagattcaccatcagcgccgacaccagcaagaacaccgcctacctccagatgaacagcctgagagccgaggacaccgccgtgtactattgtgccgctgtgtccgtcagagatgggcactacaattactggggccagggcaccaccgtgaccgtttcttcactcgagagcggcggaggcggatctttcgaagtgcagctgcttgaaagtggcggcggactgattcagcctggcggatctctgagactgagctgtgccgccagcggcttcaccttttctagccacgccatgacctgggtccgacaggcacctggaaaagggcttgaatgggtgtccgccatcagcggctctggcgattacacacactacgccgacagcgtgaagggcagattcaccatcagcagagacaacagcaagaacaccgtgtacctccagatgaacagcctgagagccgaggacagcgccgtgtattattgcgccaaggatgaggatggcggcagcctgcttggacacagaggacaaggcaccctggtcaccgtttcttccacgcgtgggagcggcatccagaaccctgatcctgccgtgtaccagctgcgggatagcaagagcagcgacaagagcgtgtgtctgttcaccgacttcgacagccagaccaacgtgtcccagagcaaggactccgacgtgtacatcaccgataagaccgtgctggacatgcggagcatggacttcaagagcaactccgccgtggcctggtccaacaagtccgatttcgcctgcgccaacgccttcaacaacagcattatccccgaggacacattcttcccaagcagcgacgtgccctgcgacgtgaagctggtggaaaagagcttcgagacagacaccaacctgaacttccagaacctgagcgtgatcggcttcagaatcctgctgctgaaagtggccggctttaacctgctgatgaccctgcggctgtggtccagccgcgccaagagaagcggatctggcgtgaagcagaccctgaatttcgacctgctgaagctggctggcgacgtggaatccaacccaggcccttctagaggccatatgaccgagtacaagcccacggtgcgcctcgccacccgcgacgacgtccccagggccgtacgcaccctcgccgccgcgttcgccgactaccccgccacgcgccacaccgtcgatccggaccgccacatcgagcgggtcaccgagctgcaagaactcttcctcacgcgcgtcgggctcgacatcggcaaggtgtgggtcgcggacgacggcgccgcggtggcggtctggaccacgccggagagcgtcgaagcgggggcggtgttcgccgagatcggcccgcgcatggccgagttgagcggttcccggctggccgcgcagcaacagatggaaggcctcctggcgccgcaccggcccaaggagcccgcgtggttcctggccaccgtcggcgtctcgcccgaccaccagggcaagggtctgggcagcgccgtcgtgctccccggagtggaggcggccgagcgcgccggggtgcccgccttcctggagacctccgcgccccgcaacctccccttctacgagcggctcggcttcaccgtcaccgccgacgtcgaggtgcccgaaggaccgcgcacctggtgcatgacccgcaagcccggtgcctga

SEQ ID NO: 6953 - DNA, 2037 bp, Artificial Sequence
  Synthetic Polynucloetide
atggccttaccagtgaccgccttgctcctgccgctggccttgctgctccacgccgccaggccggaggtgcagctggttgaatctggcggaggactggttcagcctggcggatctctgagactgtcttgtgccgccagcggcttcaacatcaaggatacctgtatcggctgggttcgcagagcccctggcaaagaggaagaactggtcgccaaaatctgcaagtacagcggccacaccagatacgccgacagcgtgaagggcagattcaccatcagcgccgacaccagcaagaacaccgcctacctccagatgaacagcctgagagccgaggacaccgccgtgtactattgtgccgctgtgtccgtcagagatgggcactacaattactggggccagggcaccaccgtgaccgtttcttcactcgagagcggcggaggcggatctttcgaagtgcagctgcttgaaagtggcggcggactgattcagcctggcggatctctgagactgagctgtgccgccagcggcttcaccttttctagccacgccatgacctgggtccgacaggcacctggaaaagggcttgaatgggtgtccgccatcagcggctctggcgattacacacactacgccgacagcgtgaagggcagattcaccatcagcagagacaacagcaagaacaccgtgtacctccagatgaacagcctgagagccgaggacagcgccgtgtattattgcgccaaggatgaggatggcggcagcctgcttggacacagaggacaaggcaccctggtcaccgtttcttccctcgaggacctgaagaacgtgttcccacctgaggtggccgtgttcgagcctagcaaggccgagatcgcccacacccagaaagccaccctcgtgtgcctggctaccggcttctaccccgaccatgtggaactgtcttggtgggtcaacggcaaagaggtgcacagcggcgtgtctaccgacccccagccactgaaagaacagcccgccctgaacgacagccggtactgcctgagcagcagactgagagtgtccgccaccttctggcagaacccccggaaccacttcagatgccaggtgcagttctacggcctgagcgagaacgacgagtggacccaggacagagccaagcccgtgacccagatcgtgtctgccgaagcctggggcagagccgattgcggcatcaccagcgccagctaccaccagggcgtgctgagcgccaccatcctgtacgagatcctgctgggcaaggccaccctgtacgccgtgctggtgtctgccctggtgctgatggctatggtcaagcggaaggacagccggggaagggccaagcgatctggatctggagcaacaaacttctcactactcaaacaagcaggtgacgtggaggagaatcccgggcctactagaggccatatgaccgagtacaagcccacggtgcgcctcgccacccgcgacgacgtccccagggccgtacgcaccctcgccgccgcgttcgccgactaccccgccacgcgccacaccgtcgatccggaccgccacatcgagcgggtcaccgagctgcaagaactcttcctcacgcgcgtcgggctcgacatcggcaaggtgtgggtcgcggacgacggcgccgcggtggcggtctggaccacgccggagagcgtcgaagcgggggcggtgttcgccgagatcggcccgcgcatggccgagttgagcggttcccggctggccgcgcagcaacagatggaaggcctcctggcgccgcaccggcccaaggagcccgcgtggttcctggccaccgtcggcgtctcgcccgaccaccagggcaagggtctgggcagcgccgtcgtgctccccggagtggaggcggccgagcgcgccggggtgcccgccttcctggagacctccgcgccccgcaacctccccttctacgagcggctcggcttcaccgtcaccgccgacgtcgaggtgcccgaaggaccgcgcacctggtgcatgacccgcaagcccggtgcctga

SEQ ID NO: 6954 - DNA, 2106 bp, Artificial Sequence
  Synthetic Polynucloetide
atggccttaccagtgaccgccttgctcctgccgctggccttgctgctccacgccgccaggccggaggtgcagctggttgaatctggcggaggactggttcagcctggcggatctctgagactgtcttgtgccgccagcggcttcaacatcaaggatacctgtatcggctgggttcgcagagcccctggcaaagaggaagaactggtcgccaaaatctgcaagtacagcggccacaccagatacgccgacagcgtgaagggcagattcaccatcagcgccgacaccagcaagaacaccgcctacctccagatgaacagcctgagagccgaggacaccgccgtgtactattgtgccgctgtgtccgtcagagatgggcactacaattactggggccagggcaccaccgtgaccgtttcttcactcgagagcggcggaggcggatctttcgaagtgcagctgcttgaaagtggcggcggactgattcagcctggcggatctctgagactgagctgtgccgccagcggcttcaccttttctagccacgccatgacctgggtccgacaggcacctggaaaagggcttgaatgggtgtccgccatcagcggctctggcgattacacacactacgccgacagcgtgaagggcagattcaccatcagcagagacaacagcaagaacaccgtgtacctccagatgaacagcctgagagccgaggacagcgccgtgtattattgcgccaaggatgaggatggcggcagcctgcttggacacagaggacaaggcaccctggtcaccgtttcttccacgcgtgggtctggaggcggaggcagcggcggaggcgggagcggcgacggtaacgaggagatgggaggaatcactcaaaccccttacaaagtctcaatttcaggaacaactgttatccttacatgtccccagtatcctggcagcgagatcctttggcagcataacgacaagaatatagggggagatgaagacgataagaatatcggatctgacgaggatcacttgagcctgaaagagttctccgagcttgaacaaagcggatattatgtgtgctatccgcgcgggtcaaagccggaagacgctaacttttacctttatctccgagccagagtgtgcgaaaattgcatggaaatggacgttatgtccgttgctacaatagttatcgtagatatatgcatcacgggtggactgcttctgctggtttattattggtccaagaatagaaaggccaaagctaaacccgtgaccagaggcgctggcgcaggcggaaggcaaaggggacaaaacaaagaacggccaccaccagtgccaaatccagattatgagcctattcggaaaggacagagggacctgtactctggcctgaatcagagaagaatccgcgccaagagaagcggatctggcgtgaagcagaccctgaatttcgacctgctgaagctggctggcgacgtggaatccaacccaggcccttctagaggccatatgaccgagtacaagcccacggtgcgcctcgccacccgcgacgacgtccccagggccgtacgcaccctcgccgccgcgttcgccgactaccccgccacgcgccacaccgtcgatccggaccgccacatcgagcgggtcaccgagctgcaagaactcttcctcacgcgcgtcgggctcgacatcggcaaggtgtgggtcgcggacgacggcgccgcggtggcggtctggaccacgccggagagcgtcgaagcgggggcggtgttcgccgagatcggcccgcgcatggccgagttgagcggttcccggctggccgcgcagcaacagatggaaggcctcctggcgccgcaccggcccaaggagcccgcgtggttcctggccaccgtcggcgtctcgcccgaccaccagggcaagggtctgggcagcgccgtcgtgctccccggagtggaggcggccgagcgcgccggggtgcccgccttcctggagacctccgcgccccgcaacctccccttctacgagcggctcggcttcaccgtcaccgccgacgtcgaggtgcccgaaggaccgcgcacctggtgcatgacccgcaagcccggtgcctga

SEQ ID NO: 6955 - DNA, 2001 bp, Artificial Sequence
  Synthetic Polynucloetide
atggccttaccagtgaccgccttgctcctgccgctggccttgctgctccacgccgccaggccggaggtgcagctggttgaatctggcggaggactggttcagcctggcggatctctgagactgtcttgtgccgccagcggcttcaacatcaaggatacctgtatcggctgggttcgcagagcccctggcaaagaggaagaactggtcgccaaaatctgcaagtacagcggccacaccagatacgccgacagcgtgaagggcagattcaccatcagcgccgacaccagcaagaacaccgcctacctccagatgaacagcctgagagccgaggacaccgccgtgtactattgtgccgctgtgtccgtcagagatgggcactacaattactggggccagggcaccaccgtgaccgtttcttcactcgagagcggcggaggcggatctttcgaagtgcagctgcttgaaagtggcggcggactgattcagcctggcggatctctgagactgagctgtgccgccagcggcttcaccttttctagccacgccatgacctgggtccgacaggcacctggaaaagggcttgaatgggtgtccgccatcagcggctctggcgattacacacactacgccgacagcgtgaagggcagattcaccatcagcagagacaacagcaagaacaccgtgtacctccagatgaacagcctgagagccgaggacagcgccgtgtattattgcgccaaggatgaggatggcggcagcctgcttggacacagaggacaaggcaccctggtcaccgtttcttccacgcgtgggtctggaggcggaggcagcggcggaggcgggagcggcttcaagatccccatcgaggaactggaagatcgggtgttcgtgaactgcaacacctctatcacctgggtggaaggcaccgtgggaacactgctgagcgacatcaccagactggacctcggcaagcggattctggaccctcggggcatctacagatgcaacggcaccgacatctacaaggacaaagaaagcaccgtgcaggtccactacagaatgtgccagtcctgcgtggaactggaccctgctacagtggccggcatcatcgtgaccgatgtgatcgctactctgctgctggctctgggagtgttctgcttcgccggacacgaaacaggcagactgtctggcgctgccgatacacaggccctgctgagaaacgaccaagtgtatcagcccctgcgcgacagagatgatgcccagtattctcacctcggcggcaactgggctagaaacaagcgcgccaagagaagcggatctggcgtgaagcagaccctgaatttcgacctgctgaagctggctggcgacgtggaatccaacccaggcccttctagaggccatatgaccgagtacaagcccacggtgcgcctcgccacccgcgacgacgtccccagggccgtacgcaccctcgccgccgcgttcgccgactaccccgccacgcgccacaccgtcgatccggaccgccacatcgagcgggtcaccgagctgcaagaactcttcctcacgcgcgtcgggctcgacatcggcaaggtgtgggtcgcggacgacggcgccgcggtggcggtctggaccacgccggagagcgtcgaagcgggggcggtgttcgccgagatcggcccgcgcatggccgagttgagcggttcccggctggccgcgcagcaacagatggaaggcctcctggcgccgcaccggcccaaggagcccgcgtggttcctggccaccgtcggcgtctcgcccgaccaccagggcaagggtctgggcagcgccgtcgtgctccccggagtggaggcggccgagcgcgccggggtgcccgccttcctggagacctccgcgccccgcaacctccccttctacgagcggctcggcttcaccgtcaccgccgacgtcgaggtgcccgaaggaccgcgcacctggtgcatgacccgcaagcccggtgcctga

SEQ ID NO: 6956 - DNA, 2031 bp, Artificial Sequence
  Synthetic Polynucloetide
atggccttaccagtgaccgccttgctcctgccgctggccttgctgctccacgccgccaggccggaggtgcagctggttgaatctggcggaggactggttcagcctggcggatctctgagactgtcttgtgccgccagcggcttcaacatcaaggatacctgtatcggctgggttcgcagagcccctggcaaagaggaagaactggtcgccaaaatctgcaagtacagcggccacaccagatacgccgacagcgtgaagggcagattcaccatcagcgccgacaccagcaagaacaccgcctacctccagatgaacagcctgagagccgaggacaccgccgtgtactattgtgccgctgtgtccgtcagagatgggcactacaattactggggccagggcaccaccgtgaccgtttcttcactcgagagcggcggaggcggatctttcgaagtgcagctgcttgaaagtggcggcggactgattcagcctggcggatctctgagactgagctgtgccgccagcggcttcaccttttctagccacgccatgacctgggtccgacaggcacctggaaaagggcttgaatgggtgtccgccatcagcggctctggcgattacacacactacgccgacagcgtgaagggcagattcaccatcagcagagacaacagcaagaacaccgtgtacctccagatgaacagcctgagagccgaggacagcgccgtgtattattgcgccaaggatgaggatggcggcagcctgcttggacacagaggacaaggcaccctggtcaccgtttcttccacgcgtgggtctggaggcggaggcagcggcggaggcgggagcggccagagcatcaagggcaaccacctggtcaaggtgtacgactaccaagaggacggcagcgtgctgctgacatgtgatgccgaggccaagaacatcacctggtttaaggacggcaagatgatcggcttcctgaccgaggacaagaagaagtggaacctgggcagcaacgctaaggaccccagaggcatgtatcagtgcaagggcagccagaacaagagcaagcccctccaggtgtactaccggatgtgccagaactgcatcgagctgaacgccgctaccatcagcggctttctgttcgccgagatcgtgtccatcttcgtgctggccgtgggcgtgtactttatcgctggacaggatggcgtgcggcagagcagagcttccgataagcaaaccctgctgcctaacgaccagctgtaccagcctctgaaggacagagaggacgaccagtacagccacctccagggcaatcagctgagaagaaaccgcgccaagagaagcggatctggcgtgaagcagaccctgaatttcgacctgctgaagctggctggcgacgtggaatccaacccaggcccttctagaggccatatgaccgagtacaagcccacggtgcgcctcgccacccgcgacgacgtccccagggccgtacgcaccctcgccgccgcgttcgccgactaccccgccacgcgccacaccgtcgatccggaccgccacatcgagcgggtcaccgagctgcaagaactcttcctcacgcgcgtcgggctcgacatcggcaaggtgtgggtcgcggacgacggcgccgcggtggcggtctggaccacgccggagagcgtcgaagcgggggcggtgttcgccgagatcggcccgcgcatggccgagttgagcggttcccggctggccgcgcagcaacagatggaaggcctcctggcgccgcaccggcccaaggagcccgcgtggttcctggccaccgtcggcgtctcgcccgaccaccagggcaagggtctgggcagcgccgtcgtgctccccggagtggaggcggccgagcgcgccggggtgcccgccttcctggagacctccgcgccccgcaacctccccttctacgagcggctcggcttcaccgtcaccgccgacgtcgaggtgcccgaaggaccgcgcacctggtgcatgacccgcaagcccggtgcctga

SEQ ID NO: 6957 - DNA, 1980 bp, Artificial Sequence
  Synthetic Polynucloetide
atggccttaccagtgaccgccttgctcctgccgctggccttgctgctccacgccgccaggccggaggtgcagctggttgaatctggcggaggactggttcagcctggcggatctctgagactgtcttgtgccgccagcggcttcaacatcaaggatacctgtatcggctgggttcgcagagcccctggcaaagaggaagaactggtcgccaaaatctgcaagtacagcggccacaccagatacgccgacagcgtgaagggcagattcaccatcagcgccgacaccagcaagaacaccgcctacctccagatgaacagcctgagagccgaggacaccgccgtgtactattgtgccgctgtgtccgtcagagatgggcactacaattactggggccagggcaccaccgtgaccgtttcttcactcgagagcggcggaggcggatctttcgaagtgcagctgcttgaaagtggcggcggactgattcagcctggcggatctctgagactgagctgtgccgccagcggcttcaccttttctagccacgccatgacctgggtccgacaggcacctggaaaagggcttgaatgggtgtccgccatcagcggctctggcgattacacacactacgccgacagcgtgaagggcagattcaccatcagcagagacaacagcaagaacaccgtgtacctccagatgaacagcctgagagccgaggacagcgccgtgtattattgcgccaaggatgaggatggcggcagcctgcttggacacagaggacaaggcaccctggtcaccgtttcttccacgcgtgggtctggaggcggaggcagcggcggaggcgggagcggccagagttttgggttgttggaccctaaattgtgctatctgttggacggaatcctgttcatttacggagtgatcctgaccgcattgttcctgcgggttaagttttccagatccgcagacgcacccgcttaccaacaagggcagaaccaactctacaatgaacttaatttggggcggagggaagagtacgacgttctggacaaaaggaggggacgagatcccgagatgggcggaaagcctcagcgaaggaagaatccgcaagaggggctttataacgaactccagaaagataaaatggcagaagcctatagtgagattgggatgaagggagaaaggaggaggggtaaaggtcacgatgggttgtaccaaggattgagcacagccactaaagatacctatgatgcgctccacatgcaggccctgccgccaagacgcgccaagagaagcggatctggcgtgaagcagaccctgaatttcgacctgctgaagctggctggcgacgtggaatccaacccaggcccttctagaggccatatgaccgagtacaagcccacggtgcgcctcgccacccgcgacgacgtccccagggccgtacgcaccctcgccgccgcgttcgccgactaccccgccacgcgccacaccgtcgatccggaccgccacatcgagcgggtcaccgagctgcaagaactcttcctcacgcgcgtcgggctcgacatcggcaaggtgtgggtcgcggacgacggcgccgcggtggcggtctggaccacgccggagagcgtcgaagcgggggcggtgttcgccgagatcggcccgcgcatggccgagttgagcggttcccggctggccgcgcagcaacagatggaaggcctcctggcgccgcaccggcccaaggagcccgcgtggttcctggccaccgtcggcgtctcgcccgaccaccagggcaagggtctgggcagcgccgtcgtgctccccggagtggaggcggccgagcgcgccggggtgcccgccttcctggagacctccgcgccccgcaacctccccttctacgagcggctcggcttcaccgtcaccgccgacgtcgaggtgcccgaaggaccgcgcacctggtgcatgacccgcaagcccggtgcctga

SEQ ID NO: 6958 - DNA, 2604 bp, Artificial Sequence
  Synthetic Polynucloetide
atggccttaccagtgaccgccttgctcctgccgctggccttgctgctccacgccgccaggccggaggtgcagctggttgaatctggcggaggactggttcagcctggcggatctctgagactgtcttgtgccgccagcggcttcaacatcaaggatacctgtatcggctgggttcgcagagcccctggcaaagaggaagaactggtcgccaaaatctgcaagtacagcggccacaccagatacgccgacagcgtgaagggcagattcaccatcagcgccgacaccagcaagaacaccgcctacctccagatgaacagcctgagagccgaggacaccgccgtgtactattgtgccgctgtgtccgtcagagatgggcactacaattactggggccagggcaccaccgtgaccgtttcttcactcgagggacagcctaaggccaatcctaccgtgacactgttccctccaagcagcgaagaactccaggccaacaaggccacacttgtgtgcctgatctccgacttctaccctggggctgtgacagtggcttggaaggccgatggatctcctgtgaaagccggcgtggaaaccaccaagccatccaagcagagcaacaacaaatacgccgccagctcctacctgagcctgacacctgagcagtggaagtcccacagatcctacagctgccaagtgacccacgaaggcagcaccgtggaaaagacagtggcccctacagagtgcagcggcagagccgattgcggctttaccagcgagagctaccagcagggcgtgctgagcgccaccatcctgtacgagatcctgctgggcaaggccaccctgtacgccgtgctggtgtctgccctggtgctgatggctatggtcaagcggaaggacagccggggaagggccaagcgatctggatctggagcaacaaacttctcactactcaaacaagcaggtgacgtggaggagaatcccgggcctactagtatggactggatttggcgcatccttttccttgtcggcgctgctaccggcgcgcattccttcgaagtgcagctgcttgaaagtggcggcggactgattcagcctggcggatctctgagactgagctgtgccgccagcggcttcaccttttctagccacgccatgacctgggtccgacaggcacctggaaaagggcttgaatgggtgtccgccatcagcggctctggcgattacacacactacgccgacagcgtgaagggcagattcaccatcagcagagacaacagcaagaacaccgtgtacctccagatgaacagcctgagagccgaggacagcgccgtgtattattgcgccaaggatgaggatggcggcagcctgcttggacacagaggacaaggcaccctggtcaccgtttcttccacgcgtgcctctacaaagggaccctccgtgtttcctctggctcccagcagcaagtctacaagcggaggaacagccgctctgggctgcctggtcaaggattactttcccgagcctgtgaccgtgtcctggaatagcggagcactgacaagcggcgtgcacacctttccagccgtgctgcaaagcagcggcctgtactctctgagcagcgtggtcacagtgcctagctctagcctgggcacccagacctacatctgcaatgtgaaccacaagcctagcaacaccaaggtggacaagagagtggaacccaagagctgtatccccgaggacacattcttcccaagccccgagagcagctgcgacgtgaagctggtggaaaagagcttcgagacagacaccaacctgaacttccagaacctgagcgtgatcggcttcagaatcctgctgctgaaagtggccggctttaacctgctgatgaccctgcggctgtggtccagccgcgccaagagaagcggatctggcgtgaagcagaccctgaatttcgacctgctgaagctggctggcgacgtggaatccaacccaggcccttctagaggccatatgaccgagtacaagcccacggtgcgcctcgccacccgcgacgacgtccccagggccgtacgcaccctcgccgccgcgttcgccgactaccccgccacgcgccacaccgtcgatccggaccgccacatcgagcgggtcaccgagctgcaagaactcttcctcacgcgcgtcgggctcgacatcggcaaggtgtgggtcgcggacgacggcgccgcggtggcggtctggaccacgccggagagcgtcgaagcgggggcggtgttcgccgagatcggcccgcgcatggccgagttgagcggttcccggctggccgcgcagcaacagatggaaggcctcctggcgccgcaccggcccaaggagcccgcgtggttcctggccaccgtcggcgtctcgcccgaccaccagggcaagggtctgggcagcgccgtcgtgctccccggagtggaggcggccgagcgcgccggggtgcccgccttcctggagacctccgcgccccgcaacctccccttctacgagcggctcggcttcaccgtcaccgccgacgtcgaggtgcccgaaggaccgcgcacctggtgcatgacccgcaagcccggtgcctga

SEQ ID NO: 6959 - DNA, 1902 bp, Artificial Sequence; identical to SEQ ID NO: 6932
  Synthetic Polynucloetide

SEQ ID NO: 6960 - DNA, 1989 bp, Artificial Sequence
  Synthetic Polynucloetide
atggccttaccagtgaccgccttgctcctgccgctggccttgctgctccacgccgccaggccggaggtgcagctggttgaatctggcggaggactggttcagcctggcggatctctgagactgtcttgtgccgccagcggcttcaacatcaaggatacctgtatcggctgggttcgcagagcccctggcaaagaggaagaactggtcgccaaaatctgcaagtacagcggccacaccagatacgccgacagcgtgaagggcagattcaccatcagcgccgacaccagcaagaacaccgcctacctccagatgaacagcctgagagccgaggacaccgccgtgtactattgtgccgctgtgtccgtcagagatgggcactacaattactggggccagggcaccaccgtgaccgtttcttcactcgagggatctggcagagccgattgcggctttaccagcgagagctaccagcagggcgtgctgagcgccaccatcctgtacgagatcctgctgggcaaggccaccctgtacgccgtgctggtgtctgccctggtgctgatggctatggtcaagcggaaggacagccggggaagggccaagcgatctggatctggagcaacaaacttctcactactcaaacaagcaggtgacgtggaggagaatcccgggcctactagtatggactggatttggcgcatccttttccttgtcggcgctgctaccggcgcgcattccttcgaagtgcagctgcttgaaagtggcggcggactgattcagcctggcggatctctgagactgagctgtgccgccagcggcttcaccttttctagccacgccatgacctgggtccgacaggcacctggaaaagggcttgaatgggtgtccgccatcagcggctctggcgattacacacactacgccgacagcgtgaagggcagattcaccatcagcagagacaacagcaagaacaccgtgtacctccagatgaacagcctgagagccgaggacagcgccgtgtattattgcgccaaggatgaggatggcggcagcctgcttggacacagaggacaaggcaccctggtcaccgtttcttccacgcgtggcagcatccccgaggacacattcttcccaagccccgagagcagctgcgacgtgaagctggtggaaaagagcttcgagacagacaccaacctgaacttccagaacctgagcgtgatcggcttcagaatcctgctgctgaaagtggccggctttaacctgctgatgaccctgcggctgtggtccagccgcgccaagagaagcggatctggcgtgaagcagaccctgaatttcgacctgctgaagctggctggcgacgtggaatccaacccaggcccttctagaggccatatgaccgagtacaagcccacggtgcgcctcgccacccgcgacgacgtccccagggccgtacgcaccctcgccgccgcgttcgccgactaccccgccacgcgccacaccgtcgatccggaccgccacatcgagcgggtcaccgagctgcaagaactcttcctcacgcgcgtcgggctcgacatcggcaaggtgtgggtcgcggacgacggcgccgcggtggcggtctggaccacgccggagagcgtcgaagcgggggcggtgttcgccgagatcggcccgcgcatggccgagttgagcggttcccggctggccgcgcagcaacagatggaaggcctcctggcgccgcaccggcccaaggagcccgcgtggttcctggccaccgtcggcgtctcgcccgaccaccagggcaagggtctgggcagcgccgtcgtgctccccggagtggaggcggccgagcgcgccggggtgcccgccttcctggagacctccgcgccccgcaacctccccttctacgagcggctcggcttcaccgtcaccgccgacgtcgaggtgcccgaaggaccgcgcacctggtgcatgacccgcaagcccggtgcctga

SEQ ID NO: 6961 - DNA, 1287 bp, Artificial Sequence
  Synthetic Polynucloetide
atggccttaccagtgaccgccttgctcctgccgctggccttgctgctccacgccgccaggccggaggtgcagctggttgaatctggcggaggactggttcagcctggcggatctctgagactgtcttgtgccgccagcggcttcaacatcaaggatacctgtatcggctgggttcgcagagcccctggcaaagaggaagaactggtcgccaaaatctgcaagtacagcggccacaccagatacgccgacagcgtgaagggcagattcaccatcagcgccgacaccagcaagaacaccgcctacctccagatgaacagcctgagagccgaggacaccgccgtgtactattgtgccgctgtgtccgtcagagatgggcactacaattactggggccagggcaccaccgtgaccgtttcttcactcgagggatctggcagagccgattgcggctttaccagcgagagctaccagcagggcgtgctgagcgccaccatcctgtacgagatcctgctgggcaaggccaccctgtacgccgtgctggtgtctgccctggtgctgatggctatggtcaagcggaaggacagccggggaagggccaagcgatctggatctggagcaacaaacttctcactactcaaacaagcaggtgacgtggaggagaatcccgggcctactagtatggactggatttggcgcatccttttccttgtcggcgctgctaccggcgcgcattccttcgaagtgcagctgcttgaaagtggcggcggactgattcagcctggcggatctctgagactgagctgtgccgccagcggcttcaccttttctagccacgccatgacctgggtccgacaggcacctggaaaagggcttgaatgggtgtccgccatcagcggctctggcgattacacacactacgccgacagcgtgaagggcagattcaccatcagcagagacaacagcaagaacaccgtgtacctccagatgaacagcctgagagccgaggacagcgccgtgtattattgcgccaaggatgaggatggcggcagcctgcttggacacagaggacaaggcaccctggtcaccgtttcttccacgcgtggcagcatccccgaggacacattcttcccaagccccgagagcagctgcgacgtgaagctggtggaaaagagcttcgagacagacaccaacctgaacttccagaacctgagcgtgatcggcttcagaatcctgctgctgaaagtggccggctttaacctgctgatgaccctgcggctgtggtccagc

SEQ ID NO: 6962 - DNA, 2016 bp, Artificial Sequence
  Synthetic Polynucloetide
atggccttaccagtgaccgccttgctcctgccgctggccttgctgctccacgccgccaggccggaggtgcagctggttgaatctggcggaggactggttcagcctggcggatctctgagactgtcttgtgccgccagcggcttcaacatcaaggatacctgtatcggctgggttcgcagagcccctggcaaagaggaagaactggtcgccaaaatctgcaagtacagcggccacaccagatacgccgacagcgtgaagggcagattcaccatcagcgccgacaccagcaagaacaccgcctacctccagatgaacagcctgagagccgaggacaccgccgtgtactattgtgccgctgtgtccgtcagagatgggcactacaattactggggccagggcaccaccgtgaccgtttcttcactcgaggacaaaactcacacatgcccaccgtgcccagcaggcagagccgattgcggctttaccagcgagagctaccagcagggcgtgctgagcgccaccatcctgtacgagatcctgctgggcaaggccaccctgtacgccgtgctggtgtctgccctggtgctgatggctatggtcaagcggaaggacagccggggaagggccaagcgatctggatctggagcaacaaacttctcactactcaaacaagcaggtgacgtggaggagaatcccgggcctactagtatggactggatttggcgcatccttttccttgtcggcgctgctaccggcgcgcattccttcgaagtgcagctgcttgaaagtggcggcggactgattcagcctggcggatctctgagactgagctgtgccgccagcggcttcaccttttctagccacgccatgacctgggtccgacaggcacctggaaaagggcttgaatgggtgtccgccatcagcggctctggcgattacacacactacgccgacagcgtgaagggcagattcaccatcagcagagacaacagcaagaacaccgtgtacctccagatgaacagcctgagagccgaggacagcgccgtgtattattgcgccaaggatgaggatggcggcagcctgcttggacacagaggacaaggcaccctggtcaccgtttcttccacgcgtggcagcatccccgaggacacattcttcccaagccccgagagcagctgcgacgtgaagctggtggaaaagagcttcgagacagacaccaacctgaacttccagaacctgagcgtgatcggcttcagaatcctgctgctgaaagtggccggctttaacctgctgatgaccctgcggctgtggtccagccgcgccaagagaagcggatctggcgtgaagcagaccctgaatttcgacctgctgaagctggctggcgacgtggaatccaacccaggcccttctagaggccatatgaccgagtacaagcccacggtgcgcctcgccacccgcgacgacgtccccagggccgtacgcaccctcgccgccgcgttcgccgactaccccgccacgcgccacaccgtcgatccggaccgccacatcgagcgggtcaccgagctgcaagaactcttcctcacgcgcgtcgggctcgacatcggcaaggtgtgggtcgcggacgacggcgccgcggtggcggtctggaccacgccggagagcgtcgaagcgggggcggtgttcgccgagatcggcccgcgcatggccgagttgagcggttcccggctggccgcgcagcaacagatggaaggcctcctggcgccgcaccggcccaaggagcccgcgtggttcctggccaccgtcggcgtctcgcccgaccaccagggcaagggtctgggcagcgccgtcgtgctccccggagtggaggcggccgagcgcgccggggtgcccgccttcctggagacctccgcgccccgcaacctccccttctacgagcggctcggcttcaccgtcaccgccgacgtcgaggtgcccgaaggaccgcgcacctggtgcatgacccgcaagcccggtgcctga

SEQ ID NO: 6963 - DNA, 2016 bp, Artificial Sequence
  Synthetic Polynucloetide
atggccttaccagtgaccgccttgctcctgccgctggccttgctgctccacgccgccaggccggaggtgcagctggttgaatctggcggaggactggttcagcctggcggatctctgagactgtcttgtgccgccagcggcttcaacatcaaggatacctgtatcggctgggttcgcagagcccctggcaaagaggaagaactggtcgccaaaatctgcaagtacagcggccacaccagatacgccgacagcgtgaagggcagattcaccatcagcgccgacaccagcaagaacaccgcctacctccagatgaacagcctgagagccgaggacaccgccgtgtactattgtgccgctgtgtccgtcagagatgggcactacaattactggggccagggcaccaccgtgaccgtttcttcactcgagggatctggcagagccgattgcggctttaccagcgagagctaccagcagggcgtgctgagcgccaccatcctgtacgagatcctgctgggcaaggccaccctgtacgccgtgctggtgtctgccctggtgctgatggctatggtcaagcggaaggacagccggggaagggccaagcgatctggatctggagcaacaaacttctcactactcaaacaagcaggtgacgtggaggagaatcccgggcctactagtatggactggatttggcgcatccttttccttgtcggcgctgctaccggcgcgcattccttcgaagtgcagctgcttgaaagtggcggcggactgattcagcctggcggatctctgagactgagctgtgccgccagcggcttcaccttttctagccacgccatgacctgggtccgacaggcacctggaaaagggcttgaatgggtgtccgccatcagcggctctggcgattacacacactacgccgacagcgtgaagggcagattcaccatcagcagagacaacagcaagaacaccgtgtacctccagatgaacagcctgagagccgaggacagcgccgtgtattattgcgccaaggatgaggatggcggcagcctgcttggacacagaggacaaggcaccctggtcaccgtttcttccacgcgtgataaaactcatacctgtccgccatgcccggcaatccccgaggacacattcttcccaagccccgagagcagctgcgacgtgaagctggtggaaaagagcttcgagacagacaccaacctgaacttccagaacctgagcgtgatcggcttcagaatcctgctgctgaaagtggccggctttaacctgctgatgaccctgcggctgtggtccagccgcgccaagagaagcggatctggcgtgaagcagaccctgaatttcgacctgctgaagctggctggcgacgtggaatccaacccaggcccttctagaggccatatgaccgagtacaagcccacggtgcgcctcgccacccgcgacgacgtccccagggccgtacgcaccctcgccgccgcgttcgccgactaccccgccacgcgccacaccgtcgatccggaccgccacatcgagcgggtcaccgagctgcaagaactcttcctcacgcgcgtcgggctcgacatcggcaaggtgtgggtcgcggacgacggcgccgcggtggcggtctggaccacgccggagagcgtcgaagcgggggcggtgttcgccgagatcggcccgcgcatggccgagttgagcggttcccggctggccgcgcagcaacagatggaaggcctcctggcgccgcaccggcccaaggagcccgcgtggttcctggccaccgtcggcgtctcgcccgaccaccagggcaagggtctgggcagcgccgtcgtgctccccggagtggaggcggccgagcgcgccggggtgcccgccttcctggagacctccgcgccccgcaacctccccttctacgagcggctcggcttcaccgtcaccgccgacgtcgaggtgcccgaaggaccgcgcacctggtgcatgacccgcaagcccggtgcctga

SEQ ID NO: 6964 - DNA, 2043 bp, Artificial Sequence
  Synthetic Polynucloetide
atggccttaccagtgaccgccttgctcctgccgctggccttgctgctccacgccgccaggccggaggtgcagctggttgaatctggcggaggactggttcagcctggcggatctctgagactgtcttgtgccgccagcggcttcaacatcaaggatacctgtatcggctgggttcgcagagcccctggcaaagaggaagaactggtcgccaaaatctgcaagtacagcggccacaccagatacgccgacagcgtgaagggcagattcaccatcagcgccgacaccagcaagaacaccgcctacctccagatgaacagcctgagagccgaggacaccgccgtgtactattgtgccgctgtgtccgtcagagatgggcactacaattactggggccagggcaccaccgtgaccgtttcttcactcgaggacaaaactcacacatgcccaccgtgcccagcaggcagagccgattgcggctttaccagcgagagctaccagcagggcgtgctgagcgccaccatcctgtacgagatcctgctgggcaaggccaccctgtacgccgtgctggtgtctgccctggtgctgatggctatggtcaagcggaaggacagccggggaagggccaagcgatctggatctggagcaacaaacttctcactactcaaacaagcaggtgacgtggaggagaatcccgggcctactagtatggactggatttggcgcatccttttccttgtcggcgctgctaccggcgcgcattccttcgaagtgcagctgcttgaaagtggcggcggactgattcagcctggcggatctctgagactgagctgtgccgccagcggcttcaccttttctagccacgccatgacctgggtccgacaggcacctggaaaagggcttgaatgggtgtccgccatcagcggctctggcgattacacacactacgccgacagcgtgaagggcagattcaccatcagcagagacaacagcaagaacaccgtgtacctccagatgaacagcctgagagccgaggacagcgccgtgtattattgcgccaaggatgaggatggcggcagcctgcttggacacagaggacaaggcaccctggtcaccgtttcttccacgcgtgataaaactcatacctgtccgccatgcccggcaatccccgaggacacattcttcccaagccccgagagcagctgcgacgtgaagctggtggaaaagagcttcgagacagacaccaacctgaacttccagaacctgagcgtgatcggcttcagaatcctgctgctgaaagtggccggctttaacctgctgatgaccctgcggctgtggtccagccgcgccaagagaagcggatctggcgtgaagcagaccctgaatttcgacctgctgaagctggctggcgacgtggaatccaacccaggcccttctagaggccatatgaccgagtacaagcccacggtgcgcctcgccacccgcgacgacgtccccagggccgtacgcaccctcgccgccgcgttcgccgactaccccgccacgcgccacaccgtcgatccggaccgccacatcgagcgggtcaccgagctgcaagaactcttcctcacgcgcgtcgggctcgacatcggcaaggtgtgggtcgcggacgacggcgccgcggtggcggtctggaccacgccggagagcgtcgaagcgggggcggtgttcgccgagatcggcccgcgcatggccgagttgagcggttcccggctggccgcgcagcaacagatggaaggcctcctggcgccgcaccggcccaaggagcccgcgtggttcctggccaccgtcggcgtctcgcccgaccaccagggcaagggtctgggcagcgccgtcgtgctccccggagtggaggcggccgagcgcgccggggtgcccgccttcctggagacctccgcgccccgcaacctccccttctacgagcggctcggcttcaccgtcaccgccgacgtcgaggtgcccgaaggaccgcgcacctggtgcatgacccgcaagcccggtgcctga

SEQ ID NO: 6965 - DNA, 1341 bp, Artificial Sequence
  Synthetic Polynucloetide
atggccttaccagtgaccgccttgctcctgccgctggccttgctgctccacgccgccaggccggaggtgcagctggttgaatctggcggaggactggttcagcctggcggatctctgagactgtcttgtgccgccagcggcttcaacatcaaggatacctgtatcggctgggttcgcagagcccctggcaaagaggaagaactggtcgccaaaatctgcaagtacagcggccacaccagatacgccgacagcgtgaagggcagattcaccatcagcgccgacaccagcaagaacaccgcctacctccagatgaacagcctgagagccgaggacaccgccgtgtactattgtgccgctgtgtccgtcagagatgggcactacaattactggggccagggcaccaccgtgaccgtttcttcactcgaggacaaaactcacacatgcccaccgtgcccagcaggcagagccgattgcggctttaccagcgagagctaccagcagggcgtgctgagcgccaccatcctgtacgagatcctgctgggcaaggccaccctgtacgccgtgctggtgtctgccctggtgctgatggctatggtcaagcggaaggacagccggggaagggccaagcgatctggatctggagcaacaaacttctcactactcaaacaagcaggtgacgtggaggagaatcccgggcctactagtatggactggatttggcgcatccttttccttgtcggcgctgctaccggcgcgcattccttcgaagtgcagctgcttgaaagtggcggcggactgattcagcctggcggatctctgagactgagctgtgccgccagcggcttcaccttttctagccacgccatgacctgggtccgacaggcacctggaaaagggcttgaatgggtgtccgccatcagcggctctggcgattacacacactacgccgacagcgtgaagggcagattcaccatcagcagagacaacagcaagaacaccgtgtacctccagatgaacagcctgagagccgaggacagcgccgtgtattattgcgccaaggatgaggatggcggcagcctgcttggacacagaggacaaggcaccctggtcaccgtttcttccacgcgtgataaaactcatacctgtccgccatgcccggcaatccccgaggacacattcttcccaagccccgagagcagctgcgacgtgaagctggtggaaaagagcttcgagacagacaccaacctgaacttccagaacctgagcgtgatcggcttcagaatcctgctgctgaaagtggccggctttaacctgctgatgaccctgcggctgtggtccagc

SEQ ID NO: 6966 - DNA, 1314 bp, Artificial Sequence
  Synthetic Polynucloetide
atggccttaccagtgaccgccttgctcctgccgctggccttgctgctccacgccgccaggccggaggtgcagctggttgaatctggcggaggactggttcagcctggcggatctctgagactgtcttgtgccgccagcggcttcaacatcaaggatacctgtatcggctgggttcgcagagcccctggcaaagaggaagaactggtcgccaaaatctgcaagtacagcggccacaccagatacgccgacagcgtgaagggcagattcaccatcagcgccgacaccagcaagaacaccgcctacctccagatgaacagcctgagagccgaggacaccgccgtgtactattgtgccgctgtgtccgtcagagatgggcactacaattactggggccagggcaccaccgtgaccgtttcttcactcgagggatctggcagagccgattgcggctttaccagcgagagctaccagcagggcgtgctgagcgccaccatcctgtacgagatcctgctgggcaaggccaccctgtacgccgtgctggtgtctgccctggtgctgatggctatggtcaagcggaaggacagccggggaagggccaagcgatctggatctggagcaacaaacttctcactactcaaacaagcaggtgacgtggaggagaatcccgggcctactagtatggactggatttggcgcatccttttccttgtcggcgctgctaccggcgcgcattccttcgaagtgcagctgcttgaaagtggcggcggactgattcagcctggcggatctctgagactgagctgtgccgccagcggcttcaccttttctagccacgccatgacctgggtccgacaggcacctggaaaagggcttgaatgggtgtccgccatcagcggctctggcgattacacacactacgccgacagcgtgaagggcagattcaccatcagcagagacaacagcaagaacaccgtgtacctccagatgaacagcctgagagccgaggacagcgccgtgtattattgcgccaaggatgaggatggcggcagcctgcttggacacagaggacaaggcaccctggtcaccgtttcttccacgcgtgataaaactcatacctgtccgccatgcccggcaatccccgaggacacattcttcccaagccccgagagcagctgcgacgtgaagctggtggaaaagagcttcgagacagacaccaacctgaacttccagaacctgagcgtgatcggcttcagaatcctgctgctgaaagtggccggctttaacctgctgatgaccctgcggctgtggtccagc

SEQ ID NO: 6967 - DNA, 2670 bp, Artificial Sequence
  Synthetic Polynucloetide
atggccttaccagtgaccgccttgctcctgccgctggccttgctgctccacgccgccaggccggaggtgcagctggttgaatctggcggaggactggttcagcctggcggatctctgagactgtcttgtgccgccagcggcttcaacatcaaggatacctgtatcggctgggttcgcagagcccctggcaaagaggaagaactggtcgccaaaatctgcaagtacagcggccacaccagatacgccgacagcgtgaagggcagattcaccatcagcgccgacaccagcaagaacaccgcctacctccagatgaacagcctgagagccgaggacaccgccgtgtactattgtgccgctgtgtccgtcagagatgggcactacaattactggggccagggcaccaccgtgaccgtttcttcactcgagggacagcctaaggccaatcctaccgtgacactgttccctccaagcagcgaagaactccaggccaacaaggccacacttgtgtgcctgatctccgacttctaccctggggctgtgacagtggcttggaaggccgatggatctcctgtgaaagccggcgtggaaaccaccaagccatccaagcagagcaacaacaaatacgccgccagctcctacctgagcctgacacctgagcagtggaagtcccacagatcctacagctgccaagtgacccacgaaggcagcaccgtggaaaagacagtggcccctacagagtgcagccccatcaagaccgatgtgattacaatggaccccaaggacaactgctccaaggacgccaacgataccctgctgctccagctgaccaacaccagcgcctactacatgtacttgttgctgctgctgaagtccgtggtgtacttcgccatcatcacatgctgcctgctgcggagaaccgccttctgctgcaacggcgagaagtctagggccaagcgatctggatctggagcaacaaacttctcactactcaaacaagcaggtgacgtggaggagaatcccgggcctactagtatggactggatttggcgcatccttttccttgtcggcgctgctaccggcgcgcattccttcgaagtgcagctgcttgaaagtggcggcggactgattcagcctggcggatctctgagactgagctgtgccgccagcggcttcaccttttctagccacgccatgacctgggtccgacaggcacctggaaaagggcttgaatgggtgtccgccatcagcggctctggcgattacacacactacgccgacagcgtgaagggcagattcaccatcagcagagacaacagcaagaacaccgtgtacctccagatgaacagcctgagagccgaggacagcgccgtgtattattgcgccaaggatgaggatggcggcagcctgcttggacacagaggacaaggcaccctggtcaccgtttcttccacgcgtgcctctacaaagggaccctccgtgtttcctctggctcccagcagcaagtctacaagcggaggaacagccgctctgggctgcctggtcaaggattactttcccgagcctgtgaccgtgtcctggaatagcggagcactgacaagcggcgtgcacacctttccagccgtgctgcaaagcagcggcctgtactctctgagcagcgtggtcacagtgcctagctctagcctgggcacccagacctacatctgcaatgtgaaccacaagcctagcaacaccaaggtggacaagagagtggaacccaagagctgtgaagtgaaaaccgactccaccgaccacgtgaagcccaaagagacagagaacaccaagcagcccagcaagagctgccacaagcccaaggccatcgtgcacaccgagaaagtgaacatgatgagcctgaccgtgctgggcctgcggatgctgttcgccaaaaccgtggccgtgaacttcctgctgaccgccaagctgttcttcctccgcgccaagagaagcggatctggcgtgaagcagaccctgaatttcgacctgctgaagctggctggcgacgtggaatccaacccaggcccttctagaggccatatgaccgagtacaagcccacggtgcgcctcgccacccgcgacgacgtccccagggccgtacgcaccctcgccgccgcgttcgccgactaccccgccacgcgccacaccgtcgatccggaccgccacatcgagcgggtcaccgagctgcaagaactcttcctcacgcgcgtcgggctcgacatcggcaaggtgtgggtcgcggacgacggcgccgcggtggcggtctggaccacgccggagagcgtcgaagcgggggcggtgttcgccgagatcggcccgcgcatggccgagttgagcggttcccggctggccgcgcagcaacagatggaaggcctcctggcgccgcaccggcccaaggagcccgcgtggttcctggccaccgtcggcgtctcgcccgaccaccagggcaagggtctgggcagcgccgtcgtgctccccggagtggaggcggccgagcgcgccggggtgcccgccttcctggagacctccgcgccccgcaacctccccttctacgagcggctcggcttcaccgtcaccgccgacgtcgaggtgcccgaaggaccgcgcacctggtgcatgacccgcaagcccggtgcctga

SEQ ID NO: 6968 - DNA, 1968 bp, Artificial Sequence; identical to SEQ ID NO: 6930
  Synthetic Polynucloetide

SEQ ID NO: 6969 - DNA, 2055 bp, Artificial Sequence
  Synthetic Polynucloetide
atggccttaccagtgaccgccttgctcctgccgctggccttgctgctccacgccgccaggccggaggtgcagctggttgaatctggcggaggactggttcagcctggcggatctctgagactgtcttgtgccgccagcggcttcaacatcaaggatacctgtatcggctgggttcgcagagcccctggcaaagaggaagaactggtcgccaaaatctgcaagtacagcggccacaccagatacgccgacagcgtgaagggcagattcaccatcagcgccgacaccagcaagaacaccgcctacctccagatgaacagcctgagagccgaggacaccgccgtgtactattgtgccgctgtgtccgtcagagatgggcactacaattactggggccagggcaccaccgtgaccgtttcttcactcgagggatctcccatcaagaccgatgtgattacaatggaccccaaggacaactgctccaaggacgccaacgataccctgctgctccagctgaccaacaccagcgcctactacatgtacttgttgctgctgctgaagtccgtggtgtacttcgccatcatcacatgctgcctgctgcggagaaccgccttctgctgcaacggcgagaagtctagggccaagcgatctggatctggagcaacaaacttctcactactcaaacaagcaggtgacgtggaggagaatcccgggcctactagtatggactggatttggcgcatccttttccttgtcggcgctgctaccggcgcgcattccttcgaagtgcagctgcttgaaagtggcggcggactgattcagcctggcggatctctgagactgagctgtgccgccagcggcttcaccttttctagccacgccatgacctgggtccgacaggcacctggaaaagggcttgaatgggtgtccgccatcagcggctctggcgattacacacactacgccgacagcgtgaagggcagattcaccatcagcagagacaacagcaagaacaccgtgtacctccagatgaacagcctgagagccgaggacagcgccgtgtattattgcgccaaggatgaggatggcggcagcctgcttggacacagaggacaaggcaccctggtcaccgtttcttccacgcgtggcagcgaagtgaaaaccgactccaccgaccacgtgaagcccaaagagacagagaacaccaagcagcccagcaagagctgccacaagcccaaggccatcgtgcacaccgagaaagtgaacatgatgagcctgaccgtgctgggcctgcggatgctgttcgccaaaaccgtggccgtgaacttcctgctgaccgccaagctgttcttcctccgcgccaagagaagcggatctggcgtgaagcagaccctgaatttcgacctgctgaagctggctggcgacgtggaatccaacccaggcccttctagaggccatatgaccgagtacaagcccacggtgcgcctcgccacccgcgacgacgtccccagggccgtacgcaccctcgccgccgcgttcgccgactaccccgccacgcgccacaccgtcgatccggaccgccacatcgagcgggtcaccgagctgcaagaactcttcctcacgcgcgtcgggctcgacatcggcaaggtgtgggtcgcggacgacggcgccgcggtggcggtctggaccacgccggagagcgtcgaagcgggggcggtgttcgccgagatcggcccgcgcatggccgagttgagcggttcccggctggccgcgcagcaacagatggaaggcctcctggcgccgcaccggcccaaggagcccgcgtggttcctggccaccgtcggcgtctcgcccgaccaccagggcaagggtctgggcagcgccgtcgtgctccccggagtggaggcggccgagcgcgccggggtgcccgccttcctggagacctccgcgccccgcaacctccccttctacgagcggctcggcttcaccgtcaccgccgacgtcgaggtgcccgaaggaccgcgcacctggtgcatgacccgcaagcccggtgcctga

SEQ ID NO: 6970 - DNA, 1353 bp, Artificial Sequence
  Synthetic Polynucloetide
atggccttaccagtgaccgccttgctcctgccgctggccttgctgctccacgccgccaggccggaggtgcagctggttgaatctggcggaggactggttcagcctggcggatctctgagactgtcttgtgccgccagcggcttcaacatcaaggatacctgtatcggctgggttcgcagagcccctggcaaagaggaagaactggtcgccaaaatctgcaagtacagcggccacaccagatacgccgacagcgtgaagggcagattcaccatcagcgccgacaccagcaagaacaccgcctacctccagatgaacagcctgagagccgaggacaccgccgtgtactattgtgccgctgtgtccgtcagagatgggcactacaattactggggccagggcaccaccgtgaccgtttcttcactcgagggatctcccatcaagaccgatgtgattacaatggaccccaaggacaactgctccaaggacgccaacgataccctgctgctccagctgaccaacaccagcgcctactacatgtacttgttgctgctgctgaagtccgtggtgtacttcgccatcatcacatgctgcctgctgcggagaaccgccttctgctgcaacggcgagaagtctagggccaagcgatctggatctggagcaacaaacttctcactactcaaacaagcaggtgacgtggaggagaatcccgggcctactagtatggactggatttggcgcatccttttccttgtcggcgctgctaccggcgcgcattccttcgaagtgcagctgcttgaaagtggcggcggactgattcagcctggcggatctctgagactgagctgtgccgccagcggcttcaccttttctagccacgccatgacctgggtccgacaggcacctggaaaagggcttgaatgggtgtccgccatcagcggctctggcgattacacacactacgccgacagcgtgaagggcagattcaccatcagcagagacaacagcaagaacaccgtgtacctccagatgaacagcctgagagccgaggacagcgccgtgtattattgcgccaaggatgaggatggcggcagcctgcttggacacagaggacaaggcaccctggtcaccgtttcttccacgcgtggcagcgaagtgaaaaccgactccaccgaccacgtgaagcccaaagagacagagaacaccaagcagcccagcaagagctgccacaagcccaaggccatcgtgcacaccgagaaagtgaacatgatgagcctgaccgtgctgggcctgcggatgctgttcgccaaaaccgtggccgtgaacttcctgctgaccgccaagctgttcttcctc

SEQ ID NO: 6971 - DNA, 2082 bp, Artificial Sequence
  Synthetic Polynucloetide
atggccttaccagtgaccgccttgctcctgccgctggccttgctgctccacgccgccaggccggaggtgcagctggttgaatctggcggaggactggttcagcctggcggatctctgagactgtcttgtgccgccagcggcttcaacatcaaggatacctgtatcggctgggttcgcagagcccctggcaaagaggaagaactggtcgccaaaatctgcaagtacagcggccacaccagatacgccgacagcgtgaagggcagattcaccatcagcgccgacaccagcaagaacaccgcctacctccagatgaacagcctgagagccgaggacaccgccgtgtactattgtgccgctgtgtccgtcagagatgggcactacaattactggggccagggcaccaccgtgaccgtttcttcactcgaggacaaaactcacacatgcccaccgtgcccagcacccatcaagaccgatgtgattacaatggaccccaaggacaactgctccaaggacgccaacgataccctgctgctccagctgaccaacaccagcgcctactacatgtacttgttgctgctgctgaagtccgtggtgtacttcgccatcatcacatgctgcctgctgcggagaaccgccttctgctgcaacggcgagaagtctagggccaagcgatctggatctggagcaacaaacttctcactactcaaacaagcaggtgacgtggaggagaatcccgggcctactagtatggactggatttggcgcatccttttccttgtcggcgctgctaccggcgcgcattccttcgaagtgcagctgcttgaaagtggcggcggactgattcagcctggcggatctctgagactgagctgtgccgccagcggcttcaccttttctagccacgccatgacctgggtccgacaggcacctggaaaagggcttgaatgggtgtccgccatcagcggctctggcgattacacacactacgccgacagcgtgaagggcagattcaccatcagcagagacaacagcaagaacaccgtgtacctccagatgaacagcctgagagccgaggacagcgccgtgtattattgcgccaaggatgaggatggcggcagcctgcttggacacagaggacaaggcaccctggtcaccgtttcttccacgcgtggcagcgaagtgaaaaccgactccaccgaccacgtgaagcccaaagagacagagaacaccaagcagcccagcaagagctgccacaagcccaaggccatcgtgcacaccgagaaagtgaacatgatgagcctgaccgtgctgggcctgcggatgctgttcgccaaaaccgtggccgtgaacttcctgctgaccgccaagctgttcttcctccgcgccaagagaagcggatctggcgtgaagcagaccctgaatttcgacctgctgaagctggctggcgacgtggaatccaacccaggcccttctagaggccatatgaccgagtacaagcccacggtgcgcctcgccacccgcgacgacgtccccagggccgtacgcaccctcgccgccgcgttcgccgactaccccgccacgcgccacaccgtcgatccggaccgccacatcgagcgggtcaccgagctgcaagaactcttcctcacgcgcgtcgggctcgacatcggcaaggtgtgggtcgcggacgacggcgccgcggtggcggtctggaccacgccggagagcgtcgaagcgggggcggtgttcgccgagatcggcccgcgcatggccgagttgagcggttcccggctggccgcgcagcaacagatggaaggcctcctggcgccgcaccggcccaaggagcccgcgtggttcctggccaccgtcggcgtctcgcccgaccaccagggcaagggtctgggcagcgccgtcgtgctccccggagtggaggcggccgagcgcgccggggtgcccgccttcctggagacctccgcgccccgcaacctccccttctacgagcggctcggcttcaccgtcaccgccgacgtcgaggtgcccgaaggaccgcgcacctggtgcatgacccgcaagcccggtgcctga

SEQ ID NO: 6972 - DNA, 2082 bp, Artificial Sequence
  Synthetic Polynucloetide
atggccttaccagtgaccgccttgctcctgccgctggccttgctgctccacgccgccaggccggaggtgcagctggttgaatctggcggaggactggttcagcctggcggatctctgagactgtcttgtgccgccagcggcttcaacatcaaggatacctgtatcggctgggttcgcagagcccctggcaaagaggaagaactggtcgccaaaatctgcaagtacagcggccacaccagatacgccgacagcgtgaagggcagattcaccatcagcgccgacaccagcaagaacaccgcctacctccagatgaacagcctgagagccgaggacaccgccgtgtactattgtgccgctgtgtccgtcagagatgggcactacaattactggggccagggcaccaccgtgaccgtttcttcactcgagggatctcccatcaagaccgatgtgattacaatggaccccaaggacaactgctccaaggacgccaacgataccctgctgctccagctgaccaacaccagcgcctactacatgtacttgttgctgctgctgaagtccgtggtgtacttcgccatcatcacatgctgcctgctgcggagaaccgccttctgctgcaacggcgagaagtctagggccaagcgatctggatctggagcaacaaacttctcactactcaaacaagcaggtgacgtggaggagaatcccgggcctactagtatggactggatttggcgcatccttttccttgtcggcgctgctaccggcgcgcattccttcgaagtgcagctgcttgaaagtggcggcggactgattcagcctggcggatctctgagactgagctgtgccgccagcggcttcaccttttctagccacgccatgacctgggtccgacaggcacctggaaaagggcttgaatgggtgtccgccatcagcggctctggcgattacacacactacgccgacagcgtgaagggcagattcaccatcagcagagacaacagcaagaacaccgtgtacctccagatgaacagcctgagagccgaggacagcgccgtgtattattgcgccaaggatgaggatggcggcagcctgcttggacacagaggacaaggcaccctggtcaccgtttcttccacgcgtgataaaactcatacctgtccgccatgcccggcagaagtgaaaaccgactccaccgaccacgtgaagcccaaagagacagagaacaccaagcagcccagcaagagctgccacaagcccaaggccatcgtgcacaccgagaaagtgaacatgatgagcctgaccgtgctgggcctgcggatgctgttcgccaaaaccgtggccgtgaacttcctgctgaccgccaagctgttcttcctccgcgccaagagaagcggatctggcgtgaagcagaccctgaatttcgacctgctgaagctggctggcgacgtggaatccaacccaggcccttctagaggccatatgaccgagtacaagcccacggtgcgcctcgccacccgcgacgacgtccccagggccgtacgcaccctcgccgccgcgttcgccgactaccccgccacgcgccacaccgtcgatccggaccgccacatcgagcgggtcaccgagctgcaagaactcttcctcacgcgcgtcgggctcgacatcggcaaggtgtgggtcgcggacgacggcgccgcggtggcggtctggaccacgccggagagcgtcgaagcgggggcggtgttcgccgagatcggcccgcgcatggccgagttgagcggttcccggctggccgcgcagcaacagatggaaggcctcctggcgccgcaccggcccaaggagcccgcgtggttcctggccaccgtcggcgtctcgcccgaccaccagggcaagggtctgggcagcgccgtcgtgctccccggagtggaggcggccgagcgcgccggggtgcccgccttcctggagacctccgcgccccgcaacctccccttctacgagcggctcggcttcaccgtcaccgccgacgtcgaggtgcccgaaggaccgcgcacctggtgcatgacccgcaagcccggtgcctga

SEQ ID NO: 6973 - DNA, 2109 bp, Artificial Sequence
  Synthetic Polynucloetide
atggccttaccagtgaccgccttgctcctgccgctggccttgctgctccacgccgccaggccggaggtgcagctggttgaatctggcggaggactggttcagcctggcggatctctgagactgtcttgtgccgccagcggcttcaacatcaaggatacctgtatcggctgggttcgcagagcccctggcaaagaggaagaactggtcgccaaaatctgcaagtacagcggccacaccagatacgccgacagcgtgaagggcagattcaccatcagcgccgacaccagcaagaacaccgcctacctccagatgaacagcctgagagccgaggacaccgccgtgtactattgtgccgctgtgtccgtcagagatgggcactacaattactggggccagggcaccaccgtgaccgtttcttcactcgaggacaaaactcacacatgcccaccgtgcccagcacccatcaagaccgatgtgattacaatggaccccaaggacaactgctccaaggacgccaacgataccctgctgctccagctgaccaacaccagcgcctactacatgtacttgttgctgctgctgaagtccgtggtgtacttcgccatcatcacatgctgcctgctgcggagaaccgccttctgctgcaacggcgagaagtctagggccaagcgatctggatctggagcaacaaacttctcactactcaaacaagcaggtgacgtggaggagaatcccgggcctactagtatggactggatttggcgcatccttttccttgtcggcgctgctaccggcgcgcattccttcgaagtgcagctgcttgaaagtggcggcggactgattcagcctggcggatctctgagactgagctgtgccgccagcggcttcaccttttctagccacgccatgacctgggtccgacaggcacctggaaaagggcttgaatgggtgtccgccatcagcggctctggcgattacacacactacgccgacagcgtgaagggcagattcaccatcagcagagacaacagcaagaacaccgtgtacctccagatgaacagcctgagagccgaggacagcgccgtgtattattgcgccaaggatgaggatggcggcagcctgcttggacacagaggacaaggcaccctggtcaccgtttcttccacgcgtgataaaactcatacctgtccgccatgcccggcagaagtgaaaaccgactccaccgaccacgtgaagcccaaagagacagagaacaccaagcagcccagcaagagctgccacaagcccaaggccatcgtgcacaccgagaaagtgaacatgatgagcctgaccgtgctgggcctgcggatgctgttcgccaaaaccgtggccgtgaacttcctgctgaccgccaagctgttcttcctccgcgccaagagaagcggatctggcgtgaagcagaccctgaatttcgacctgctgaagctggctggcgacgtggaatccaacccaggcccttctagaggccatatgaccgagtacaagcccacggtgcgcctcgccacccgcgacgacgtccccagggccgtacgcaccctcgccgccgcgttcgccgactaccccgccacgcgccacaccgtcgatccggaccgccacatcgagcgggtcaccgagctgcaagaactcttcctcacgcgcgtcgggctcgacatcggcaaggtgtgggtcgcggacgacggcgccgcggtggcggtctggaccacgccggagagcgtcgaagcgggggcggtgttcgccgagatcggcccgcgcatggccgagttgagcggttcccggctggccgcgcagcaacagatggaaggcctcctggcgccgcaccggcccaaggagcccgcgtggttcctggccaccgtcggcgtctcgcccgaccaccagggcaagggtctgggcagcgccgtcgtgctccccggagtggaggcggccgagcgcgccggggtgcccgccttcctggagacctccgcgccccgcaacctccccttctacgagcggctcggcttcaccgtcaccgccgacgtcgaggtgcccgaaggaccgcgcacctggtgcatgacccgcaagcccggtgcctga

SEQ ID NO: 6974 - DNA, 1407 bp, Artificial Sequence
  Synthetic Polynucloetide
atggccttaccagtgaccgccttgctcctgccgctggccttgctgctccacgccgccaggccggaggtgcagctggttgaatctggcggaggactggttcagcctggcggatctctgagactgtcttgtgccgccagcggcttcaacatcaaggatacctgtatcggctgggttcgcagagcccctggcaaagaggaagaactggtcgccaaaatctgcaagtacagcggccacaccagatacgccgacagcgtgaagggcagattcaccatcagcgccgacaccagcaagaacaccgcctacctccagatgaacagcctgagagccgaggacaccgccgtgtactattgtgccgctgtgtccgtcagagatgggcactacaattactggggccagggcaccaccgtgaccgtttcttcactcgaggacaaaactcacacatgcccaccgtgcccagcacccatcaagaccgatgtgattacaatggaccccaaggacaactgctccaaggacgccaacgataccctgctgctccagctgaccaacaccagcgcctactacatgtacttgttgctgctgctgaagtccgtggtgtacttcgccatcatcacatgctgcctgctgcggagaaccgccttctgctgcaacggcgagaagtctagggccaagcgatctggatctggagcaacaaacttctcactactcaaacaagcaggtgacgtggaggagaatcccgggcctactagtatggactggatttggcgcatccttttccttgtcggcgctgctaccggcgcgcattccttcgaagtgcagctgcttgaaagtggcggcggactgattcagcctggcggatctctgagactgagctgtgccgccagcggcttcaccttttctagccacgccatgacctgggtccgacaggcacctggaaaagggcttgaatgggtgtccgccatcagcggctctggcgattacacacactacgccgacagcgtgaagggcagattcaccatcagcagagacaacagcaagaacaccgtgtacctccagatgaacagcctgagagccgaggacagcgccgtgtattattgcgccaaggatgaggatggcggcagcctgcttggacacagaggacaaggcaccctggtcaccgtttcttccacgcgtgataaaactcatacctgtccgccatgcccggcagaagtgaaaaccgactccaccgaccacgtgaagcccaaagagacagagaacaccaagcagcccagcaagagctgccacaagcccaaggccatcgtgcacaccgagaaagtgaacatgatgagcctgaccgtgctgggcctgcggatgctgttcgccaaaaccgtggccgtgaacttcctgctgaccgccaagctgttcttcctc

SEQ ID NO: 6975 - DNA, 2181 bp, Artificial Sequence
  Synthetic Polynucloetide
atggccttaccagtgaccgccttgctcctgccgctggccttgctgctccacgccgccaggccggaagtgcagctgcttgaaagtggcggcggactgattcagcctggcggatctctgagactgagctgtgccgccagcggcttcaccttttctagccacgccatgacctgggtccgacaggcacctggaaaagggcttgaatgggtgtccgccatcagcggctctggcgattacacacactacgccgacagcgtgaagggcagattcaccatcagcagagacaacagcaagaacaccgtgtacctccagatgaacagcctgagagccgaggacagcgccgtgtattattgcgccaaggatgaggatggcggcagcctgcttggacacagaggacaaggcaccctggtcaccgtttcttccctcgagagcggcggaggcggatctttcgaagtgcagctggttgaatctggcggaggactggttcagcctggcggatctctgagactgtcttgtgccgccagcggcttcagcttcagcgacttttggatgagctgggtccgacaggcccctggcaaaggacttgaatgggtcgccacaatcagccaggccggcagcgagaaggactacgtggactctgtgaagggcagattcaccatcagccgggacaacgccaagaagtccctgtacctccagatgaacagcctgagagccgaggacaccgccgtgtactattgtgcctctggcgtgtacagcttcgactacagaggccagggcaccctggtcacagtctcttctacgcgtgagcagaaactgatctcggaagaggatctggcgaagcccaccacgacgccagcgccgcgaccaccaacaccggcgcccaccatcgcgtcgcagcccctgtccctgcgcccagaggcgtgccggccagcggcggggggcgcagtgcacacgagggggctggacttcgcctgtgacatctacatctgggcgcccttggccgggacttgtggggtccttctcctgtcactggttatcaccctttactgcaaacggggcagaaagaaactcctgtatatattcaaacaaccatttatgagaccagtacaaactactcaagaggaagatggctgtagctgccgatttccagaagaagaagaaggaggatgtgaactgagagtgaagttcagcaggagcgcagacgcccccgcgtaccagcagggccagaaccagctctataacgagctgaatctaggacgaagagaggagtacgatgttttggacaagagacgtggccgggaccctgagatggggggaaagccgagaaggaagaaccctcaggaaggcctgtacaatgaactgcagaaagataagatggcggaggcctacagtgagattgggatgaaaggcgagcgccggaggggcaaggggcacgatggcctttaccagggtctcagtacagccaccaaggacacctacgacgcccttcacatgcaggccctgccccctcgctctagtggctccggcgagggcagaggaagtctactaacctgcggagatgtggaagaaaatcctggcccacatatgaccgagtacaagcccacggtgcgcctcgccacccgcgacgacgtccccagggccgtacgcaccctcgccgccgcgttcgccgactaccccgccacgcgccacaccgtcgatccggaccgccacatcgagcgggtcaccgagctgcaagaactcttcctcacgcgcgtcgggctcgacatcggcaaggtgtgggtcgcggacgacggcgccgcggtggcggtctggaccacgccggagagcgtcgaagcgggggcggtgttcgccgagatcggcccgcgcatggccgagttgagcggttcccggctggccgcgcagcaacagatggaaggcctcctggcgccgcaccggcccaaggagcccgcgtggttcctggccaccgtcggcgtctcgcccgaccaccagggcaagggtctgggcagcgccgtcgtgctccccggagtggaggcggccgagcgcgccggggtgcccgccttcctggagacctccgcgccccgcaacctccccttctacgagcggctcggcttcaccgtcaccgccgacgtcgaggtgcccgaaggaccgcgcacctggtgcatgacccgcaagcccggtgcctga

SEQ ID NO: 6976 - DNA, 2163 bp, Artificial Sequence
  Synthetic Polynucloetide
atggccttaccagtgaccgccttgctcctgccgctggccttgctgctccacgccgccaggccggaagtgcagctgcttgaaagtggcggcggactgattcagcctggcggatctctgagactgagctgtgccgccagcggcttcaccttttctagccacgccatgacctgggtccgacaggcacctggaaaagggcttgaatgggtgtccgccatcagcggctctggcgattacacacactacgccgacagcgtgaagggcagattcaccatcagcagagacaacagcaagaacaccgtgtacctccagatgaacagcctgagagccgaggacagcgccgtgtattattgcgccaaggatgaggatggcggcagcctgcttggacacagaggacaaggcaccctggtcaccgtttcttccctcgagagcggcggaggcggatctttcgaagtgcagctggttgaatctggcggaggactggttcagcctggcggatctctgagactgtcttgtgccgccagcggcttcagcttcagcgacttttggatgagctgggtccgacaggcccctggcaaaggacttgaatgggtcgccacaatcagccaggccggcagcgagaaggactacgtggactctgtgaagggcagattcaccatcagccgggacaacgccaagaagtccctgtacctccagatgaacagcctgagagccgaggacaccgccgtgtactattgtgcctctggcgtgtacagcttcgactacagaggccagggcaccctggtcacagtctcttctacgcgtgagcagaaactgatctcggaagaggatctgaaaattgaagttatgtatcctcctccttacctagacaatgagaagagcaatggaaccattatccatgtgaaagggaaacacctttgtccaagtcccctatttcccggaccttctaagcccttttgggtgctggtggtggttgggggagtcctggcttgctatagcttgctagtaacagtggcctttattattttctgggtgaggagtaagaggagcaggctcctgcacagtgactacatgaacatgactccacgccgccccggacccacccgcaagcattaccagccctatgccccaccacgcgacttcgcagcctatcgctccagagtgaagttcagcaggagcgcagacgcccccgcgtaccagcagggccagaaccagctctataacgagctcaatctaggacgaagagaggagtacgatgttttggacaagagacgtggccgggaccctgagatggggggaaagccgagaaggaagaaccctcaggaaggcctgtacaatgaactgcagaaagataagatggcggaggcctacagtgagattgggatgaaaggcgagcgccggaggggcaaggggcacgatggcctttaccagggtctcagtacagccaccaaggacacctacgacgcccttcacatgcaggccctgccccctcgctctagtggctccggcgagggcagaggaagtctactaacctgcggagatgtggaagaaaatcctggcccacatatgaccgagtacaagcccacggtgcgcctcgccacccgcgacgacgtccccagggccgtacgcaccctcgccgccgcgttcgccgactaccccgccacgcgccacaccgtcgatccggaccgccacatcgagcgggtcaccgagctgcaagaactcttcctcacgcgcgtcgggctcgacatcggcaaggtgtgggtcgcggacgacggcgccgcggtggcggtctggaccacgccggagagcgtcgaagcgggggcggtgttcgccgagatcggcccgcgcatggccgagttgagcggttcccggctggccgcgcagcaacagatggaaggcctcctggcgccgcaccggcccaaggagcccgcgtggttcctggccaccgtcggcgtctcgcccgaccaccagggcaagggtctgggcagcgccgtcgtgctccccggagtggaggcggccgagcgcgccggggtgcccgccttcctggagacctccgcgccccgcaacctccccttctacgagcggctcggcttcaccgtcaccgccgacgtcgaggtgcccgaaggaccgcgcacctggtgcatgacccgcaagcccggtgcctga

SEQ ID NO: 6977 - DNA, 1491 bp, Artificial Sequence
  Synthetic Polynucloetide
atggccttaccagtgaccgccttgctcctgccgctggccttgctgctccacgccgccaggccggaagtgcagctgcttgaaagtggcggcggactgattcagcctggcggatctctgagactgagctgtgccgccagcggcttcaccttttctagccacgccatgacctgggtccgacaggcacctggaaaagggcttgaatgggtgtccgccatcagcggctctggcgattacacacactacgccgacagcgtgaagggcagattcaccatcagcagagacaacagcaagaacaccgtgtacctccagatgaacagcctgagagccgaggacagcgccgtgtattattgcgccaaggatgaggatggcggcagcctgcttggacacagaggacaaggcaccctggtcaccgtttcttccctcgagagcggcggaggcggatctttcgaagtgcagctggttgaatctggcggaggactggttcagcctggcggatctctgagactgtcttgtgccgccagcggcttcagcttcagcgacttttggatgagctgggtccgacaggcccctggcaaaggacttgaatgggtcgccacaatcagccaggccggcagcgagaaggactacgtggactctgtgaagggcagattcaccatcagccgggacaacgccaagaagtccctgtacctccagatgaacagcctgagagccgaggacaccgccgtgtactattgtgcctctggcgtgtacagcttcgactacagaggccagggcaccctggtcacagtctcttctacgcgtgagcagaaactgatctcggaagaggatctgaaaattgaagttatgtatcctcctccttacctagacaatgagaagagcaatggaaccattatccatgtgaaagggaaacacctttgtccaagtcccctatttcccggaccttctaagcccttttgggtgctggtggtggttgggggagtcctggcttgctatagcttgctagtaacagtggcctttattattttctgggtgaggagtaagaggagcaggctcctgcacagtgactacatgaacatgactccacgccgccccggacccacccgcaagcattaccagccctatgccccaccacgcgacttcgcagcctatcgctccagagtgaagttcagcaggagcgcagacgcccccgcgtaccagcagggccagaaccagctctataacgagctcaatctaggacgaagagaggagtacgatgttttggacaagagacgtggccgggaccctgagatggggggaaagccgagaaggaagaaccctcaggaaggcctgtacaatgaactgcagaaagataagatggcggaggcctacagtgagattgggatgaaaggcgagcgccggaggggcaaggggcacgatggcctttaccagggtctcagtacagccaccaaggacacctacgacgcccttcacatgcaggccctgccccctcgc

SEQ ID NO: 6978 - DNA, 1512 bp, Artificial Sequence
  Synthetic Polynucloetide
atggccttaccagtgaccgccttgctcctgccgctggccttgctgctccacgccgccaggccggaagtgcagctgcttgaaagtggcggcggactgattcagcctggcggatctctgagactgagctgtgccgccagcggcttcaccttttctagccacgccatgacctgggtccgacaggcacctggaaaagggcttgaatgggtgtccgccatcagcggctctggcgattacacacactacgccgacagcgtgaagggcagattcaccatcagcagagacaacagcaagaacaccgtgtacctccagatgaacagcctgagagccgaggacagcgccgtgtattattgcgccaaggatgaggatggcggcagcctgcttggacacagaggacaaggcaccctggtcaccgtttcttccctcgagagcggcggaggcggatctttcgaagtgcagctggttgaatctggcggaggactggttcagcctggcggatctctgagactgtcttgtgccgccagcggcttcagcttcagcgacttttggatgagctgggtccgacaggcccctggcaaaggacttgaatgggtcgccacaatcagccaggccggcagcgagaaggactacgtggactctgtgaagggcagattcaccatcagccgggacaacgccaagaagtccctgtacctccagatgaacagcctgagagccgaggacaccgccgtgtactattgtgcctctggcgtgtacagcttcgactacagaggccagggcaccctggtcacagtctcttctacgcgtgagcagaaactgatctcggaagaggatctggcgaagcccaccacgacgccagcgccgcgaccaccaacaccggcgcccaccatcgcgtcgcagcccctgtccctgcgcccagaggcgtgccggccagcggcggggggcgcagtgcacacgagggggctggacttcgcctgtgacatctacatctgggcgcccttggccgggacttgtggggtccttctcctgtcactggttatcaccctttactgcaaacggggcagaaagaaactcctgtatatattcaaacaaccatttatgagaccagtacaaactactcaagaggaagatggctgtagctgccgatttccagaagaagaagaaggaggatgtgaactgagagtgaagttcagcaggagcgcagacgcccccgcgtaccagcagggccagaaccagctctataacgagctgaatctaggacgaagagaggagtacgatgttttggacaagagacgtggccgggaccctgagatggggggaaagccgagaaggaagaaccctcaggaaggcctgtacaatgaactgcagaaagataagatggcggaggcctacagtgagattgggatgaaaggcgagcgccggaggggcaaggggcacgatggcctttaccagggtctcagtacagccaccaaggacacctacgacgcccttcacatgcaggccctgccccctcgctga

SEQ ID NO: 6979 - DNA, 1515 bp, Artificial Sequence
  Synthetic Polynucloetide
atggccttaccagtgaccgccttgctcctgccgctggccttgctgctccacgccgccaggccggaagtgcagctggttgaatctggcggaggactggttcagcctggcggatctctgagactgtcttgtgccgccagcggcttcagcttcagcgacttttggatgagctgggtccgacaggcccctggcaaaggacttgaatgggtcgccacaatcagccaggccggcagcgagaaggactacgtggactctgtgaagggcagattcaccatcagccgggacaacgccaagaagtccctgtacctccagatgaacagcctgagagccgaggacaccgccgtgtactattgtgcctctggcgtgtacagcttcgactacagaggccagggcaccctggtcacagtctcttctctcgagagcggcggaggcggatctttcgaagaagtgcagctgcttgaaagtggcggcggactgattcagcctggcggatctctgagactgagctgtgccgccagcggcttcaccttttctagccacgccatgacctgggtccgacaggcacctggaaaagggcttgaatgggtgtccgccatcagcggctctggcgattacacacactacgccgacagcgtgaagggcagattcaccatcagcagagacaacagcaagaacaccgtgtacctccagatgaacagcctgagagccgaggacagcgccgtgtattattgcgccaaggatgaggatggcggcagcctgcttggacacagaggacaaggcaccctggtcaccgtttcttccacgcgtgagcagaaactgatctcggaagaggatctggcgaagcccaccacgacgccagcgccgcgaccaccaacaccggcgcccaccatcgcgtcgcagcccctgtccctgcgcccagaggcgtgccggccagcggcggggggcgcagtgcacacgagggggctggacttcgcctgtgacatctacatctgggcgcccttggccgggacttgtggggtccttctcctgtcactggttatcaccctttactgcaaacggggcagaaagaaactcctgtatatattcaaacaaccatttatgagaccagtacaaactactcaagaggaagatggctgtagctgccgatttccagaagaagaagaaggaggatgtgaactgagagtgaagttcagcaggagcgcagacgcccccgcgtaccagcagggccagaaccagctctataacgagctgaatctaggacgaagagaggagtacgatgttttggacaagagacgtggccgggaccctgagatggggggaaagccgagaaggaagaaccctcaggaaggcctgtacaatgaactgcagaaagataagatggcggaggcctacagtgagattgggatgaaaggcgagcgccggaggggcaaggggcacgatggcctttaccagggtctcagtacagccaccaaggacacctacgacgcccttcacatgcaggccctgccccctcgctga

SEQ ID NO: 6980 - DNA, 2751 bp, Artificial Sequence
  Synthetic Polynucloetide
atggccttaccagtgaccgccttgctcctgccgctggccttgctgctccacgccgccaggccggaagtgcagctgcttgaaagtggcggcggactgattcagcctggcggatctctgagactgagctgtgccgccagcggcttcaccttttctagccacgccatgacctgggtccgacaggcacctggaaaagggcttgaatgggtgtccgccatcagcggctctggcgattacacacactacgccgacagcgtgaagggcagattcaccatcagcagagacaacagcaagaacaccgtgtacctccagatgaacagcctgagagccgaggacagcgccgtgtattattgcgccaaggatgaggatggcggcagcctgcttggacacagaggacaaggcaccctggtcaccgtttcttccctcgagagcggcggaggcggatctttcgaagtgcagctggttgaatctggcggaggactggttcagcctggcggatctctgagactgtcttgtgccgccagcggcttcagcttcagcgacttttggatgagctgggtccgacaggcccctggcaaaggacttgaatgggtcgccacaatcagccaggccggcagcgagaaggactacgtggactctgtgaagggcagattcaccatcagccgggacaacgccaagaagtccctgtacctccagatgaacagcctgagagccgaggacaccgccgtgtactattgtgcctctggcgtgtacagcttcgactacagaggccagggcaccctggtcacagtctcttctacgcgtgagcagaaactgatctcggaagaggatctggcgaagcccaccacgacgccagcgccgcgaccaccaacaccggcgcccaccatcgcgtcgcagcccctgtccctgcgcccagaggcgtgccggccagcggcggggggcgcagtgcacacgagggggctggacttcgcctgtgacatctacatctgggcgcccttggccgggacttgtggggtccttctcctgtcactggttatcaccctttactgcgggcgcgccagagtgaagttcagcaggagcgcagacgcccccgcgtaccagcagggccagaaccagctctataacgagctgaatctaggacgaagagaggagtacgatgttttggacaagagacgtggccgggaccctgagatggggggaaagccgagaaggaagaaccctcaggaaggcctgtacaatgaactgcagaaagataagatggcggaggcctacagtgagattgggatgaaaggcgagcgccggaggggcaaggggcacgatggcctttaccagggtctcagtacagccaccaaggacacctacgacgcccttcacatgcaggccctgccccctcgctctagaggatctggagcaacaaacttctcactactcaaacaagcaggtgacgtggaggagaatcccgggcctgggatccacatggccacttacgaggttctctgtgaggtggcgcggaaactgggcacggatgacagggaagtggtattgttcctcctaaacgtgttcatacctcaacccacactggcccaattaattggagctcttagagctttaaaggaggagggcaggttaacgtttcccctgttagcggaatgtctgtttcgtgcaggtcgcagagacctcttgcgcgacctgcttcacttagacccgcgttttttagagcgccacctagcgggcacaatgagttatttcagcccttatcagctcactgttctccacgtagacggggagctgtgtgcgagggatattaggtctttgatatttttaagcaaggacactatagggtctcgcagcacaccacagacattcttacactgggtgtactgtatggaaaacttagacctactgggtcccactgacgtggatgccctaatgtcaatgcttagatctttgtcaagagtagacctacagcgccaagtgcaaaccctaatgggccttcacctttccggcccatcacactcccaacactatcgccatacaccactcgagaccgatttctacgactacaaggacgacgatgacaagactagtggctccggcgagggcagaggaagtctactaacctgcggagatgtggaagaaaatcctggcccacatatgaccgagtacaagcccacggtgcgcctcgccacccgcgacgacgtccccagggccgtacgcaccctcgccgccgcgttcgccgactaccccgccacgcgccacaccgtcgatccggaccgccacatcgagcgggtcaccgagctgcaagaactcttcctcacgcgcgtcgggctcgacatcggcaaggtgtgggtcgcggacgacggcgccgcggtggcggtctggaccacgccggagagcgtcgaagcgggggcggtgttcgccgagatcggcccgcgcatggccgagttgagcggttcccggctggccgcgcagcaacagatggaaggcctcctggcgccgcaccggcccaaggagcccgcgtggttcctggccaccgtcggcgtctcgcccgaccaccagggcaagggtctgggcagcgccgtcgtgctccccggagtggaggcggccgagcgcgccggggtgcccgccttcctggagacctccgcgccccgcaacctccccttctacgagcggctcggcttcaccgtcaccgccgacgtcgaggtgcccgaaggaccgcgcacctggtgcatgacccgcaagcccggtgcctga

SEQ ID NO: 6981 - DNA, 2586 bp, Artificial Sequence
  Synthetic Polynucloetide
atggccttaccagtgaccgccttgctcctgccgctggccttgctgctccacgccgccaggccggaagtgcagctgcttgaaagtggcggcggactgattcagcctggcggatctctgagactgagctgtgccgccagcggcttcaccttttctagccacgccatgacctgggtccgacaggcacctggaaaagggcttgaatgggtgtccgccatcagcggctctggcgattacacacactacgccgacagcgtgaagggcagattcaccatcagcagagacaacagcaagaacaccgtgtacctccagatgaacagcctgagagccgaggacagcgccgtgtattattgcgccaaggatgaggatggcggcagcctgcttggacacagaggacaaggcaccctggtcaccgtttcttccctcgagatccagaaccctgatcctgccgtgtaccagctgcgggatagcaagagcagcgacaagagcgtgtgtctgttcaccgacttcgacagccagaccaacgtgtcccagagcaaggactccgacgtgtacatcaccgataagtgcgtgctggacatgcggagcatggacttcaagagcaactccgccgtggcctggtccaacaagtccgatttcgcctgcgccaacgccttcaacaacagcattatccccgaggacacattcttcccaagcagcgacgtgccctgcgacgtgaagctggtggaaaagagcttcgagacagacaccaacctgaacttccagaacctgagcgtgatcggcttcagaatcctgctgctgaaagtggccggctttaacctgctgatgaccctgcggctgtggtccagccgcgccaagagaagcggatctggcgtgaagcagaccctgaatttcgacctgctgaagctggctggcgacgtggaatccaacccaggccctactagtatggactggatttggcgcatccttttccttgtcggcgctgctaccggcgcgcattccttcgaagtgcagctggttgaatctggcggaggactggttcagcctggcggatctctgagactgtcttgtgccgccagcggcttcagcttcagcgacttttggatgagctgggtccgacaggcccctggcaaaggacttgaatgggtcgccacaatcagccaggccggcagcgagaaggactacgtggactctgtgaagggcagattcaccatcagccgggacaacgccaagaagtccctgtacctccagatgaacagcctgagagccgaggacaccgccgtgtactattgtgcctctggcgtgtacagcttcgactacagaggccagggcaccctggtcacagtctcttctacgcgtgaggacctgaagaacgtgttcccacctgaggtggccgtgttcgagcctagcaaggccgagatcgcccacacccagaaagccaccctcgtgtgcctggctaccggcttctaccccgaccatgtggaactgtcttggtgggtcaacggcaaagaggtgcacagcggcgtgtgtaccgacccccagccactgaaagaacagcccgccctgaacgacagccggtactgcctgagcagcagactgagagtgtccgccaccttctggcagaacccccggaaccacttcagatgccaggtgcagttctacggcctgagcgagaacgacgagtggacccaggacagagccaagcccgtgacccagatcgtgtctgccgaagcctggggcagagccgattgcggcatcaccagcgccagctaccaccagggcgtgctgagcgccaccatcctgtacgagatcctgctgggcaaggccaccctgtacgccgtgctggtgtctgccctggtgctgatggctatggtcaagcggaaggacagccggggaagggccaagcgatctggatctggagcaacaaacttctcactactcaaacaagcaggtgacgtggaggagaatcccgggccttctagaggccatatgaccgagtacaagcccacggtgcgcctcgccacccgcgacgacgtccccagggccgtacgcaccctcgccgccgcgttcgccgactaccccgccacgcgccacaccgtcgatccggaccgccacatcgagcgggtcaccgagctgcaagaactcttcctcacgcgcgtcgggctcgacatcggcaaggtgtgggtcgcggacgacggcgccgcggtggcggtctggaccacgccggagagcgtcgaagcgggggcggtgttcgccgagatcggcccgcgcatggccgagttgagcggttcccggctggccgcgcagcaacagatggaaggcctcctggcgccgcaccggcccaaggagcccgcgtggttcctggccaccgtcggcgtctcgcccgaccaccagggcaagggtctgggcagcgccgtcgtgctccccggagtggaggcggccgagcgcgccggggtgcccgccttcctggagacctccgcgccccgcaacctccccttctacgagcggctcggcttcaccgtcaccgccgacgtcgaggtgcccgaaggaccgcgcacctggtgcatgacccgcaagcccggtgcctga

SEQ ID NO: 6982 - DNA, 2583 bp, Artificial Sequence
  Synthetic Polynucloetide
atggccttaccagtgaccgccttgctcctgccgctggccttgctgctccacgccgccaggccggaagtgcagctgcttgaaagtggcggcggactgattcagcctggcggatctctgagactgagctgtgccgccagcggcttcaccttttctagccacgccatgacctgggtccgacaggcacctggaaaagggcttgaatgggtgtccgccatcagcggctctggcgattacacacactacgccgacagcgtgaagggcagattcaccatcagcagagacaacagcaagaacaccgtgtacctccagatgaacagcctgagagccgaggacagcgccgtgtattattgcgccaaggatgaggatggcggcagcctgcttggacacagaggacaaggcaccctggtcaccgtttcttccctcgaggacctgaagaacgtgttcccacctgaggtggccgtgttcgagcctagcaaggccgagatcgcccacacccagaaagccaccctcgtgtgcctggctaccggcttctaccccgaccatgtggaactgtcttggtgggtcaacggcaaagaggtgcacagcggcgtgtgtaccgacccccagccactgaaagaacagcccgccctgaacgacagccggtactgcctgagcagcagactgagagtgtccgccaccttctggcagaacccccggaaccacttcagatgccaggtgcagttctacggcctgagcgagaacgacgagtggacccaggacagagccaagcccgtgacccagatcgtgtctgccgaagcctggggcagagccgattgcggcatcaccagcgccagctaccaccagggcgtgctgagcgccaccatcctgtacgagatcctgctgggcaaggccaccctgtacgccgtgctggtgtctgccctggtgctgatggctatggtcaagcggaaggacagccggggaagggccaagcgatctggatctggagcaacaaacttctcactactcaaacaagcaggtgacgtggaggagaatcccgggcctactagtatggactggatttggcgcatccttttccttgtcggcgctgctaccggcgcgcattccttcgaagtgcagctggttgaatctggcggaggactggttcagcctggcggatctctgagactgtcttgtgccgccagcggcttcagcttcagcgacttttggatgagctgggtccgacaggcccctggcaaaggacttgaatgggtcgccacaatcagccaggccggcagcgagaaggactacgtggactctgtgaagggcagattcaccatcagccgggacaacgccaagaagtccctgtacctccagatgaacagcctgagagccgaggacaccgccgtgtactattgtgcctctggcgtgtacagcttcgactacagaggccagggcaccctggtcacagtctcttctacgcgtatccagaaccctgatcctgccgtgtaccagctgcgggatagcaagagcagcgacaagagcgtgtgtctgttcaccgacttcgacagccagaccaacgtgtcccagagcaaggactccgacgtgtacatcaccgataagtgcgtgctggacatgcggagcatggacttcaagagcaactccgccgtggcctggtccaacaagtccgatttcgcctgcgccaacgccttcaacaacagcattatccccgaggacacattcttcccaagcagcgacgtgccctgcgacgtgaagctggtggaaaagagcttcgagacagacaccaacctgaacttccagaacctgagcgtgatcggcttcagaatcctgctgctgaaagtggccggctttaacctgctgatgaccctgcggctgtggtccagccgcgccaagagaagcggatctggcgtgaagcagaccctgaatttcgacctgctgaagctggctggcgacgtggaatccaacccaggcccttctagaggccatatgaccgagtacaagcccacggtgcgcctcgccacccgcgacgacgtccccagggccgtacgcaccctcgccgccgcgttcgccgactaccccgccacgcgccacaccgtcgatccggaccgccacatcgagcgggtcaccgagctgcaagaactcttcctcacgcgcgtcgggctcgacatcggcaaggtgtgggtcgcggacgacggcgccgcggtggcggtctggaccacgccggagagcgtcgaagcgggggcggtgttcgccgagatcggcccgcgcatggccgagttgagcggttcccggctggccgcgcagcaacagatggaaggcctcctggcgccgcaccggcccaaggagcccgcgtggttcctggccaccgtcggcgtctcgcccgaccaccagggcaagggtctgggcagcgccgtcgtgctccccggagtggaggcggccgagcgcgccggggtgcccgccttcctggagacctccgcgccccgcaacctccccttctacgagcggctcggcttcaccgtcaccgccgacgtcgaggtgcccgaaggaccgcgcacctggtgcatgacccgcaagcccggtgcctga

SEQ ID NO: 6983 - DNA, 1881 bp, Artificial Sequence
  Synthetic Polynucloetide
atggccttaccagtgaccgccttgctcctgccgctggccttgctgctccacgccgccaggccggaagtgcagctgcttgaaagtggcggcggactgattcagcctggcggatctctgagactgagctgtgccgccagcggcttcaccttttctagccacgccatgacctgggtccgacaggcacctggaaaagggcttgaatgggtgtccgccatcagcggctctggcgattacacacactacgccgacagcgtgaagggcagattcaccatcagcagagacaacagcaagaacaccgtgtacctccagatgaacagcctgagagccgaggacagcgccgtgtattattgcgccaaggatgaggatggcggcagcctgcttggacacagaggacaaggcaccctggtcaccgtttcttccctcgaggacctgaagaacgtgttcccacctgaggtggccgtgttcgagcctagcgaggccgagatcagccacacccagaaagccaccctcgtgtgcctggctaccggcttctaccccgaccatgtggaactgtcttggtgggtcaacggcaaagaggtgcacagcggcgtgtgtaccgacccccagccactgaaagaacagcccgccctgaacgacagccggtactgcctgagcagcagactgagagtgtccgccaccttctggcagaacccccggaaccacttcagatgccaggtgcagttctacggcctgagcgagaacgacgagtggacccaggacagagccaagcccgtgacccagatcgtgtctgccgaagcctggggcagagccgattgcggctttaccagcgagagctaccagcagggcgtgctgagcgccaccatcctgtacgagatcctgctgggcaaggccaccctgtacgccgtgctggtgtctgccctggtgctgatggctatggtcaagcggaaggacagccggggaagggccaagcgatctggatctggagcaacaaacttctcactactcaaacaagcaggtgacgtggaggagaatcccgggcctactagtatggactggatttggcgcatccttttccttgtcggcgctgctaccggcgcgcattccttcgaagtgcagctggttgaatctggcggaggactggttcagcctggcggatctctgagactgtcttgtgccgccagcggcttcagcttcagcgacttttggatgagctgggtccgacaggcccctggcaaaggacttgaatgggtcgccacaatcagccaggccggcagcgagaaggactacgtggactctgtgaagggcagattcaccatcagccgggacaacgccaagaagtccctgtacctccagatgaacagcctgagagccgaggacaccgccgtgtactattgtgcctctggcgtgtacagcttcgactacagaggccagggcaccctggtcacagtctcttctacgcgtatccagaaccctgatcctgccgtgtaccagctgcgggatagcaagagcagcgacaagagcgtgtgtctgttcaccgacttcgacagccagaccaacgtgtcccagagcaaggactccgacgtgtacatcaccgataagtgcgtgctggacatgcggagcatggacttcaagagcaactccgccgtggcctggtccaacaagtccgatttcgcctgcgccaacgccttcaacaacagcattatccccgaggacacattcttcccaagccccgagagcagctgcgacgtgaagctggtggaaaagagcttcgagacagacaccaacctgaacttccagaacctgagcgtgatcggcttcagaatcctgctgctgaaagtggccggctttaacctgctgatgaccctgcggctgtggtccagc

SEQ ID NO: 6984 - DNA, 2556 bp, Artificial Sequence
  Synthetic Polynucloetide
atggccttaccagtgaccgccttgctcctgccgctggccttgctgctccacgccgccaggccggaagtgcagctgcttgaaagtggcggcggactgattcagcctggcggatctctgagactgagctgtgccgccagcggcttcaccttttctagccacgccatgacctgggtccgacaggcacctggaaaagggcttgaatgggtgtccgccatcagcggctctggcgattacacacactacgccgacagcgtgaagggcagattcaccatcagcagagacaacagcaagaacaccgtgtacctccagatgaacagcctgagagccgaggacagcgccgtgtattattgcgccaaggatgaggatggcggcagcctgcttggacacagaggacaaggcaccctggtcaccgtttcttccctcgaggacctgaagaacgtgttcccacctgaggtggccgtgttcgagcctagcgaggccgagatcagccacacccagaaagccaccctcgtgtgcctggctaccggcttctaccccgaccatgtggaactgtcttggtgggtcaacggcaaagaggtgcacagcggcgtgtgtaccgacccccagccactgaaagaacagcccgccctgaacgacagccggtactgcctgagcagcagactgagagtgtccgccaccttctggcagaacccccggaaccacttcagatgccaggtgcagttctacggcctgagcgagaacgacgagtggacccaggacagagccaagcccgtgacccagatcgtgtctgccgaagcctggggcagagccgattgcggctttaccagcgagagctaccagcagggcgtgctgagcgccaccatcctgtacgagatcctgctgggcaaggccaccctgtacgccgtgctggtgtctgccctggtgctgatggctatggtcaagcggaaggacagccggggaagggccaagcgatctggatctggagcaacaaacttctcactactcaaacaagcaggtgacgtggaggagaatcccgggcctactagtatggactggatttggcgcatccttttccttgtcggcgctgctaccggcgcgcattccttcgaagtgcagctggttgaatctggcggaggactggttcagcctggcggatctctgagactgtcttgtgccgccagcggcttcagcttcagcgacttttggatgagctgggtccgacaggcccctggcaaaggacttgaatgggtcgccacaatcagccaggccggcagcgagaaggactacgtggactctgtgaagggcagattcaccatcagccgggacaacgccaagaagtccctgtacctccagatgaacagcctgagagccgaggacaccgccgtgtactattgtgcctctggcgtgtacagcttcgactacagaggccagggcaccctggtcacagtctcttctacgcgtatccagaaccctgatcctgccgtgtaccagctgcgggatagcaagagcagcgacaagagcgtgtgtctgttcaccgacttcgacagccagaccaacgtgtcccagagcaaggactccgacgtgtacatcaccgataagtgcgtgctggacatgcggagcatggacttcaagagcaactccgccgtggcctggtccaacaagtccgatttcgcctgcgccaacgccttcaacaacagcattatccccgaggacacattcttcccaagccccgagagcagctgcgacgtgaagctggtggaaaagagcttcgagacagacaccaacctgaacttccagaacctgagcgtgatcggcttcagaatcctgctgctgaaagtggccggctttaacctgctgatgaccctgcggctgtggtccagccgcgccaagagaagcggatctggcgtgaagcagaccctgaatttcgacctgctgaagctggctggcgacgtggaatccaacccaggcccttctagaggcgggatccacaccatggctacctacgaggtgctgtgcgaggtggcaagaaagctgggcaccgacgacagagaagtggtgctgttcctgctgaacgtgttcatccctcagcctacactggcccagctgatcggtgcactgagagccctgaaagaggaaggccggctgacctttcctctgctggccgaatgcctgttcagagccggaagaagggatctgctgcgggacctgctgcatctggaccccagatttctggaaagacacctggccggcaccatgagctacttcagcccttaccagctgaccgtgctgcacgttgacggcgaactgtgcgccagagatattcggagcctgatcttcctgagcaaggacaccatcggcagccggtctacccctcagacatttctgcactgggtgtactgcatggaaaacctggacctgctcggccccacagatgtggatgccctgatgtccatgctgagaagcctgagcagagtggacctccagagacaggtgcagacactgatgggactgcacctgagcggacctagccacagccagcactacagacacacccct

SEQ ID NO: 6985 - DNA, 1893 bp, Artificial Sequence
  Synthetic Polynucloetide
atggccttaccagtgaccgccttgctcctgccgctggccttgctgctccacgccgccaggccggaagtgcagctgcttgaaagtggcggcggactgattcagcctggcggatctctgagactgagctgtgccgccagcggcttcaccttttctagccacgccatgacctgggtccgacaggcacctggaaaagggcttgaatgggtgtccgccatcagcggctctggcgattacacacactacgccgacagcgtgaagggcagattcaccatcagcagagacaacagcaagaacaccgtgtacctccagatgaacagcctgagagccgaggacagcgccgtgtattattgcgccaaggatgaggatggcggcagcctgcttggacacagaggacaaggcaccctggtcaccgtttcttccctcgagatccagaaccctgatcctgccgtgtaccagctgcgggatagcaagagcagcgacaagagcgtgtgtctgttcaccgacttcgacagccagaccaacgtgtcccagagcaaggactccgacgtgtacatcaccgataagtgcgtgctggacatgcggagcatggacttcaagagcaactccgccgtggcctggtccaacaagtccgatttcgcctgcgccaacgccttcaacaacagcattatccccgaggacacattcttcccaagccccgagagcagctgcgacgtgaagctggtggaaaagagcttcgagacagacaccaacctgaacttccagaacctgagcgtgatcggcttcagaatcctgctgctgaaagtggccggctttaacctgctgatgaccctgcggctgtggtccagccgcgccaagagaagcggatctggcgtgaagcagaccctgaatttcgacctgctgaagctggctggcgacgtggaatccaacccaggccctactagtatggactggatttggcgcatccttttccttgtcggcgctgctaccggcgcgcattccttcgaagtgcagctggttgaatctggcggaggactggttcagcctggcggatctctgagactgtcttgtgccgccagcggcttcagcttcagcgacttttggatgagctgggtccgacaggcccctggcaaaggacttgaatgggtcgccacaatcagccaggccggcagcgagaaggactacgtggactctgtgaagggcagattcaccatcagccgggacaacgccaagaagtccctgtacctccagatgaacagcctgagagccgaggacaccgccgtgtactattgtgcctctggcgtgtacagcttcgactacagaggccagggcaccctggtcacagtctcttctacgcgtgaggacctgaagaacgtgttcccacctgaggtggccgtgttcgagcctagcgaggccgagatcagccacacccagaaagccaccctcgtgtgcctggctaccggcttctaccccgaccatgtggaactgtcttggtgggtcaacggcaaagaggtgcacagcggcgtgtgtaccgacccccagccactgaaagaacagcccgccctgaacgacagccggtactgcctgagcagcagactgagagtgtccgccaccttctggcagaacccccggaaccacttcagatgccaggtgcagttctacggcctgagcgagaacgacgagtggacccaggacagagccaagcccgtgacccagatcgtgtctgccgaagcctggggcagagccgattgcggctttaccagcgagagctaccagcagggcgtgctgagcgccaccatcctgtacgagatcctgctgggcaaggccaccctgtacgccgtgctggtgtctgccctggtgctgatggctatggtcaagcggaaggacagccgggga

SEQ ID NO: 6986 - DNA, 2559 bp, Artificial Sequence
  Synthetic Polynucloetide
atggccttaccagtgaccgccttgctcctgccgctggccttgctgctccacgccgccaggccggaagtgcagctgcttgaaagtggcggcggactgattcagcctggcggatctctgagactgagctgtgccgccagcggcttcaccttttctagccacgccatgacctgggtccgacaggcacctggaaaagggcttgaatgggtgtccgccatcagcggctctggcgattacacacactacgccgacagcgtgaagggcagattcaccatcagcagagacaacagcaagaacaccgtgtacctccagatgaacagcctgagagccgaggacagcgccgtgtattattgcgccaaggatgaggatggcggcagcctgcttggacacagaggacaaggcaccctggtcaccgtttcttccctcgagatccagaaccctgatcctgccgtgtaccagctgcgggatagcaagagcagcgacaagagcgtgtgtctgttcaccgacttcgacagccagaccaacgtgtcccagagcaaggactccgacgtgtacatcaccgataagtgcgtgctggacatgcggagcatggacttcaagagcaactccgccgtggcctggtccaacaagtccgatttcgcctgcgccaacgccttcaacaacagcattatccccgaggacacattcttcccaagccccgagagcagctgcgacgtgaagctggtggaaaagagcttcgagacagacaccaacctgaacttccagaacctgagcgtgatcggcttcagaatcctgctgctgaaagtggccggctttaacctgctgatgaccctgcggctgtggtccagccgcgccaagagaagcggatctggcgtgaagcagaccctgaatttcgacctgctgaagctggctggcgacgtggaatccaacccaggccctactagtatggactggatttggcgcatccttttccttgtcggcgctgctaccggcgcgcattccttcgaagtgcagctggttgaatctggcggaggactggttcagcctggcggatctctgagactgtcttgtgccgccagcggcttcagcttcagcgacttttggatgagctgggtccgacaggcccctggcaaaggacttgaatgggtcgccacaatcagccaggccggcagcgagaaggactacgtggactctgtgaagggcagattcaccatcagccgggacaacgccaagaagtccctgtacctccagatgaacagcctgagagccgaggacaccgccgtgtactattgtgcctctggcgtgtacagcttcgactacagaggccagggcaccctggtcacagtctcttctacgcgtgaggacctgaagaacgtgttcccacctgaggtggccgtgttcgagcctagcgaggccgagatcagccacacccagaaagccaccctcgtgtgcctggctaccggcttctaccccgaccatgtggaactgtcttggtgggtcaacggcaaagaggtgcacagcggcgtgtgtaccgacccccagccactgaaagaacagcccgccctgaacgacagccggtactgcctgagcagcagactgagagtgtccgccaccttctggcagaacccccggaaccacttcagatgccaggtgcagttctacggcctgagcgagaacgacgagtggacccaggacagagccaagcccgtgacccagatcgtgtctgccgaagcctggggcagagccgattgcggctttaccagcgagagctaccagcagggcgtgctgagcgccaccatcctgtacgagatcctgctgggcaaggccaccctgtacgccgtgctggtgtctgccctggtgctgatggctatggtcaagcggaaggacagccggggaagggccaagcgatctggatctggagcaacaaacttctcactactcaaacaagcaggtgacgtggaggagaatcccgggccttctagaggcgggatccacaccatggctacctacgaggtgctgtgcgaggtggcaagaaagctgggcaccgacgacagagaagtggtgctgttcctgctgaacgtgttcatccctcagcctacactggcccagctgatcggtgcactgagagccctgaaagaggaaggccggctgacctttcctctgctggccgaatgcctgttcagagccggaagaagggatctgctgcgggacctgctgcatctggaccccagatttctggaaagacacctggccggcaccatgagctacttcagcccttaccagctgaccgtgctgcacgttgacggcgaactgtgcgccagagatattcggagcctgatcttcctgagcaaggacaccatcggcagccggtctacccctcagacatttctgcactgggtgtactgcatggaaaacctggacctgctcggccccacagatgtggatgccctgatgtccatgctgagaagcctgagcagagtggacctccagagacaggtgcagacactgatgggactgcacctgagcggacctagccacagccagcactacagacacacccct

SEQ ID NO: 6987 - DNA, 2703 bp, Artificial Sequence
  Synthetic Polynucloetide
atggccttaccagtgaccgccttgctcctgccgctggccttgctgctccacgccgccaggccgctcgaggggaaaccaattcccaaccctcttctgggactggattcaaccggcagcggcgaggacctgaagaacgtgttcccacctgaggtggccgtgttcgagcctagcaaggccgagatcgcccacacccagaaagccaccctcgtgtgcctggctaccggcttctaccccgaccatgtggaactgtcttggtgggtcaacggcaaagaggtgcacagcggcgtgtgtaccgacccccagccactgaaagaacagcccgccctgaacgacagccggtactgcctgagcagcagactgagagtgtccgccaccttctggcagaacccccggaaccacttcagatgccaggtgcagttctacggcctgagcgagaacgacgagtggacccaggacagagccaagcccgtgacccagatcgtgtctgccgaagcctggggcagagccgattgcggcatcaccagcgccagctaccaccagggcgtgctgagcgccaccatcctgtacgagatcctgctgggcaaggccaccctgtacgccgtgctggtgtctgccctggtgctgatggctatggtcaagcggaaggacagccggggaagggccaagcgatctggatctggagcaacaaacttctcactactcaaacaagcaggtgacgtggaggagaatcccgggcctactagcatggccttaccagtgaccgccttgctcctgccgctggccttgctgctccacgccgccaggccggaagtgcagctgcttgaaagtggcggcggactgattcagcctggcggatctctgagactgagctgtgccgccagcggcttcaccttttctagccacgccatgacctgggtccgacaggcacctggaaaagggcttgaatgggtgtccgccatcagcggctctggcgattacacacactacgccgacagcgtgaagggcagattcaccatcagcagagacaacagcaagaacaccgtgtacctccagatgaacagcctgagagccgaggacagcgccgtgtattattgcgccaaggatgaggatggcggcagcctgcttggacacagaggacaaggcaccctggtcaccgtttcttccctcgagagcggcggaggcggatctttcgaagtgcagctggttgaatctggcggaggactggttcagcctggcggatctctgagactgtcttgtgccgccagcggcttcagcttcagcgacttttggatgagctgggtccgacaggcccctggcaaaggacttgaatgggtcgccacaatcagccaggccggcagcgagaaggactacgtggactctgtgaagggcagattcaccatcagccgggacaacgccaagaagtccctgtacctccagatgaacagcctgagagccgaggacaccgccgtgtactattgtgcctctggcgtgtacagcttcgactacagaggccagggcaccctggtcacagtctcttctacgcgtgagcagaaactgatctcggaagaggatgggagcggcatccagaaccctgatcctgccgtgtaccagctgcgggatagcaagagcagcgacaagagcgtgtgtctgttcaccgacttcgacagccagaccaacgtgtcccagagcaaggactccgacgtgtacatcaccgataagtgcgtgctggacatgcggagcatggacttcaagagcaactccgccgtggcctggtccaacaagtccgatttcgcctgcgccaacgccttcaacaacagcattatccccgaggacacattcttcccaagcagcgacgtgccctgcgacgtgaagctggtggaaaagagcttcgagacagacaccaacctgaacttccagaacctgagcgtgatcggcttcagaatcctgctgctgaaagtggccggctttaacctgctgatgaccctgcggctgtggtccagccgcgccaagagaagcggatctggcgtgaagcagaccctgaatttcgacctgctgaagctggctggcgacgtggaatccaacccaggcccttctagaggccatatgaccgagtacaagcccacggtgcgcctcgccacccgcgacgacgtccccagggccgtacgcaccctcgccgccgcgttcgccgactaccccgccacgcgccacaccgtcgatccggaccgccacatcgagcgggtcaccgagctgcaagaactcttcctcacgcgcgtcgggctcgacatcggcaaggtgtgggtcgcggacgacggcgccgcggtggcggtctggaccacgccggagagcgtcgaagcgggggcggtgttcgccgagatcggcccgcgcatggccgagttgagcggttcccggctggccgcgcagcaacagatggaaggcctcctggcgccgcaccggcccaaggagcccgcgtggttcctggccaccgtcggcgtctcgcccgaccaccagggcaagggtctgggcagcgccgtcgtgctccccggagtggaggcggccgagcgcgccggggtgcccgccttcctggagacctccgcgccccgcaacctccccttctacgagcggctcggcttcaccgtcaccgccgacgtcgaggtgcccgaaggaccgcgcacctggtgcatgacccgcaagcccggtgcctga

SEQ ID NO: 6988 - DNA, 2706 bp, Artificial Sequence
  Synthetic Polynucloetide
atggccttaccagtgaccgccttgctcctgccgctggccttgctgctccacgccgccaggccgctcgagcagaaactgatctcggaagaggatctgggctccggcgatcgccctgatcctgccgtgtaccagctgcgggatagcaagagcagcgacaagagcgtgtgtctgttcaccgacttcgacagccagaccaacgtgtcccagagcaaggactccgacgtgtacatcaccgataagtgcgtgctggacatgcggagcatggacttcaagagcaactccgccgtggcctggtccaacaagtccgatttcgcctgcgccaacgccttcaacaacagcattatccccgaggacacattcttcccaagccccgagagcagctgcgacgtgaagctggtggaaaagagcttcgagacagacaccaacctgaacttccagaacctgagcgtgatcggcttcagaatcctgctgctgaaagtggccggctttaacctgctgatgaccctgcggctgtggtccagctctagtcgcgccaagagaagcggatctggcgtgaagcagaccctgaatttcgacctgctgaagctggctggcgacgtggaatccaacccaggccccactagcatggccttaccagtgaccgccttgctcctgccgctggccttgctgctccacgccgccaggccggaagtgcagctgcttgaaagtggcggcggactgattcagcctggcggatctctgagactgagctgtgccgccagcggcttcaccttttctagccacgccatgacctgggtccgacaggcacctggaaaagggcttgaatgggtgtccgccatcagcggctctggcgattacacacactacgccgacagcgtgaagggcagattcaccatcagcagagacaacagcaagaacaccgtgtacctccagatgaacagcctgagagccgaggacagcgccgtgtattattgcgccaaggatgaggatggcggcagcctgcttggacacagaggacaaggcaccctggtcaccgtttcttccctcgagagcggcggaggcggatctttcgaagtgcagctggttgaatctggcggaggactggttcagcctggcggatctctgagactgtcttgtgccgccagcggcttcagcttcagcgacttttggatgagctgggtccgacaggcccctggcaaaggacttgaatgggtcgccacaatcagccaggccggcagcgagaaggactacgtggactctgtgaagggcagattcaccatcagccgggacaacgccaagaagtccctgtacctccagatgaacagcctgagagccgaggacaccgccgtgtactattgtgcctctggcgtgtacagcttcgactacagaggccagggcaccctggtcacagtctcttctacgcgtgggaaaccaattcccaaccctcttctgggactggattcaaccggcagcggcgaggacctgaagaacgtgttcccacctgaggtggccgtgttcgagcctagcgaggccgagatcagccacacccagaaagccaccctcgtgtgcctggctaccggcttctaccccgaccatgtggaactgtcttggtgggtcaacggcaaagaggtgcacagcggcgtgtgtaccgacccccagccactgaaagaacagcccgccctgaacgacagccggtactgcctgagcagcagactgagagtgtccgccaccttctggcagaacccccggaaccacttcagatgccaggtgcagttctacggcctgagcgagaacgacgagtggacccaggacagagccaagcccgtgacccagatcgtgtctgccgaagcctggggcagagccgattgcggctttaccagcgagagctaccagcagggcgtgctgagcgccaccatcctgtacgagatcctgctgggcaaggccaccctgtacgccgtgctggtgtctgccctggtgctgatggctatggtcaagcggaaggacagccggggaagggccaagcgatctggatctggagcaacaaacttctcactactcaaacaagcaggtgacgtggaggagaatcccgggccttctagaggccatatgaccgagtacaagcccacggtgcgcctcgccacccgcgacgacgtccccagggccgtacgcaccctcgccgccgcgttcgccgactaccccgccacgcgccacaccgtcgatccggaccgccacatcgagcgggtcaccgagctgcaagaactcttcctcacgcgcgtcgggctcgacatcggcaaggtgtgggtcgcggacgacggcgccgcggtggcggtctggaccacgccggagagcgtcgaagcgggggcggtgttcgccgagatcggcccgcgcatggccgagttgagcggttcccggctggccgcgcagcaacagatggaaggcctcctggcgccgcaccggcccaaggagcccgcgtggttcctggccaccgtcggcgtctcgcccgaccaccagggcaagggtctgggcagcgccgtcgtgctccccggagtggaggcggccgagcgcgccggggtgcccgccttcctggagacctccgcgccccgcaacctccccttctacgagcggctcggcttcaccgtcaccgccgacgtcgaggtgcccgaaggaccgcgcacctggtgcatgacccgcaagcccggtgcctga

SEQ ID NO: 6989 - DNA, 2583 bp, Artificial Sequence
  Synthetic Polynucloetide
atggccttaccagtgaccgccttgctcctgccgctggccttgctgctccacgccgccaggccggaagtgcagctgcttgaaagtggcggcggactgattcagcctggcggatctctgagactgagctgtgccgccagcggcttcaccttttctagccacgccatgacctgggtccgacaggcacctggaaaagggcttgaatgggtgtccgccatcagcggctctggcgattacacacactacgccgacagcgtgaagggcagattcaccatcagcagagacaacagcaagaacaccgtgtacctccagatgaacagcctgagagccgaggacagcgccgtgtattattgcgccaaggatgaggatggcggcagcctgcttggacacagaggacaaggcaccctggtcaccgtttcttccctcgaggacctgaagaacgtgttcccacctgaggtggccgtgttcgagcctagcgaggccgagatcagccacacccagaaagccaccctcgtgtgcctggctaccggcttctaccccgaccatgtggaactgtcttggtgggtcaacggcaaagaggtgcacagcggcgtgtctaccgacccccagccactgaaagaacagcccgccctgaacgacagccggtactgcctgagcagcagactgagagtgtccgccaccttctggcagaacccccggaaccacttcagatgccaggtgcagttctacggcctgagcgagaacgacgagtggacccaggacagagccaagcccgtgacccagatcgtgtctgccgaagcctggggcagagccgattgcggctttaccagcgagagctaccagcagggcgtgctgagcgccaccatcctgtacgagatcctgctgggcaaggccaccctgtacgccgtgctggtgtctgccctggtgctgatggctatggtcaagcggaaggacagccggggaagggccaagcgatctggatctggagcaacaaacttctcactactcaaacaagcaggtgacgtggaggagaatcccgggcctactagtatggactggatttggcgcatccttttccttgtcggcgctgctaccggcgcgcattccttcgaagtgcagctggttgaatctggcggaggactggttcagcctggcggatctctgagactgtcttgtgccgccagcggcttcagcttcagcgacttttggatgagctgggtccgacaggcccctggcaaaggacttgaatgggtcgccacaatcagccaggccggcagcgagaaggactacgtggactctgtgaagggcagattcaccatcagccgggacaacgccaagaagtccctgtacctccagatgaacagcctgagagccgaggacaccgccgtgtactattgtgcctctggcgtgtacagcttcgactacagaggccagggcaccctggtcacagtctcttctacgcgtatccagaaccctgatcctgccgtgtaccagctgcgggatagcaagagcagcgacaagagcgtgtgtctgttcaccgacttcgacagccagaccaacgtgtcccagagcaaggactccgacgtgtacatcaccgataagaccgtgctggacatgcggagcatggacttcaagagcaactccgccgtggcctggtccaacaagtccgatttcgcctgcgccaacgccttcaacaacagcattatccccgaggacacattcttcccaagccccgagagcagctgcgacgtgaagctggtggaaaagagcttcgagacagacaccaacctgaacttccagaacctgagcgtgatcggcttcagaatcctgctgctgaaagtggccggctttaacctgctgatgaccctgcggctgtggtccagccgcgccaagagaagcggatctggcgtgaagcagaccctgaatttcgacctgctgaagctggctggcgacgtggaatccaacccaggcccttctagaggccatatgaccgagtacaagcccacggtgcgcctcgccacccgcgacgacgtccccagggccgtacgcaccctcgccgccgcgttcgccgactaccccgccacgcgccacaccgtcgatccggaccgccacatcgagcgggtcaccgagctgcaagaactcttcctcacgcgcgtcgggctcgacatcggcaaggtgtgggtcgcggacgacggcgccgcggtggcggtctggaccacgccggagagcgtcgaagcgggggcggtgttcgccgagatcggcccgcgcatggccgagttgagcggttcccggctggccgcgcagcaacagatggaaggcctcctggcgccgcaccggcccaaggagcccgcgtggttcctggccaccgtcggcgtctcgcccgaccaccagggcaagggtctgggcagcgccgtcgtgctccccggagtggaggcggccgagcgcgccggggtgcccgccttcctggagacctccgcgccccgcaacctccccttctacgagcggctcggcttcaccgtcaccgccgacgtcgaggtgcccgaaggaccgcgcacctggtgcatgacccgcaagcccggtgcctga

SEQ ID NO: 6990 - DNA, 2829 bp, Artificial Sequence
  Synthetic Polynucloetide
atggccttaccagtgaccgccttgctcctgccgctggccttgctgctccacgccgccaggccggaagtgcagctgcttgaaagtggcggcggactgattcagcctggcggatctctgagactgagctgtgccgccagcggcttcaccttttctagccacgccatgacctgggtccgacaggcacctggaaaagggcttgaatgggtgtccgccatcagcggctctggcgattacacacactacgccgacagcgtgaagggcagattcaccatcagcagagacaacagcaagaacaccgtgtacctccagatgaacagcctgagagccgaggacagcgccgtgtattattgcgccaaggatgaggatggcggcagcctgcttggacacagaggacaaggcaccctggtcaccgtttcttccctcgaggacctgaagaacgtgttcccacctgaggtggccgtgttcgagcctagcgaggccgagatcagccacacccagaaagccaccctcgtgtgcctggctaccggcttctaccccgaccatgtggaactgtcttggtgggtcaacggcaaagaggtgcacagcggcgtgtctaccgacccccagccactgaaagaacagcccgccctgaacgacagccggtactgcctgagcagcagactgagagtgtccgccaccttctggcagaacccccggaaccacttcagatgccaggtgcagttctacggcctgagcgagaacgacgagtggacccaggacagagccaagcccgtgacccagatcgtgtctgccgaagcctggggcagagccgattgcggctttaccagcgagagctaccagcagggcgtgctgagcgccaccatcctgtacgagatcctgctgggcaaggccaccctgtacgccgtgctggtgtctgccctggtgctgatggctatggtcaagcggaaggacagccggggaagggccaagcgatctggatctggagcaacaaacttctcactactcaaacaagcaggtgacgtggaggagaatcccgggcctactagtatggactggatttggcgcatccttttccttgtcggcgctgctaccggcgcgcattccttcgaagtgcagctggttgaatctggcggaggactggttcagcctggcggatctctgagactgtcttgtgccgccagcggcttcagcttcagcgacttttggatgagctgggtccgacaggcccctggcaaaggacttgaatgggtcgccacaatcagccaggccggcagcgagaaggactacgtggactctgtgaagggcagattcaccatcagccgggacaacgccaagaagtccctgtacctccagatgaacagcctgagagccgaggacaccgccgtgtactattgtgcctctggcgtgtacagcttcgactacagaggccagggcaccctggtcacagtctcttctacgcgtgagcagaaactgatctcggaagaggatgggagcggcaccccattcccttctctggcccctcccatcatgctgctggtggacggcaagcagcagatggtggtcgtgtgcctggtgctggatgtggccccacctggactggacagccccatctggtttagcgccggcaatggctctgccctggacgcctttacctacggcccaagccctgccaccgatggcacctggacaaatctggcccacctgagcctgcccagcgaggaactggcttcttgggagcctctcgtgtgccacacaggacctggcgctgagggacacagcagatccacccagcctatgcacctgtctggcgaggccagcaccgccagaacctgtcctcaggaacctctgagaggcacccctggcggagcactgtggctgggagtgctgagactgctgctgttcaagctgctgctgtttgacctgctgctgacctgctcctgtctgtgcgatcctgccggccctctgccttctcctgccaccaccacaagactgagagccctgggcagccacagactgcaccctgccacagagacaggcggcagagaggccacaagcagccctagaccccagcccagagacagaagatggggcgataccccccctggcagaaagcctggatctccagtccgcgccaagagaagcggatctggcgtgaagcagaccctgaatttcgacctgctgaagctggctggcgacgtggaatccaacccaggcccttctagaggccatatgaccgagtacaagcccacggtgcgcctcgccacccgcgacgacgtccccagggccgtacgcaccctcgccgccgcgttcgccgactaccccgccacgcgccacaccgtcgatccggaccgccacatcgagcgggtcaccgagctgcaagaactcttcctcacgcgcgtcgggctcgacatcggcaaggtgtgggtcgcggacgacggcgccgcggtggcggtctggaccacgccggagagcgtcgaagcgggggcggtgttcgccgagatcggcccgcgcatggccgagttgagcggttcccggctggccgcgcagcaacagatggaaggcctcctggcgccgcaccggcccaaggagcccgcgtggttcctggccaccgtcggcgtctcgcccgaccaccagggcaagggtctgggcagcgccgtcgtgctccccggagtggaggcggccgagcgcgccggggtgcccgccttcctggagacctccgcgccccgcaacctccccttctacgagcggctcggcttcaccgtcaccgccgacgtcgaggtgcccgaaggaccgcgcacctggtgcatgacccgcaagcccggtgcctga

SEQ ID NO: 6991 - DNA, 2868 bp, Artificial Sequence
  Synthetic Polynucloetide
atggccttaccagtgaccgccttgctcctgccgctggccttgctgctccacgccgccaggccgctcgaggacctgaagaacgtgttcccacctgaggtggccgtgttcgagcctagcgaggccgagatcagccacacccagaaagccaccctcgtgtgcctggctaccggcttctaccccgaccatgtggaactgtcttggtgggtcaacggcaaagaggtgcacagcggcgtgtctaccgacccccagccactgaaagaacagcccgccctgaacgacagccggtactgcctgagcagcagactgagagtgtccgccaccttctggcagaacccccggaaccacttcagatgccaggtgcagttctacggcctgagcgagaacgacgagtggacccaggacagagccaagcccgtgacccagatcgtgtctgccgaagcctggggcagagccgattgcggctttaccagcgagagctaccagcagggcgtgctgagcgccaccatcctgtacgagatcctgctgggcaaggccaccctgtacgccgtgctggtgtctgccctggtgctgatggctatggtcaagcggaaggacagccggggaagggccaagcgatctggatctggagcaacaaacttctcactactcaaacaagcaggtgacgtggaggagaatcccgggcctactagcatggccttaccagtgaccgccttgctcctgccgctggccttgctgctccacgccgccaggccggaagtgcagctgcttgaaagtggcggcggactgattcagcctggcggatctctgagactgagctgtgccgccagcggcttcaccttttctagccacgccatgacctgggtccgacaggcacctggaaaagggcttgaatgggtgtccgccatcagcggctctggcgattacacacactacgccgacagcgtgaagggcagattcaccatcagcagagacaacagcaagaacaccgtgtacctccagatgaacagcctgagagccgaggacagcgccgtgtattattgcgccaaggatgaggatggcggcagcctgcttggacacagaggacaaggcaccctggtcaccgtttcttccctcgagagcggcggaggcggatctttcgaagtgcagctggttgaatctggcggaggactggttcagcctggcggatctctgagactgtcttgtgccgccagcggcttcagcttcagcgacttttggatgagctgggtccgacaggcccctggcaaaggacttgaatgggtcgccacaatcagccaggccggcagcgagaaggactacgtggactctgtgaagggcagattcaccatcagccgggacaacgccaagaagtccctgtacctccagatgaacagcctgagagccgaggacaccgccgtgtactattgtgcctctggcgtgtacagcttcgactacagaggccagggcaccctggtcacagtctcttctacgcgtgagcagaaactgatctcggaagaggatctggggagcggcaccccattcccttctctggcccctcccatcatgctgctggtggacggcaagcagcagatggtggtcgtgtgcctggtgctggatgtggccccacctggactggacagccccatctggtttagcgccggcaatggctctgccctggacgcctttacctacggcccaagccctgccaccgatggcacctggacaaatctggcccacctgagcctgcccagcgaggaactggcttcttgggagcctctcgtgtgccacacaggacctggcgctgagggacacagcagatccacccagcctatgcacctgtctggcgaggccagcaccgccagaacctgtcctcaggaacctctgagaggcacccctggcggagcactgtggctgggagtgctgagactgctgctgttcaagctgctgctgtttgacctgctgctgacctgctcctgtctgtgcgatcctgccggccctctgccttctcctgccaccaccacaagactgagagccctgggcagccacagactgcaccctgccacagagacaggcggcagagaggccacaagcagccctagaccccagcccagagacagaagatggggcgataccccccctggcagaaagcctggatctccagtccgcgccaagagaagcggatctggcgtgaagcagaccctgaatttcgacctgctgaagctggctggcgacgtggaatccaacccaggcccttctagatctagaggccatatgaccgagtacaagcccacggtgcgcctcgccacccgcgacgacgtccccagggccgtacgcaccctcgccgccgcgttcgccgactaccccgccacgcgccacaccgtcgatccggaccgccacatcgagcgggtcaccgagctgcaagaactcttcctcacgcgcgtcgggctcgacatcggcaaggtgtgggtcgcggacgacggcgccgcggtggcggtctggaccacgccggagagcgtcgaagcgggggcggtgttcgccgagatcggcccgcgcatggccgagttgagcggttcccggctggccgcgcagcaacagatggaaggcctcctggcgccgcaccggcccaaggagcccgcgtggttcctggccaccgtcggcgtctcgcccgaccaccagggcaagggtctgggcagcgccgtcgtgctccccggagtggaggcggccgagcgcgccggggtgcccgccttcctggagacctccgcgccccgcaacctccccttctacgagcggctcggcttcaccgtcaccgccgacgtcgaggtgcccgaaggaccgcgcacctggtgcatgacccgcaagcccggtgcctga

SEQ ID NO: 6992 - DNA, 2694 bp, Artificial Sequence
  Synthetic Polynucloetide
atggccttaccagtgaccgccttgctcctgccgctggccttgctgctccacgccgccaggccggaagtgcagctgcttgaaagtggcggcggactgattcagcctggcggatctctgagactgagctgtgccgccagcggcttcaccttttctagccacgccatgacctgggtccgacaggcacctggaaaagggcttgaatgggtgtccgccatcagcggctctggcgattacacacactacgccgacagcgtgaagggcagattcaccatcagcagagacaacagcaagaacaccgtgtacctccagatgaacagcctgagagccgaggacagcgccgtgtattattgcgccaaggatgaggatggcggcagcctgcttggacacagaggacaaggcaccctggtcaccgtttcttccctcgaggggaaaccaattcccaaccctcttctgggactggattcaaccggcagcggcgacaagcagctggacgccgacgtgtcccccaagcctaccatcttcctgccctctatcgccgagacaaagctccagaaggccggcacctacctgtgcctgctggaaaagttcttcccagatgtgattaagatccactggcaggaaaagaagtccaacaccatcctgggcagccaggaaggcaacaccatgaagaccaacgacacctacatgaagttcagctggctgaccgtgcccgagaagtccctggacaaagaacacagatgcatcgtgcggcacgaaaacaacaagaacggcgtggaccaggaaatcatcttcccacccatcaagaccgatgtgattacaatggaccccaaggacaactgctccaaggacgccaacgataccctgctgctccagctgaccaacaccagcgcctactacatgtacttgttgctgctgctgaagtccgtggtgtacttcgccatcatcacatgctgcctgctgcggagaaccgccttctgctgcaacggcgagaagtctagggccaagcgatctggatctggagcaacaaacttctcactactcaaacaagcaggtgacgtggaggagaatcccgggcctactagtatggactggatttggcgcatccttttccttgtcggcgctgctaccggcgcgcattccttcgaagtgcagctggttgaatctggcggaggactggttcagcctggcggatctctgagactgtcttgtgccgccagcggcttcagcttcagcgacttttggatgagctgggtccgacaggcccctggcaaaggacttgaatgggtcgccacaatcagccaggccggcagcgagaaggactacgtggactctgtgaagggcagattcaccatcagccgggacaacgccaagaagtccctgtacctccagatgaacagcctgagagccgaggacaccgccgtgtactattgtgcctctggcgtgtacagcttcgactacagaggccagggcaccctggtcacagtctcttctacgcgtgagcagaaactgatctcggaagaggatgggagcggcagccagcctcacaccaagcccagcgtgttcgtgatgaagaacggcaccaacgtggcctgcctcgtgaaagagttctaccccaaggacatcaggatcaacctggtgtccagcaagaagatcaccgagttcgaccccgccatcgtgatctcccccagcggcaagtacaacgccgtgaagctggggaagtacgaggacagcaacagcgtgacctgctccgtgcagcacgacaacaagaccgtgcacagcaccgactttgaagtgaaaaccgactccaccgaccacgtgaagcccaaagagacagagaacaccaagcagcccagcaagagctgccacaagcccaaggccatcgtgcacaccgagaaagtgaacatgatgagcctgaccgtgctgggcctgcggatgctgttcgccaaaaccgtggccgtgaacttcctgctgaccgccaagctgttcttcctccgcgccaagagaagcggatctggcgtgaagcagaccctgaatttcgacctgctgaagctggctggcgacgtggaatccaacccaggcccttctagaggccatatgaccgagtacaagcccacggtgcgcctcgccacccgcgacgacgtccccagggccgtacgcaccctcgccgccgcgttcgccgactaccccgccacgcgccacaccgtcgatccggaccgccacatcgagcgggtcaccgagctgcaagaactcttcctcacgcgcgtcgggctcgacatcggcaaggtgtgggtcgcggacgacggcgccgcggtggcggtctggaccacgccggagagcgtcgaagcgggggcggtgttcgccgagatcggcccgcgcatggccgagttgagcggttcccggctggccgcgcagcaacagatggaaggcctcctggcgccgcaccggcccaaggagcccgcgtggttcctggccaccgtcggcgtctcgcccgaccaccagggcaagggtctgggcagcgccgtcgtgctccccggagtggaggcggccgagcgcgccggggtgcccgccttcctggagacctccgcgccccgcaacctccccttctacgagcggctcggcttcaccgtcaccgccgacgtcgaggtgcccgaaggaccgcgcacctggtgcatgacccgcaagcccggtgcctga

SEQ ID NO: 6993 - DNA, 1905 bp, Artificial Sequence
  Synthetic Polynucloetide
atggccttaccagtgaccgccttgctcctgccgctggccttgctgctccacgccgccaggccggaagtgcagctgcttgaaagtggcggcggactgattcagcctggcggatctctgagactgagctgtgccgccagcggcttcaccttttctagccacgccatgacctgggtccgacaggcacctggaaaagggcttgaatgggtgtccgccatcagcggctctggcgattacacacactacgccgacagcgtgaagggcagattcaccatcagcagagacaacagcaagaacaccgtgtacctccagatgaacagcctgagagccgaggacagcgccgtgtattattgcgccaaggatgaggatggcggcagcctgcttggacacagaggacaaggcaccctggtcaccgtttcttccctcgagagccagcctcacaccaagcccagcgtgttcgtgatgaagaacggcaccaacgtggcctgcctcgtgaaagagttctaccccaaggacatcaggatcaacctggtgtccagcaagaagatcaccgagttcgaccccgccatcgtgatctcccccagcggcaagtacaacgccgtgaagctggggaagtacgaggacagcaacagcgtgacctgctccgtgcagcacgacaacaagaccgtgcacagcaccgactttgaagtgaaaaccgactccaccgaccacgtgaagcccaaagagacagagaacaccaagcagcccagcaagagctgccacaagcccaaggccatcgtgcacaccgagaaagtgaacatgatgagcctgaccgtgctgggcctgcggatgctgttcgccaaaaccgtggccgtgaacttcctgctgaccgccaagctgttcttcctcagggccaagcgatctggatctggagcaacaaacttctcactactcaaacaagcaggtgacgtggaggagaatcccgggcctactagtatggactggatttggcgcatccttttccttgtcggcgctgctaccggcgcgcattccttcgaagtgcagctggttgaatctggcggaggactggttcagcctggcggatctctgagactgtcttgtgccgccagcggcttcagcttcagcgacttttggatgagctgggtccgacaggcccctggcaaaggacttgaatgggtcgccacaatcagccaggccggcagcgagaaggactacgtggactctgtgaagggcagattcaccatcagccgggacaacgccaagaagtccctgtacctccagatgaacagcctgagagccgaggacaccgccgtgtactattgtgcctctggcgtgtacagcttcgactacagaggccagggcaccctggtcacagtctcttctacgcgtgacaagcagctggacgccgacgtgtcccccaagcctaccatcttcctgccctctatcgccgagacaaagctccagaaggccggcacctacctgtgcctgctggaaaagttcttcccagatgtgattaagatccactggcaggaaaagaagtccaacaccatcctgggcagccaggaaggcaacaccatgaagaccaacgacacctacatgaagttcagctggctgaccgtgcccgagaagtccctggacaaagaacacagatgcatcgtgcggcacgaaaacaacaagaacggcgtggaccaggaaatcatcttcccacccatcaagaccgatgtgattacaatggaccccaaggacaactgctccaaggacgccaacgataccctgctgctccagctgaccaacaccagcgcctactacatgtacttgttgctgctgctgaagtccgtggtgtacttcgccatcatcacatgctgcctgctgcggagaaccgccttctgctgcaacggcgagaagtct

SEQ ID NO: 6994 - DNA, 2724 bp, Artificial Sequence
  Synthetic Polynucloetide
atggccttaccagtgaccgccttgctcctgccgctggccttgctgctccacgccgccaggccgctcgaggggaaaccaattcccaaccctcttctgggactggattcaaccggcagcggcgacaagcagctggacgccgacgtgtcccccaagcctaccatcttcctgccctctatcgccgagacaaagctccagaaggccggcacctacctgtgcctgctggaaaagttcttcccagatgtgattaagatccactggcaggaaaagaagtccaacaccatcctgggcagccaggaaggcaacaccatgaagaccaacgacacctacatgaagttcagctggctgaccgtgcccgagaagtccctggacaaagaacacagatgcatcgtgcggcacgaaaacaacaagaacggcgtggaccaggaaatcatcttcccacccatcaagaccgatgtgattacaatggaccccaaggacaactgctccaaggacgccaacgataccctgctgctccagctgaccaacaccagcgcctactacatgtacttgttgctgctgctgaagtccgtggtgtacttcgccatcatcacatgctgcctgctgcggagaaccgccttctgctgcaacggcgagaagtctagggccaagcgatctggatctggagcaacaaacttctcactactcaaacaagcaggtgacgtggaggagaatcccgggcctactagcatggccttaccagtgaccgccttgctcctgccgctggccttgctgctccacgccgccaggccggaagtgcagctgcttgaaagtggcggcggactgattcagcctggcggatctctgagactgagctgtgccgccagcggcttcaccttttctagccacgccatgacctgggtccgacaggcacctggaaaagggcttgaatgggtgtccgccatcagcggctctggcgattacacacactacgccgacagcgtgaagggcagattcaccatcagcagagacaacagcaagaacaccgtgtacctccagatgaacagcctgagagccgaggacagcgccgtgtattattgcgccaaggatgaggatggcggcagcctgcttggacacagaggacaaggcaccctggtcaccgtttcttccctcgagagcggcggaggcggatctttcgaagtgcagctggttgaatctggcggaggactggttcagcctggcggatctctgagactgtcttgtgccgccagcggcttcagcttcagcgacttttggatgagctgggtccgacaggcccctggcaaaggacttgaatgggtcgccacaatcagccaggccggcagcgagaaggactacgtggactctgtgaagggcagattcaccatcagccgggacaacgccaagaagtccctgtacctccagatgaacagcctgagagccgaggacaccgccgtgtactattgtgcctctggcgtgtacagcttcgactacagaggccagggcaccctggtcacagtctcttctacgcgtgagcagaaactgatctcggaagaggatgggagcggcagccagcctcacaccaagcccagcgtgttcgtgatgaagaacggcaccaacgtggcctgcctcgtgaaagagttctaccccaaggacatcaggatcaacctggtgtccagcaagaagatcaccgagttcgaccccgccatcgtgatctcccccagcggcaagtacaacgccgtgaagctggggaagtacgaggacagcaacagcgtgacctgctccgtgcagcacgacaacaagaccgtgcacagcaccgactttgaagtgaaaaccgactccaccgaccacgtgaagcccaaagagacagagaacaccaagcagcccagcaagagctgccacaagcccaaggccatcgtgcacaccgagaaagtgaacatgatgagcctgaccgtgctgggcctgcggatgctgttcgccaaaaccgtggccgtgaacttcctgctgaccgccaagctgttcttcctccgcgccaagagaagcggatctggcgtgaagcagaccctgaatttcgacctgctgaagctggctggcgacgtggaatccaacccaggcccttctagaggccatatgaccgagtacaagcccacggtgcgcctcgccacccgcgacgacgtccccagggccgtacgcaccctcgccgccgcgttcgccgactaccccgccacgcgccacaccgtcgatccggaccgccacatcgagcgggtcaccgagctgcaagaactcttcctcacgcgcgtcgggctcgacatcggcaaggtgtgggtcgcggacgacggcgccgcggtggcggtctggaccacgccggagagcgtcgaagcgggggcggtgttcgccgagatcggcccgcgcatggccgagttgagcggttcccggctggccgcgcagcaacagatggaaggcctcctggcgccgcaccggcccaaggagcccgcgtggttcctggccaccgtcggcgtctcgcccgaccaccagggcaagggtctgggcagcgccgtcgtgctccccggagtggaggcggccgagcgcgccggggtgcccgccttcctggagacctccgcgccccgcaacctccccttctacgagcggctcggcttcaccgtcaccgccgacgtcgaggtgcccgaaggaccgcgcacctggtgcatgacccgcaagcccggtgcctga

SEQ ID NO: 6995 - DNA, 3114 bp, Artificial Sequence
  Synthetic Polynucloetide
atggccttaccagtgaccgccttgctcctgccgctggccttgctgctccacgccgccaggccggaagtgcagctgcttgaaagtggcggcggactgattcagcctggcggatctctgagactgagctgtgccgccagcggcttcaccttttctagccacgccatgacctgggtccgacaggcacctggaaaagggcttgaatgggtgtccgccatcagcggctctggcgattacacacactacgccgacagcgtgaagggcagattcaccatcagcagagacaacagcaagaacaccgtgtacctccagatgaacagcctgagagccgaggacagcgccgtgtattattgcgccaaggatgaggatggcggcagcctgcttggacacagaggacaaggcaccctggtcaccgtttcttccggacagcctaaggccaatcctaccgtgacactgttccctccaagcagcgaagaactccaggccaacaaggccacacttgtgtgcctgatctccgacttctaccctggggctgtgacagtggcttggaaggccgatggatctcctgtgaaagccggcgtggaaaccaccaagccatccaagcagagcaacaacaaatacgccgccagctcctacctgagcctgacacctgagcagtggaagtcccacagatcctacagctgccaagtgacccacgaaggcagcaccgtggaaaagacagtggcccctacagagtgcagcggatcccagagcttcggcctgctggaccccaagctgtgctacctgctggatggcatcctgttcatctacggcgtgatcctgaccgccctgttcctgagagtgaagttcagcagaagcgccgacgcccctgcctaccagcagggacagaaccaactgtacaacgagctgaacctgggcagacgggaagagtacgacgtgctggacaagcggagaggcagggaccctgagatgggcggaaagccccagcggagaaagaacccccaggaaggactgtataacgaactccagaaagacaagatggccgaagcctacagcgagatcggcatgaagggcgagcggagaagaggcaagggccacgatggcctgtaccagggcctgagcaccgccaccaaggacacctatgacgccctgcacatgcaggccctgcctccaagaagggccaagcgatctggatctggagcaacaaacttctcactactcaaacaagcaggtgacgtggaggagaatcccgggcctactagtatggactggatttggcgcatccttttccttgtcggcgctgctaccggcgcgcattccttcgaagtgcagctggttgaatctggcggaggactggttcagcctggcggatctctgagactgtcttgtgccgccagcggcttcagcttcagcgacttttggatgagctgggtccgacaggcccctggcaaaggacttgaatgggtcgccacaatcagccaggccggcagcgagaaggactacgtggactctgtgaagggcagattcaccatcagccgggacaacgccaagaagtccctgtacctccagatgaacagcctgagagccgaggacaccgccgtgtactattgtgcctctggcgtgtacagcttcgactacagaggccagggcaccctggtcacagtctcttctgcctctacaaagggaccctccgtgtttcctctggctcccagcagcaagtctacaagcggaggaacagccgctctgggctgcctggtcaaggattactttcccgagcctgtgaccgtgtcctggaatagcggagcactgacaagcggcgtgcacacctttccagccgtgctgcaaagcagcggcctgtactctctgagcagcgtggtcacagtgcctagctctagcctgggcacccagacctacatctgcaatgtgaaccacaagcctagcaacaccaaggtggacaagagagtggaacccaagagctgtggtacccagagttttgggttgttggaccctaaattgtgctatctgttggacggaatcctgttcatttacggagtgatcctgaccgcattgttcctgcgggttaagttttccagatccgcagacgcacccgcttaccaacaagggcagaaccaactctacaatgaacttaatttggggcggagggaagagtacgacgttctggacaaaaggaggggacgagatcccgagatgggcggaaagcctcagcgaaggaagaatccgcaagaggggctttataacgaactccagaaagataaaatggcagaagcctatagtgagattgggatgaagggagaaaggaggaggggtaaaggtcacgatgggttgtaccaaggattgagcacagccactaaagatacctatgatgcgctccacatgcaggccctgccgccaagacgcgccaagagaagcggatctggcgtgaagcagaccctgaatttcgacctgctgaagctggctggcgacgtggaatccaacccaggcccttctagaggccatatgaccgagtacaagcccacggtgcgcctcgccacccgcgacgacgtccccagggccgtacgcaccctcgccgccgcgttcgccgactaccccgccacgcgccacaccgtcgatccggaccgccacatcgagcgggtcaccgagctgcaagaactcttcctcacgcgcgtcgggctcgacatcggcaaggtgtgggtcgcggacgacggcgccgcggtggcggtctggaccacgccggagagcgtcgaagcgggggcggtgttcgccgagatcggcccgcgcatggccgagttgagcggttcccggctggccgcgcagcaacagatggaaggcctcctggcgccgcaccggcccaaggagcccgcgtggttcctggccaccgtcggcgtctcgcccgaccaccagggcaagggtctgggcagcgccgtcgtgctccccggagtggaggcggccgagcgcgccggggtgcccgccttcctggagacctccgcgccccgcaacctccccttctacgagcggctcggcttcaccgtcaccgccgacgtcgaggtgcccgaaggaccgcgcacctggtgcatgacccgcaagcccggtgcctga

SEQ ID NO: 6996 - DNA, 2469 bp, Artificial Sequence
  Synthetic Polynucloetide
atggccttaccagtgaccgccttgctcctgccgctggccttgctgctccacgccgccaggccggaagtgcagctgcttgaaagtggcggcggactgattcagcctggcggatctctgagactgagctgtgccgccagcggcttcaccttttctagccacgccatgacctgggtccgacaggcacctggaaaagggcttgaatgggtgtccgccatcagcggctctggcgattacacacactacgccgacagcgtgaagggcagattcaccatcagcagagacaacagcaagaacaccgtgtacctccagatgaacagcctgagagccgaggacagcgccgtgtattattgcgccaaggatgaggatggcggcagcctgcttggacacagaggacaaggcaccctggtcaccgtttcttccctcgaggacctgaagaacgtgttcccacctgaggtggccgtgttcgagcctagcgaggccgagatcagccacacccagaaagccaccctcgtgtgcctggctaccggcttctaccccgaccatgtggaactgtcttggtgggtcaacggcaaagaggtgcacagcggcgtgtctaccgacccccagccactgaaagaacagcccgccctgaacgacagccggtactgcctgagcagcagactgagagtgtccgccaccttctggcagaacccccggaaccacttcagatgccaggtgcagttctacggcctgagcgagaacgacgagtggacccaggacagagccaagcccgtgacccagatcgtgtctgccgaagcctggggcagagccgattgcggatcccagagcttcggcctgctggaccccaagctgtgctacctgctggatggcatcctgttcatctacggcgtgatcctgaccgccctgttcctgagagtgaagttcagcagaagcgccgacgcccctgcctaccagcagggacagaaccaactgtacaacgagctgaacctgggcagacgggaagagtacgacgtgctggacaagcggagaggcagggaccctgagatgggcggaaagccccagcggagaaagaacccccaggaaggactgtataacgaactccagaaagacaagatggccgaagcctacagcgagatcggcatgaagggcgagcggagaagaggcaagggccacgatggcctgtaccagggcctgagcaccgccaccaaggacacctatgacgccctgcacatgcaggccctgcctccaagaagggccaagcgatctggatctggagcaacaaacttctcactactcaaacaagcaggtgacgtggaggagaatcccgggcctactagtatggactggatttggcgcatccttttccttgtcggcgctgctaccggcgcgcattccttcgaagtgcagctggttgaatctggcggaggactggttcagcctggcggatctctgagactgtcttgtgccgccagcggcttcagcttcagcgacttttggatgagctgggtccgacaggcccctggcaaaggacttgaatgggtcgccacaatcagccaggccggcagcgagaaggactacgtggactctgtgaagggcagattcaccatcagccgggacaacgccaagaagtccctgtacctccagatgaacagcctgagagccgaggacaccgccgtgtactattgtgcctctggcgtgtacagcttcgactacagaggccagggcaccctggtcacagtctcttctacgcgtatccagaaccctgatcctgccgtgtaccagctgcgggatagcaagagcagcgacaagagcgtgtgtctgttcaccgacttcgacagccagaccaacgtgtcccagagcaaggactccgacgtgtacatcaccgataagaccgtgctggacatgcggagcatggacttcaagagcaactccgccgtggcctggtccaacaagtccgatttcgcctgcgccaacgccttcaacaacagcattatccccgaggacacattcttcccaagccccgagagcagctgcggtacccagagttttgggttgttggaccctaaattgtgctatctgttggacggaatcctgttcatttacggagtgatcctgaccgcattgttcctgcgggttaagttttccagatccgcagacgcacccgcttaccaacaagggcagaaccaactctacaatgaacttaatttggggcggagggaagagtacgacgttctggacaaaaggaggggacgagatcccgagatgggcggaaagcctcagcgaaggaagaatccgcaagaggggctttataacgaactccagaaagataaaatggcagaagcctatagtgagattgggatgaagggagaaaggaggaggggtaaaggtcacgatgggttgtaccaaggattgagcacagccactaaagatacctatgatgcgctccacatgcaggccctgccgccaaga

SEQ ID NO: 6997 - DNA, 2469 bp, Artificial Sequence
  Synthetic Polynucloetide
atggccttaccagtgaccgccttgctcctgccgctggccttgctgctccacgccgccaggccggaagtgcagctgcttgaaagtggcggcggactgattcagcctggcggatctctgagactgagctgtgccgccagcggcttcaccttttctagccacgccatgacctgggtccgacaggcacctggaaaagggcttgaatgggtgtccgccatcagcggctctggcgattacacacactacgccgacagcgtgaagggcagattcaccatcagcagagacaacagcaagaacaccgtgtacctccagatgaacagcctgagagccgaggacagcgccgtgtattattgcgccaaggatgaggatggcggcagcctgcttggacacagaggacaaggcaccctggtcaccgtttcttccctcgaggacctgaagaacgtgttcccacctgaggtggccgtgttcgagcctagcaaggccgagatcgcccacacccagaaagccaccctcgtgtgcctggctaccggcttctaccccgaccatgtggaactgtcttggtgggtcaacggcaaagaggtgcacagcggcgtgtgtaccgacccccagccactgaaagaacagcccgccctgaacgacagccggtactgcctgagcagcagactgagagtgtccgccaccttctggcagaacccccggaaccacttcagatgccaggtgcagttctacggcctgagcgagaacgacgagtggacccaggacagagccaagcccgtgacccagatcgtgtctgccgaagcctggggcagagccgattgcggatcccagagcttcggcctgctggaccccaagctgtgctacctgctggatggcatcctgttcatctacggcgtgatcctgaccgccctgttcctgagagtgaagttcagcagaagcgccgacgcccctgcctaccagcagggacagaaccaactgtacaacgagctgaacctgggcagacgggaagagtacgacgtgctggacaagcggagaggcagggaccctgagatgggcggaaagccccagcggagaaagaacccccaggaaggactgtataacgaactccagaaagacaagatggccgaagcctacagcgagatcggcatgaagggcgagcggagaagaggcaagggccacgatggcctgtaccagggcctgagcaccgccaccaaggacacctatgacgccctgcacatgcaggccctgcctccaagaagggccaagcgatctggatctggagcaacaaacttctcactactcaaacaagcaggtgacgtggaggagaatcccgggcctactagtatggactggatttggcgcatccttttccttgtcggcgctgctaccggcgcgcattccttcgaagtgcagctggttgaatctggcggaggactggttcagcctggcggatctctgagactgtcttgtgccgccagcggcttcagcttcagcgacttttggatgagctgggtccgacaggcccctggcaaaggacttgaatgggtcgccacaatcagccaggccggcagcgagaaggactacgtggactctgtgaagggcagattcaccatcagccgggacaacgccaagaagtccctgtacctccagatgaacagcctgagagccgaggacaccgccgtgtactattgtgcctctggcgtgtacagcttcgactacagaggccagggcaccctggtcacagtctcttctacgcgtatccagaaccctgatcctgccgtgtaccagctgcgggatagcaagagcagcgacaagagcgtgtgtctgttcaccgacttcgacagccagaccaacgtgtcccagagcaaggactccgacgtgtacatcaccgataagtgcgtgctggacatgcggagcatggacttcaagagcaactccgccgtggcctggtccaacaagtccgatttcgcctgcgccaacgccttcaacaacagcattatccccgaggacacattcttcccaagcagcgacgtgccctgcggtacccagagttttgggttgttggaccctaaattgtgctatctgttggacggaatcctgttcatttacggagtgatcctgaccgcattgttcctgcgggttaagttttccagatccgcagacgcacccgcttaccaacaagggcagaaccaactctacaatgaacttaatttggggcggagggaagagtacgacgttctggacaaaaggaggggacgagatcccgagatgggcggaaagcctcagcgaaggaagaatccgcaagaggggctttataacgaactccagaaagataaaatggcagaagcctatagtgagattgggatgaagggagaaaggaggaggggtaaaggtcacgatgggttgtaccaaggattgagcacagccactaaagatacctatgatgcgctccacatgcaggccctgccgccaaga

SEQ ID NO: 6998 - DNA, 2682 bp, Artificial Sequence
  Synthetic Polynucloetide
atggccttaccagtgaccgccttgctcctgccgctggccttgctgctccacgccgccaggccggaagtgcagctgcttgaaagtggcggcggactgattcagcctggcggatctctgagactgagctgtgccgccagcggcttcaccttttctagccacgccatgacctgggtccgacaggcacctggaaaagggcttgaatgggtgtccgccatcagcggctctggcgattacacacactacgccgacagcgtgaagggcagattcaccatcagcagagacaacagcaagaacaccgtgtacctccagatgaacagcctgagagccgaggacagcgccgtgtattattgcgccaaggatgaggatggcggcagcctgcttggacacagaggacaaggcaccctggtcaccgtttcttccctcgaggggaaaccaattcccaaccctcttctgggactggattcaaccggcagcggcgaggacctgaagaacgtgttcccacctgaggtggccgtgttcgagcctagcgaggccgagatcagccacacccagaaagccaccctcgtgtgcctggctaccggcttctaccccgaccatgtggaactgtcttggtgggtcaacggcaaagaggtgcacagcggcgtgtctaccgacccccagccactgaaagaacagcccgccctgaacgacagccggtactgcctgagcagcagactgagagtgtccgccaccttctggcagaacccccggaaccacttcagatgccaggtgcagttctacggcctgagcgagaacgacgagtggacccaggacagagccaagcccgtgacccagatcgtgtctgccgaagcctggggcagagccgattgcggatcccagagcttcggcctgctggaccccaagctgtgctacctgctggatggcatcctgttcatctacggcgtgatcctgaccgccctgttcctgagagtgaagttcagcagaagcgccgacgcccctgcctaccagcagggacagaaccaactgtacaacgagctgaacctgggcagacgggaagagtacgacgtgctggacaagcggagaggcagggaccctgagatgggcggaaagccccagcggagaaagaacccccaggaaggactgtataacgaactccagaaagacaagatggccgaagcctacagcgagatcggcatgaagggcgagcggagaagaggcaagggccacgatggcctgtaccagggcctgagcaccgccaccaaggacacctatgacgccctgcacatgcaggccctgcctccaagaagggccaagcgatctggatctggagcaacaaacttctcactactcaaacaagcaggtgacgtggaggagaatcccgggcctactagtatggactggatttggcgcatccttttccttgtcggcgctgctaccggcgcgcattccttcgaagtgcagctggttgaatctggcggaggactggttcagcctggcggatctctgagactgtcttgtgccgccagcggcttcagcttcagcgacttttggatgagctgggtccgacaggcccctggcaaaggacttgaatgggtcgccacaatcagccaggccggcagcgagaaggactacgtggactctgtgaagggcagattcaccatcagccgggacaacgccaagaagtccctgtacctccagatgaacagcctgagagccgaggacaccgccgtgtactattgtgcctctggcgtgtacagcttcgactacagaggccagggcaccctggtcacagtctcttctacgcgtgagcagaaactgatctcggaagaggatgggagcggcatccagaaccctgatcctgccgtgtaccagctgcgggatagcaagagcagcgacaagagcgtgtgtctgttcaccgacttcgacagccagaccaacgtgtcccagagcaaggactccgacgtgtacatcaccgataagaccgtgctggacatgcggagcatggacttcaagagcaactccgccgtggcctggtccaacaagtccgatttcgcctgcgccaacgccttcaacaacagcattatccccgaggacacattcttcccaagccccgagagcagctgcggtacccagagttttgggttgttggaccctaaattgtgctatctgttggacggaatcctgttcatttacggagtgatcctgaccgcattgttcctgaggagcaagcggtcacggctgctccacagcgattacatgaatatgacaccacgaagaccgggtcctactcgcaaacactaccaaccctacgcacctccccgcgactttgcagcgtaccgatctcgggttaagttttccagatccgcagacgcacccgcttaccaacaagggcagaaccaactctacaatgaacttaatttggggcggagggaagagtacgacgttctggacaaaaggaggggacgagatcccgagatgggcggaaagcctcagcgaaggaagaatccgcaagaggggctttataacgaactccagaaagataaaatggcagaagcctatagtgagattgggatgaagggagaaaggaggaggggtaaaggtcacgatgggttgtaccaaggattgagcacagccactaaagatacctatgatgcgctccacatgcaggccctgccgccaaga

SEQ ID NO: 6999 - DNA, 2805 bp, Artificial Sequence
  Synthetic Polynucloetide
atggccttaccagtgaccgccttgctcctgccgctggccttgctgctccacgccgccaggccggaagtgcagctgcttgaaagtggcggcggactgattcagcctggcggatctctgagactgagctgtgccgccagcggcttcaccttttctagccacgccatgacctgggtccgacaggcacctggaaaagggcttgaatgggtgtccgccatcagcggctctggcgattacacacactacgccgacagcgtgaagggcagattcaccatcagcagagacaacagcaagaacaccgtgtacctccagatgaacagcctgagagccgaggacagcgccgtgtattattgcgccaaggatgaggatggcggcagcctgcttggacacagaggacaaggcaccctggtcaccgtttcttccctcgaggggaaaccaattcccaaccctcttctgggactggattcaaccggcagcggcgaggacctgaagaacgtgttcccacctgaggtggccgtgttcgagcctagcgaggccgagatcagccacacccagaaagccaccctcgtgtgcctggctaccggcttctaccccgaccatgtggaactgtcttggtgggtcaacggcaaagaggtgcacagcggcgtgtctaccgacccccagccactgaaagaacagcccgccctgaacgacagccggtactgcctgagcagcagactgagagtgtccgccaccttctggcagaacccccggaaccacttcagatgccaggtgcagttctacggcctgagcgagaacgacgagtggacccaggacagagccaagcccgtgacccagatcgtgtctgccgaagcctggggcagagccgattgcggatcccagagcttcggcctgctggaccccaagctgtgctacctgctggatggcatcctgttcatctacggcgtgatcctgaccgccctgttcctgaggagtaagaggagcaggctcctgcacagtgactacatgaacatgactccacgccgccccggacccacccgcaagcattaccagccctatgccccaccacgcgacttcgcagcctatcgctccagagtgaagttcagcagaagcgccgacgcccctgcctaccagcagggacagaaccaactgtacaacgagctgaacctgggcagacgggaagagtacgacgtgctggacaagcggagaggcagggaccctgagatgggcggaaagccccagcggagaaagaacccccaggaaggactgtataacgaactccagaaagacaagatggccgaagcctacagcgagatcggcatgaagggcgagcggagaagaggcaagggccacgatggcctgtaccagggcctgagcaccgccaccaaggacacctatgacgccctgcacatgcaggccctgcctccaagaagggccaagcgatctggatctggagcaacaaacttctcactactcaaacaagcaggtgacgtggaggagaatcccgggcctactagtatggactggatttggcgcatccttttccttgtcggcgctgctaccggcgcgcattccttcgaagtgcagctggttgaatctggcggaggactggttcagcctggcggatctctgagactgtcttgtgccgccagcggcttcagcttcagcgacttttggatgagctgggtccgacaggcccctggcaaaggacttgaatgggtcgccacaatcagccaggccggcagcgagaaggactacgtggactctgtgaagggcagattcaccatcagccgggacaacgccaagaagtccctgtacctccagatgaacagcctgagagccgaggacaccgccgtgtactattgtgcctctggcgtgtacagcttcgactacagaggccagggcaccctggtcacagtctcttctacgcgtgagcagaaactgatctcggaagaggatgggagcggcatccagaaccctgatcctgccgtgtaccagctgcgggatagcaagagcagcgacaagagcgtgtgtctgttcaccgacttcgacagccagaccaacgtgtcccagagcaaggactccgacgtgtacatcaccgataagaccgtgctggacatgcggagcatggacttcaagagcaactccgccgtggcctggtccaacaagtccgatttcgcctgcgccaacgccttcaacaacagcattatccccgaggacacattcttcccaagccccgagagcagctgcggtacccagagttttgggttgttggaccctaaattgtgctatctgttggacggaatcctgttcatttacggagtgatcctgaccgcattgttcctgaggagcaagcggtcacggctgctccacagcgattacatgaatatgacaccacgaagaccgggtcctactcgcaaacactaccaaccctacgcacctccccgcgactttgcagcgtaccgatctcgggttaagttttccagatccgcagacgcacccgcttaccaacaagggcagaaccaactctacaatgaacttaatttggggcggagggaagagtacgacgttctggacaaaaggaggggacgagatcccgagatgggcggaaagcctcagcgaaggaagaatccgcaagaggggctttataacgaactccagaaagataaaatggcagaagcctatagtgagattgggatgaagggagaaaggaggaggggtaaaggtcacgatgggttgtaccaaggattgagcacagccactaaagatacctatgatgcgctccacatgcaggccctgccgccaaga

SEQ ID NO: 7000 - DNA, 2688 bp, Artificial Sequence
  Synthetic Polynucloetide
atggccttaccagtgaccgccttgctcctgccgctggccttgctgctccacgccgccaggccggaagtgcagctgcttgaaagtggcggcggactgattcagcctggcggatctctgagactgagctgtgccgccagcggcttcaccttttctagccacgccatgacctgggtccgacaggcacctggaaaagggcttgaatgggtgtccgccatcagcggctctggcgattacacacactacgccgacagcgtgaagggcagattcaccatcagcagagacaacagcaagaacaccgtgtacctccagatgaacagcctgagagccgaggacagcgccgtgtattattgcgccaaggatgaggatggcggcagcctgcttggacacagaggacaaggcaccctggtcaccgtttcttccctcgaggggaaaccaattcccaaccctcttctgggactggattcaaccggcagcggcgaggacctgaagaacgtgttcccacctgaggtggccgtgttcgagcctagcgaggccgagatcagccacacccagaaagccaccctcgtgtgcctggctaccggcttctaccccgaccatgtggaactgtcttggtgggtcaacggcaaagaggtgcacagcggcgtgtctaccgacccccagccactgaaagaacagcccgccctgaacgacagccggtactgcctgagcagcagactgagagtgtccgccaccttctggcagaacccccggaaccacttcagatgccaggtgcagttctacggcctgagcgagaacgacgagtggacccaggacagagccaagcccgtgacccagatcgtgtctgccgaagcctggggcagagccgattgcggatcccagagcttcggcctgctggaccccaagctgtgctacctgctggatggcatcctgttcatctacggcgtgatcctgaccgccctgttcctgagagtgaagttcagcagaagcgccgacgcccctgcctaccagcagggacagaaccaactgtacaacgagctgaacctgggcagacgggaagagtacgacgtgctggacaagcggagaggcagggaccctgagatgggcggaaagccccagcggagaaagaacccccaggaaggactgtataacgaactccagaaagacaagatggccgaagcctacagcgagatcggcatgaagggcgagcggagaagaggcaagggccacgatggcctgtaccagggcctgagcaccgccaccaaggacacctatgacgccctgcacatgcaggccctgcctccaagaagggccaagcgatctggatctggagcaacaaacttctcactactcaaacaagcaggtgacgtggaggagaatcccgggcctactagtatggactggatttggcgcatccttttccttgtcggcgctgctaccggcgcgcattccttcgaagtgcagctggttgaatctggcggaggactggttcagcctggcggatctctgagactgtcttgtgccgccagcggcttcagcttcagcgacttttggatgagctgggtccgacaggcccctggcaaaggacttgaatgggtcgccacaatcagccaggccggcagcgagaaggactacgtggactctgtgaagggcagattcaccatcagccgggacaacgccaagaagtccctgtacctccagatgaacagcctgagagccgaggacaccgccgtgtactattgtgcctctggcgtgtacagcttcgactacagaggccagggcaccctggtcacagtctcttctacgcgtgagcagaaactgatctcggaagaggatctggggagcggcatccagaaccctgatcctgccgtgtaccagctgcgggatagcaagagcagcgacaagagcgtgtgtctgttcaccgacttcgacagccagaccaacgtgtcccagagcaaggactccgacgtgtacatcaccgataagaccgtgctggacatgcggagcatggacttcaagagcaactccgccgtggcctggtccaacaagtccgatttcgcctgcgccaacgccttcaacaacagcattatccccgaggacacattcttcccaagccccgagagcagctgcggtacccagagttttgggttgttggaccctaaattgtgctatctgttggacggaatcctgttcatttacggagtgatcctgaccgcattgttcctgaagagaggccggaagaagctgctgtacatcttcaagcagcctttcatgcggcccgtgcagaccacccaggaagaggacggctgctcctgccggttccccgaggaagaagaaggcggctgcgagctgcgggttaagttttccagatccgcagacgcacccgcttaccaacaagggcagaaccaactctacaatgaacttaatttggggcggagggaagagtacgacgttctggacaaaaggaggggacgagatcccgagatgggcggaaagcctcagcgaaggaagaatccgcaagaggggctttataacgaactccagaaagataaaatggcagaagcctatagtgagattgggatgaagggagaaaggaggaggggtaaaggtcacgatgggttgtaccaaggattgagcacagccactaaagatacctatgatgcgctccacatgcaggccctgccgccaaga

SEQ ID NO: 7001 - DNA, 2814 bp, Artificial Sequence
  Synthetic Polynucloetide
atggccttaccagtgaccgccttgctcctgccgctggccttgctgctccacgccgccaggccggaagtgcagctgcttgaaagtggcggcggactgattcagcctggcggatctctgagactgagctgtgccgccagcggcttcaccttttctagccacgccatgacctgggtccgacaggcacctggaaaagggcttgaatgggtgtccgccatcagcggctctggcgattacacacactacgccgacagcgtgaagggcagattcaccatcagcagagacaacagcaagaacaccgtgtacctccagatgaacagcctgagagccgaggacagcgccgtgtattattgcgccaaggatgaggatggcggcagcctgcttggacacagaggacaaggcaccctggtcaccgtttcttccctcgaggggaaaccaattcccaaccctcttctgggactggattcaaccggcagcggcgaggacctgaagaacgtgttcccacctgaggtggccgtgttcgagcctagcgaggccgagatcagccacacccagaaagccaccctcgtgtgcctggctaccggcttctaccccgaccatgtggaactgtcttggtgggtcaacggcaaagaggtgcacagcggcgtgtctaccgacccccagccactgaaagaacagcccgccctgaacgacagccggtactgcctgagcagcagactgagagtgtccgccaccttctggcagaacccccggaaccacttcagatgccaggtgcagttctacggcctgagcgagaacgacgagtggacccaggacagagccaagcccgtgacccagatcgtgtctgccgaagcctggggcagagccgattgcggatcccagagcttcggcctgctggaccccaagctgtgctacctgctggatggcatcctgttcatctacggcgtgatcctgaccgccctgttcctgaaacggggcagaaagaaactcctgtatatattcaaacaaccatttatgagaccagtacaaactactcaagaggaagatggctgtagctgccgatttccagaagaagaagaaggaggatgtgaactgagagtgaagttcagcagaagcgccgacgcccctgcctaccagcagggacagaaccaactgtacaacgagctgaacctgggcagacgggaagagtacgacgtgctggacaagcggagaggcagggaccctgagatgggcggaaagccccagcggagaaagaacccccaggaaggactgtataacgaactccagaaagacaagatggccgaagcctacagcgagatcggcatgaagggcgagcggagaagaggcaagggccacgatggcctgtaccagggcctgagcaccgccaccaaggacacctatgacgccctgcacatgcaggccctgcctccaagaagggccaagcgatctggatctggagcaacaaacttctcactactcaaacaagcaggtgacgtggaggagaatcccgggcctactagtatggactggatttggcgcatccttttccttgtcggcgctgctaccggcgcgcattccttcgaagtgcagctggttgaatctggcggaggactggttcagcctggcggatctctgagactgtcttgtgccgccagcggcttcagcttcagcgacttttggatgagctgggtccgacaggcccctggcaaaggacttgaatgggtcgccacaatcagccaggccggcagcgagaaggactacgtggactctgtgaagggcagattcaccatcagccgggacaacgccaagaagtccctgtacctccagatgaacagcctgagagccgaggacaccgccgtgtactattgtgcctctggcgtgtacagcttcgactacagaggccagggcaccctggtcacagtctcttctacgcgtgagcagaaactgatctcggaagaggatctggggagcggcatccagaaccctgatcctgccgtgtaccagctgcgggatagcaagagcagcgacaagagcgtgtgtctgttcaccgacttcgacagccagaccaacgtgtcccagagcaaggactccgacgtgtacatcaccgataagaccgtgctggacatgcggagcatggacttcaagagcaactccgccgtggcctggtccaacaagtccgatttcgcctgcgccaacgccttcaacaacagcattatccccgaggacacattcttcccaagccccgagagcagctgcggtacccagagttttgggttgttggaccctaaattgtgctatctgttggacggaatcctgttcatttacggagtgatcctgaccgcattgttcctgaagagaggccggaagaagctgctgtacatcttcaagcagcctttcatgcggcccgtgcagaccacccaggaagaggacggctgctcctgccggttccccgaggaagaagaaggcggctgcgagctgcgggttaagttttccagatccgcagacgcacccgcttaccaacaagggcagaaccaactctacaatgaacttaatttggggcggagggaagagtacgacgttctggacaaaaggaggggacgagatcccgagatgggcggaaagcctcagcgaaggaagaatccgcaagaggggctttataacgaactccagaaagataaaatggcagaagcctatagtgagattgggatgaagggagaaaggaggaggggtaaaggtcacgatgggttgtaccaaggattgagcacagccactaaagatacctatgatgcgctccacatgcaggccctgccgccaaga

SEQ ID NO: 7002 - DNA, 2487 bp, Artificial Sequence
  Synthetic Polynucloetide
atggccttaccagtgaccgccttgctcctgccgctggccttgctgctccacgccgccaggccggaagtgcagctgcttgaaagtggcggcggactgattcagcctggcggatctctgagactgagctgtgccgccagcggcttcaccttttctagccacgccatgacctgggtccgacaggcacctggaaaagggcttgaatgggtgtccgccatcagcggctctggcgattacacacactacgccgacagcgtgaagggcagattcaccatcagcagagacaacagcaagaacaccgtgtacctccagatgaacagcctgagagccgaggacagcgccgtgtattattgcgccaaggatgaggatggcggcagcctgcttggacacagaggacaaggcaccctggtcaccgtttcttccctcgagcagagcttcggcctgctggaccccaagctgtgctacctgctggatggcatcctgttcatctacggcgtgatcctgaccgccctgttcctgagagtgaagttcagcagaagcgccgacgcccctgcctaccagcagggacagaaccaactgtacaacgagctgaacctgggcagacgggaagagtacgacgtgctggacaagcggagaggcagggaccctgagatgggcggaaagccccagcggagaaagaacccccaggaaggactgtataacgaactccagaaagacaagatggccgaagcctacagcgagatcggcatgaagggcgagcggagaagaggcaagggccacgatggcctgtaccagggcctgagcaccgccaccaaggacacctatgacgccctgcacatgcaggccctgcctccaagaagggccaagcgatctggatctggagcaacaaacttctcactactcaaacaagcaggtgacgtggaggagaatcccgggcctactagtatggactggatttggcgcatccttttccttgtcggcgctgctaccggcgcgcattccttcgaagtgcagctggttgaatctggcggaggactggttcagcctggcggatctctgagactgtcttgtgccgccagcggcttcagcttcagcgacttttggatgagctgggtccgacaggcccctggcaaaggacttgaatgggtcgccacaatcagccaggccggcagcgagaaggactacgtggactctgtgaagggcagattcaccatcagccgggacaacgccaagaagtccctgtacctccagatgaacagcctgagagccgaggacaccgccgtgtactattgtgcctctggcgtgtacagcttcgactacagaggccagggcaccctggtcacagtctcttctacgcgtcagagttttgggttgttggaccctaaattgtgctatctgttggacggaatcctgttcatttacggagtgatcctgaccgcattgttcctgcgggttaagttttccagatccgcagacgcacccgcttaccaacaagggcagaaccaactctacaatgaacttaatttggggcggagggaagagtacgacgttctggacaaaaggaggggacgagatcccgagatgggcggaaagcctcagcgaaggaagaatccgcaagaggggctttataacgaactccagaaagataaaatggcagaagcctatagtgagattgggatgaagggagaaaggaggaggggtaaaggtcacgatgggttgtaccaaggattgagcacagccactaaagatacctatgatgcgctccacatgcaggccctgccgccaagacgcgccaagagaagcggatctggcgtgaagcagaccctgaatttcgacctgctgaagctggctggcgacgtggaatccaacccaggcccttctagaggccatatgaccgagtacaagcccacggtgcgcctcgccacccgcgacgacgtccccagggccgtacgcaccctcgccgccgcgttcgccgactaccccgccacgcgccacaccgtcgatccggaccgccacatcgagcgggtcaccgagctgcaagaactcttcctcacgcgcgtcgggctcgacatcggcaaggtgtgggtcgcggacgacggcgccgcggtggcggtctggaccacgccggagagcgtcgaagcgggggcggtgttcgccgagatcggcccgcgcatggccgagttgagcggttcccggctggccgcgcagcaacagatggaaggcctcctggcgccgcaccggcccaaggagcccgcgtggttcctggccaccgtcggcgtctcgcccgaccaccagggcaagggtctgggcagcgccgtcgtgctccccggagtggaggcggccgagcgcgccggggtgcccgccttcctggagacctccgcgccccgcaacctccccttctacgagcggctcggcttcaccgtcaccgccgacgtcgaggtgcccgaaggaccgcgcacctggtgcatgacccgcaagcccggtgcctga

SEQ ID NO: 7003 - DNA, 1959 bp, Artificial Sequence
  Synthetic Polynucloetide
atggccttaccagtgaccgccttgctcctgccgctggccttgctgctccacgccgccaggccggaagtgcagctgcttgaaagtggcggcggactgattcagcctggcggatctctgagactgagctgtgccgccagcggcttcaccttttctagccacgccatgacctgggtccgacaggcacctggaaaagggcttgaatgggtgtccgccatcagcggctctggcgattacacacactacgccgacagcgtgaagggcagattcaccatcagcagagacaacagcaagaacaccgtgtacctccagatgaacagcctgagagccgaggacagcgccgtgtattattgcgccaaggatgaggatggcggcagcctgcttggacacagaggacaaggcaccctggtcaccgtttcttccctcgagggacagcctaaggccaatcctaccgtgacactgttccctccaagcagcgaagaactccaggccaacaaggccacacttgtgtgcctgatctccgacttctaccctggggctgtgacagtggcttggaaggccgatggatctcctgtgaaagccggcgtggaaaccaccaagccatccaagcagagcaacaacaaatacgccgccagctcctacctgagcctgacacctgagcagtggaagtcccacagatcctacagctgccaagtgacccacgaaggcagcaccgtggaaaagacagtggcccctacagagtgcagccccatcaagaccgatgtgattacaatggaccccaaggacaactgctccaaggacgccaacgataccctgctgctccagctgaccaacaccagcgcctactacatgtacttgttgctgctgctgaagtccgtggtgtacttcgccatcatcacatgctgcctgctgcggagaaccgccttctgctgcaacggcgagaagtctagggccaagcgatctggatctggagcaacaaacttctcactactcaaacaagcaggtgacgtggaggagaatcccgggcctactagtatggactggatttggcgcatccttttccttgtcggcgctgctaccggcgcgcattccttcgaagtgcagctggttgaatctggcggaggactggttcagcctggcggatctctgagactgtcttgtgccgccagcggcttcagcttcagcgacttttggatgagctgggtccgacaggcccctggcaaaggacttgaatgggtcgccacaatcagccaggccggcagcgagaaggactacgtggactctgtgaagggcagattcaccatcagccgggacaacgccaagaagtccctgtacctccagatgaacagcctgagagccgaggacaccgccgtgtactattgtgcctctggcgtgtacagcttcgactacagaggccagggcaccctggtcacagtctcttctacgcgtgcctctacaaagggaccctccgtgtttcctctggctcccagcagcaagtctacaagcggaggaacagccgctctgggctgcctggtcaaggattactttcccgagcctgtgaccgtgtcctggaatagcggagcactgacaagcggcgtgcacacctttccagccgtgctgcaaagcagcggcctgtactctctgagcagcgtggtcacagtgcctagctctagcctgggcacccagacctacatctgcaatgtgaaccacaagcctagcaacaccaaggtggacaagagagtggaacccaagagctgtgaagtgaaaaccgactccaccgaccacgtgaagcccaaagagacagagaacaccaagcagcccagcaagagctgccacaagcccaaggccatcgtgcacaccgagaaagtgaacatgatgagcctgaccgtgctgggcctgcggatgctgttcgccaaaaccgtggccgtgaacttcctgctgaccgccaagctgttcttcctc

SEQ ID NO: 7004 - DNA, 1893 bp, Artificial Sequence
  Synthetic Polynucloetide
atggccttaccagtgaccgccttgctcctgccgctggccttgctgctccacgccgccaggccggaagtgcagctgcttgaaagtggcggcggactgattcagcctggcggatctctgagactgagctgtgccgccagcggcttcaccttttctagccacgccatgacctgggtccgacaggcacctggaaaagggcttgaatgggtgtccgccatcagcggctctggcgattacacacactacgccgacagcgtgaagggcagattcaccatcagcagagacaacagcaagaacaccgtgtacctccagatgaacagcctgagagccgaggacagcgccgtgtattattgcgccaaggatgaggatggcggcagcctgcttggacacagaggacaaggcaccctggtcaccgtttcttccctcgagggacagcctaaggccaatcctaccgtgacactgttccctccaagcagcgaagaactccaggccaacaaggccacacttgtgtgcctgatctccgacttctaccctggggctgtgacagtggcttggaaggccgatggatctcctgtgaaagccggcgtggaaaccaccaagccatccaagcagagcaacaacaaatacgccgccagctcctacctgagcctgacacctgagcagtggaagtcccacagatcctacagctgccaagtgacccacgaaggcagcaccgtggaaaagacagtggcccctacagagtgcagcggcagagccgattgcggcatcaccagcgccagctaccaccagggcgtgctgagcgccaccatcctgtacgagatcctgctgggcaaggccaccctgtacgccgtgctggtgtctgccctggtgctgatggctatggtcaagcggaaggacagccggggaagggccaagcgatctggatctggagcaacaaacttctcactactcaaacaagcaggtgacgtggaggagaatcccgggcctactagtatggactggatttggcgcatccttttccttgtcggcgctgctaccggcgcgcattccttcgaagtgcagctggttgaatctggcggaggactggttcagcctggcggatctctgagactgtcttgtgccgccagcggcttcagcttcagcgacttttggatgagctgggtccgacaggcccctggcaaaggacttgaatgggtcgccacaatcagccaggccggcagcgagaaggactacgtggactctgtgaagggcagattcaccatcagccgggacaacgccaagaagtccctgtacctccagatgaacagcctgagagccgaggacaccgccgtgtactattgtgcctctggcgtgtacagcttcgactacagaggccagggcaccctggtcacagtctcttctacgcgtgcctctacaaagggaccctccgtgtttcctctggctcccagcagcaagtctacaagcggaggaacagccgctctgggctgcctggtcaaggattactttcccgagcctgtgaccgtgtcctggaatagcggagcactgacaagcggcgtgcacacctttccagccgtgctgcaaagcagcggcctgtactctctgagcagcgtggtcacagtgcctagctctagcctgggcacccagacctacatctgcaatgtgaaccacaagcctagcaacaccaaggtggacaagagagtggaacccaagagctgtatccccgaggacacattcttcccaagcagcgacgtgccctgcgacgtgaagctggtggaaaagagcttcgagacagacaccaacctgaacttccagaacctgagcgtgatcggcttcagaatcctgctgctgaaagtggccggctttaacctgctgatgaccctgcggctgtggtccagc

SEQ ID NO: 7005 - DNA, 1893 bp, Artificial Sequence
  Synthetic Polynucloetide
atggccttaccagtgaccgccttgctcctgccgctggccttgctgctccacgccgccaggccggaagtgcagctgcttgaaagtggcggcggactgattcagcctggcggatctctgagactgagctgtgccgccagcggcttcaccttttctagccacgccatgacctgggtccgacaggcacctggaaaagggcttgaatgggtgtccgccatcagcggctctggcgattacacacactacgccgacagcgtgaagggcagattcaccatcagcagagacaacagcaagaacaccgtgtacctccagatgaacagcctgagagccgaggacagcgccgtgtattattgcgccaaggatgaggatggcggcagcctgcttggacacagaggacaaggcaccctggtcaccgtttcttccctcgagggacagcctaaggccaatcctaccgtgacactgttccctccaagcagcgaagaactccaggccaacaaggccacacttgtgtgcctgatctccgacttctaccctggggctgtgacagtggcttggaaggccgatggatctcctgtgaaagccggcgtggaaaccaccaagccatccaagcagagcaacaacaaatacgccgccagctcctacctgagcctgacacctgagcagtggaagtcccacagatcctacagctgccaagtgacccacgaaggcagcaccgtggaaaagacagtggcccctacagagtgcagcggcagagccgattgcggctttaccagcgagagctaccagcagggcgtgctgagcgccaccatcctgtacgagatcctgctgggcaaggccaccctgtacgccgtgctggtgtctgccctggtgctgatggctatggtcaagcggaaggacagccggggaagggccaagcgatctggatctggagcaacaaacttctcactactcaaacaagcaggtgacgtggaggagaatcccgggcctactagtatggactggatttggcgcatccttttccttgtcggcgctgctaccggcgcgcattccttcgaagtgcagctggttgaatctggcggaggactggttcagcctggcggatctctgagactgtcttgtgccgccagcggcttcagcttcagcgacttttggatgagctgggtccgacaggcccctggcaaaggacttgaatgggtcgccacaatcagccaggccggcagcgagaaggactacgtggactctgtgaagggcagattcaccatcagccgggacaacgccaagaagtccctgtacctccagatgaacagcctgagagccgaggacaccgccgtgtactattgtgcctctggcgtgtacagcttcgactacagaggccagggcaccctggtcacagtctcttctacgcgtgcctctacaaagggaccctccgtgtttcctctggctcccagcagcaagtctacaagcggaggaacagccgctctgggctgcctggtcaaggattactttcccgagcctgtgaccgtgtcctggaatagcggagcactgacaagcggcgtgcacacctttccagccgtgctgcaaagcagcggcctgtactctctgagcagcgtggtcacagtgcctagctctagcctgggcacccagacctacatctgcaatgtgaaccacaagcctagcaacaccaaggtggacaagagagtggaacccaagagctgtatccccgaggacacattcttcccaagccccgagagcagctgcgacgtgaagctggtggaaaagagcttcgagacagacaccaacctgaacttccagaacctgagcgtgatcggcttcagaatcctgctgctgaaagtggccggctttaacctgctgatgaccctgcggctgtggtccagc

SEQ ID NO: 7006 - DNA, 1356 bp, Artificial Sequence
  Synthetic Polynucloetide
atggccttaccagtgaccgccttgctcctgccgctggccttgctgctccacgccgccaggccggaagtgcagctgcttgaaagtggcggcggactgattcagcctggcggatctctgagactgagctgtgccgccagcggcttcaccttttctagccacgccatgacctgggtccgacaggcacctggaaaagggcttgaatgggtgtccgccatcagcggctctggcgattacacacactacgccgacagcgtgaagggcagattcaccatcagcagagacaacagcaagaacaccgtgtacctccagatgaacagcctgagagccgaggacagcgccgtgtattattgcgccaaggatgaggatggcggcagcctgcttggacacagaggacaaggcaccctggtcaccgtttcttccctcgagagcggcggaggcggatctttcgaagtgcagctggttgaatctggcggaggactggttcagcctggcggatctctgagactgtcttgtgccgccagcggcttcagcttcagcgacttttggatgagctgggtccgacaggcccctggcaaaggacttgaatgggtcgccacaatcagccaggccggcagcgagaaggactacgtggactctgtgaagggcagattcaccatcagccgggacaacgccaagaagtccctgtacctccagatgaacagcctgagagccgaggacaccgccgtgtactattgtgcctctggcgtgtacagcttcgactacagaggccagggcaccctggtcacagtctcttctacgcgtgacggtaacgaggagatgggaggaatcactcaaaccccttacaaagtctcaatttcaggaacaactgttatccttacatgtccccagtatcctggcagcgagatcctttggcagcataacgacaagaatatagggggagatgaagacgataagaatatcggatctgacgaggatcacttgagcctgaaagagttctccgagcttgaacaaagcggatattatgtgtgctatccgcgcgggtcaaagccggaagacgctaacttttacctttatctccgagccagagtgtgcgaaaattgcatggaaatggacgttatgtccgttgctacaatagttatcgtagatatatgcatcacgggtggactgcttctgctggtttattattggtccaagaatagaaaggccaaagctaaacccgtgaccagaggcgctggcgcaggcggaaggcaaaggggacaaaacaaagaacggccaccaccagtgccaaatccagattatgagcctattcggaaaggacagagggacctgtactctggcctgaatcagagaagaatc

SEQ ID NO: 7007 - DNA, 1251 bp, Artificial Sequence
  Synthetic Polynucloetide
atggccttaccagtgaccgccttgctcctgccgctggccttgctgctccacgccgccaggccggaagtgcagctgcttgaaagtggcggcggactgattcagcctggcggatctctgagactgagctgtgccgccagcggcttcaccttttctagccacgccatgacctgggtccgacaggcacctggaaaagggcttgaatgggtgtccgccatcagcggctctggcgattacacacactacgccgacagcgtgaagggcagattcaccatcagcagagacaacagcaagaacaccgtgtacctccagatgaacagcctgagagccgaggacagcgccgtgtattattgcgccaaggatgaggatggcggcagcctgcttggacacagaggacaaggcaccctggtcaccgtttcttccctcgagagcggcggaggcggatctttcgaagtgcagctggttgaatctggcggaggactggttcagcctggcggatctctgagactgtcttgtgccgccagcggcttcagcttcagcgacttttggatgagctgggtccgacaggcccctggcaaaggacttgaatgggtcgccacaatcagccaggccggcagcgagaaggactacgtggactctgtgaagggcagattcaccatcagccgggacaacgccaagaagtccctgtacctccagatgaacagcctgagagccgaggacaccgccgtgtactattgtgcctctggcgtgtacagcttcgactacagaggccagggcaccctggtcacagtctcttctacgcgtttcaagatccccatcgaggaactggaagatcgggtgttcgtgaactgcaacacctctatcacctgggtggaaggcaccgtgggaacactgctgagcgacatcaccagactggacctcggcaagcggattctggaccctcggggcatctacagatgcaacggcaccgacatctacaaggacaaagaaagcaccgtgcaggtccactacagaatgtgccagtcctgcgtggaactggaccctgctacagtggccggcatcatcgtgaccgatgtgatcgctactctgctgctggctctgggagtgttctgcttcgccggacacgaaacaggcagactgtctggcgctgccgatacacaggccctgctgagaaacgaccaagtgtatcagcccctgcgcgacagagatgatgcccagtattctcacctcggcggcaactgggctagaaacaag

SEQ ID NO: 7008 - DNA, 1281 bp, Artificial Sequence
  Synthetic Polynucloetide
atggccttaccagtgaccgccttgctcctgccgctggccttgctgctccacgccgccaggccggaagtgcagctgcttgaaagtggcggcggactgattcagcctggcggatctctgagactgagctgtgccgccagcggcttcaccttttctagccacgccatgacctgggtccgacaggcacctggaaaagggcttgaatgggtgtccgccatcagcggctctggcgattacacacactacgccgacagcgtgaagggcagattcaccatcagcagagacaacagcaagaacaccgtgtacctccagatgaacagcctgagagccgaggacagcgccgtgtattattgcgccaaggatgaggatggcggcagcctgcttggacacagaggacaaggcaccctggtcaccgtttcttccctcgagagcggcggaggcggatctttcgaagtgcagctggttgaatctggcggaggactggttcagcctggcggatctctgagactgtcttgtgccgccagcggcttcagcttcagcgacttttggatgagctgggtccgacaggcccctggcaaaggacttgaatgggtcgccacaatcagccaggccggcagcgagaaggactacgtggactctgtgaagggcagattcaccatcagccgggacaacgccaagaagtccctgtacctccagatgaacagcctgagagccgaggacaccgccgtgtactattgtgcctctggcgtgtacagcttcgactacagaggccagggcaccctggtcacagtctcttctacgcgtcagagcatcaagggcaaccacctggtcaaggtgtacgactaccaagaggacggcagcgtgctgctgacatgtgatgccgaggccaagaacatcacctggtttaaggacggcaagatgatcggcttcctgaccgaggacaagaagaagtggaacctgggcagcaacgctaaggaccccagaggcatgtatcagtgcaagggcagccagaacaagagcaagcccctccaggtgtactaccggatgtgccagaactgcatcgagctgaacgccgctaccatcagcggctttctgttcgccgagatcgtgtccatcttcgtgctggccgtgggcgtgtactttatcgctggacaggatggcgtgcggcagagcagagcttccgataagcaaaccctgctgcctaacgaccagctgtaccagcctctgaaggacagagaggacgaccagtacagccacctccagggcaatcagctgagaagaaac

SEQ ID NO: 7009 - DNA, 1230 bp, Artificial Sequence
  Synthetic Polynucloetide
atggccttaccagtgaccgccttgctcctgccgctggccttgctgctccacgccgccaggccggaagtgcagctgcttgaaagtggcggcggactgattcagcctggcggatctctgagactgagctgtgccgccagcggcttcaccttttctagccacgccatgacctgggtccgacaggcacctggaaaagggcttgaatgggtgtccgccatcagcggctctggcgattacacacactacgccgacagcgtgaagggcagattcaccatcagcagagacaacagcaagaacaccgtgtacctccagatgaacagcctgagagccgaggacagcgccgtgtattattgcgccaaggatgaggatggcggcagcctgcttggacacagaggacaaggcaccctggtcaccgtttcttccctcgagagcggcggaggcggatctttcgaagtgcagctggttgaatctggcggaggactggttcagcctggcggatctctgagactgtcttgtgccgccagcggcttcagcttcagcgacttttggatgagctgggtccgacaggcccctggcaaaggacttgaatgggtcgccacaatcagccaggccggcagcgagaaggactacgtggactctgtgaagggcagattcaccatcagccgggacaacgccaagaagtccctgtacctccagatgaacagcctgagagccgaggacaccgccgtgtactattgtgcctctggcgtgtacagcttcgactacagaggccagggcaccctggtcacagtctcttctacgcgtcagagttttgggttgttggaccctaaattgtgctatctgttggacggaatcctgttcatttacggagtgatcctgaccgcattgttcctgcgggttaagttttccagatccgcagacgcacccgcttaccaacaagggcagaaccaactctacaatgaacttaatttggggcggagggaagagtacgacgttctggacaaaaggaggggacgagatcccgagatgggcggaaagcctcagcgaaggaagaatccgcaagaggggctttataacgaactccagaaagataaaatggcagaagcctatagtgagattgggatgaagggagaaaggaggaggggtaaaggtcacgatgggttgtaccaaggattgagcacagccactaaagatacctatgatgcgctccacatgcaggccctgccgccaaga

SEQ ID NO: 7010 - DNA, 1359 bp, Artificial Sequence
  Synthetic Polynucloetide
atggccttaccagtgaccgccttgctcctgccgctggccttgctgctccacgccgccaggccggaagtgcagctggttgaatctggcggaggactggttcagcctggcggatctctgagactgtcttgtgccgccagcggcttcagcttcagcgacttttggatgagctgggtccgacaggcccctggcaaaggacttgaatgggtcgccacaatcagccaggccggcagcgagaaggactacgtggactctgtgaagggcagattcaccatcagccgggacaacgccaagaagtccctgtacctccagatgaacagcctgagagccgaggacaccgccgtgtactattgtgcctctggcgtgtacagcttcgactacagaggccagggcaccctggtcacagtctcttctctcgagagcggcggaggcggatctttcgaagaagtgcagctgcttgaaagtggcggcggactgattcagcctggcggatctctgagactgagctgtgccgccagcggcttcaccttttctagccacgccatgacctgggtccgacaggcacctggaaaagggcttgaatgggtgtccgccatcagcggctctggcgattacacacactacgccgacagcgtgaagggcagattcaccatcagcagagacaacagcaagaacaccgtgtacctccagatgaacagcctgagagccgaggacagcgccgtgtattattgcgccaaggatgaggatggcggcagcctgcttggacacagaggacaaggcaccctggtcaccgtttcttccacgcgtgacggtaacgaggagatgggaggaatcactcaaaccccttacaaagtctcaatttcaggaacaactgttatccttacatgtccccagtatcctggcagcgagatcctttggcagcataacgacaagaatatagggggagatgaagacgataagaatatcggatctgacgaggatcacttgagcctgaaagagttctccgagcttgaacaaagcggatattatgtgtgctatccgcgcgggtcaaagccggaagacgctaacttttacctttatctccgagccagagtgtgcgaaaattgcatggaaatggacgttatgtccgttgctacaatagttatcgtagatatatgcatcacgggtggactgcttctgctggtttattattggtccaagaatagaaaggccaaagctaaacccgtgaccagaggcgctggcgcaggcggaaggcaaaggggacaaaacaaagaacggccaccaccagtgccaaatccagattatgagcctattcggaaaggacagagggacctgtactctggcctgaatcagagaagaatc

SEQ ID NO: 7011 - DNA, 1254 bp, Artificial Sequence
  Synthetic Polynucloetide
atggccttaccagtgaccgccttgctcctgccgctggccttgctgctccacgccgccaggccggaagtgcagctggttgaatctggcggaggactggttcagcctggcggatctctgagactgtcttgtgccgccagcggcttcagcttcagcgacttttggatgagctgggtccgacaggcccctggcaaaggacttgaatgggtcgccacaatcagccaggccggcagcgagaaggactacgtggactctgtgaagggcagattcaccatcagccgggacaacgccaagaagtccctgtacctccagatgaacagcctgagagccgaggacaccgccgtgtactattgtgcctctggcgtgtacagcttcgactacagaggccagggcaccctggtcacagtctcttctctcgagagcggcggaggcggatctttcgaagaagtgcagctgcttgaaagtggcggcggactgattcagcctggcggatctctgagactgagctgtgccgccagcggcttcaccttttctagccacgccatgacctgggtccgacaggcacctggaaaagggcttgaatgggtgtccgccatcagcggctctggcgattacacacactacgccgacagcgtgaagggcagattcaccatcagcagagacaacagcaagaacaccgtgtacctccagatgaacagcctgagagccgaggacagcgccgtgtattattgcgccaaggatgaggatggcggcagcctgcttggacacagaggacaaggcaccctggtcaccgtttcttccacgcgtttcaagatccccatcgaggaactggaagatcgggtgttcgtgaactgcaacacctctatcacctgggtggaaggcaccgtgggaacactgctgagcgacatcaccagactggacctcggcaagcggattctggaccctcggggcatctacagatgcaacggcaccgacatctacaaggacaaagaaagcaccgtgcaggtccactacagaatgtgccagtcctgcgtggaactggaccctgctacagtggccggcatcatcgtgaccgatgtgatcgctactctgctgctggctctgggagtgttctgcttcgccggacacgaaacaggcagactgtctggcgctgccgatacacaggccctgctgagaaacgaccaagtgtatcagcccctgcgcgacagagatgatgcccagtattctcacctcggcggcaactgggctagaaacaag

SEQ ID NO: 7012 - DNA, 1284 bp, Artificial Sequence
  Synthetic Polynucloetide
atggccttaccagtgaccgccttgctcctgccgctggccttgctgctccacgccgccaggccggaagtgcagctggttgaatctggcggaggactggttcagcctggcggatctctgagactgtcttgtgccgccagcggcttcagcttcagcgacttttggatgagctgggtccgacaggcccctggcaaaggacttgaatgggtcgccacaatcagccaggccggcagcgagaaggactacgtggactctgtgaagggcagattcaccatcagccgggacaacgccaagaagtccctgtacctccagatgaacagcctgagagccgaggacaccgccgtgtactattgtgcctctggcgtgtacagcttcgactacagaggccagggcaccctggtcacagtctcttctctcgagagcggcggaggcggatctttcgaagaagtgcagctgcttgaaagtggcggcggactgattcagcctggcggatctctgagactgagctgtgccgccagcggcttcaccttttctagccacgccatgacctgggtccgacaggcacctggaaaagggcttgaatgggtgtccgccatcagcggctctggcgattacacacactacgccgacagcgtgaagggcagattcaccatcagcagagacaacagcaagaacaccgtgtacctccagatgaacagcctgagagccgaggacagcgccgtgtattattgcgccaaggatgaggatggcggcagcctgcttggacacagaggacaaggcaccctggtcaccgtttcttccacgcgtcagagcatcaagggcaaccacctggtcaaggtgtacgactaccaagaggacggcagcgtgctgctgacatgtgatgccgaggccaagaacatcacctggtttaaggacggcaagatgatcggcttcctgaccgaggacaagaagaagtggaacctgggcagcaacgctaaggaccccagaggcatgtatcagtgcaagggcagccagaacaagagcaagcccctccaggtgtactaccggatgtgccagaactgcatcgagctgaacgccgctaccatcagcggctttctgttcgccgagatcgtgtccatcttcgtgctggccgtgggcgtgtactttatcgctggacaggatggcgtgcggcagagcagagcttccgataagcaaaccctgctgcctaacgaccagctgtaccagcctctgaaggacagagaggacgaccagtacagccacctccagggcaatcagctgagaagaaac

SEQ ID NO: 7013 - DNA, 1233 bp, Artificial Sequence
  Synthetic Polynucloetide
atggccttaccagtgaccgccttgctcctgccgctggccttgctgctccacgccgccaggccggaagtgcagctggttgaatctggcggaggactggttcagcctggcggatctctgagactgtcttgtgccgccagcggcttcagcttcagcgacttttggatgagctgggtccgacaggcccctggcaaaggacttgaatgggtcgccacaatcagccaggccggcagcgagaaggactacgtggactctgtgaagggcagattcaccatcagccgggacaacgccaagaagtccctgtacctccagatgaacagcctgagagccgaggacaccgccgtgtactattgtgcctctggcgtgtacagcttcgactacagaggccagggcaccctggtcacagtctcttctctcgagagcggcggaggcggatctttcgaagaagtgcagctgcttgaaagtggcggcggactgattcagcctggcggatctctgagactgagctgtgccgccagcggcttcaccttttctagccacgccatgacctgggtccgacaggcacctggaaaagggcttgaatgggtgtccgccatcagcggctctggcgattacacacactacgccgacagcgtgaagggcagattcaccatcagcagagacaacagcaagaacaccgtgtacctccagatgaacagcctgagagccgaggacagcgccgtgtattattgcgccaaggatgaggatggcggcagcctgcttggacacagaggacaaggcaccctggtcaccgtttcttccacgcgtcagagttttgggttgttggaccctaaattgtgctatctgttggacggaatcctgttcatttacggagtgatcctgaccgcattgttcctgcgggttaagttttccagatccgcagacgcacccgcttaccaacaagggcagaaccaactctacaatgaacttaatttggggcggagggaagagtacgacgttctggacaaaaggaggggacgagatcccgagatgggcggaaagcctcagcgaaggaagaatccgcaagaggggctttataacgaactccagaaagataaaatggcagaagcctatagtgagattgggatgaagggagaaaggaggaggggtaaaggtcacgatgggttgtaccaaggattgagcacagccactaaagatacctatgatgcgctccacatgcaggccctgccgccaaga

SEQ ID NO: 7014 - DNA, 1932 bp, Artificial Sequence
  Synthetic Polynucloetide
atggccttaccagtgaccgccttgctcctgccgctggccttgctgctccacgccgccaggccggaagtgcagctgcttgaaagtggcggcggactgattcagcctggcggatctctgagactgagctgtgccgccagcggcttcaccttttctagccacgccatgacctgggtccgacaggcacctggaaaagggcttgaatgggtgtccgccatcagcggctctggcgattacacacactacgccgacagcgtgaagggcagattcaccatcagcagagacaacagcaagaacaccgtgtacctccagatgaacagcctgagagccgaggacagcgccgtgtattattgcgccaaggatgaggatggcggcagcctgcttggacacagaggacaaggcaccctggtcaccgtttcttccctcgagagcggcggaggcggatctttcgaagtgcagctggttgaatctggcggaggactggttcagcctggcggatctctgagactgtcttgtgccgccagcggcttcagcttcagcgacttttggatgagctgggtccgacaggcccctggcaaaggacttgaatgggtcgccacaatcagccaggccggcagcgagaaggactacgtggactctgtgaagggcagattcaccatcagccgggacaacgccaagaagtccctgtacctccagatgaacagcctgagagccgaggacaccgccgtgtactattgtgcctctggcgtgtacagcttcgactacagaggccagggcaccctggtcacagtctcttctacgcgtgggagcggcatccagaaccctgatcctgccgtgtaccagctgcgggatagcaagagcagcgacaagagcgtgtgtctgttcaccgacttcgacagccagaccaacgtgtcccagagcaaggactccgacgtgtacatcaccgataagaccgtgctggacatgcggagcatggacttcaagagcaactccgccgtggcctggtccaacaagtccgatttcgcctgcgccaacgccttcaacaacagcattatccccgaggacacattcttcccaagccccgagagcagctgcgacgtgaagctggtggaaaagagcttcgagacagacaccaacctgaacttccagaacctgagcgtgatcggcttcagaatcctgctgctgaaagtggccggctttaacctgctgatgaccctgcggctgtggtccagccgcgccaagagaagcggatctggcgtgaagcagaccctgaatttcgacctgctgaagctggctggcgacgtggaatccaacccaggcccttctagaggccatatgaccgagtacaagcccacggtgcgcctcgccacccgcgacgacgtccccagggccgtacgcaccctcgccgccgcgttcgccgactaccccgccacgcgccacaccgtcgatccggaccgccacatcgagcgggtcaccgagctgcaagaactcttcctcacgcgcgtcgggctcgacatcggcaaggtgtgggtcgcggacgacggcgccgcggtggcggtctggaccacgccggagagcgtcgaagcgggggcggtgttcgccgagatcggcccgcgcatggccgagttgagcggttcccggctggccgcgcagcaacagatggaaggcctcctggcgccgcaccggcccaaggagcccgcgtggttcctggccaccgtcggcgtctcgcccgaccaccagggcaagggtctgggcagcgccgtcgtgctccccggagtggaggcggccgagcgcgccggggtgcccgccttcctggagacctccgcgccccgcaacctccccttctacgagcggctcggcttcaccgtcaccgccgacgtcgaggtgcccgaaggaccgcgcacctggtgcatgacccgcaagcccggtgcctga

SEQ ID NO: 7015 - DNA, 2028 bp, Artificial Sequence
  Synthetic Polynucloetide
atggccttaccagtgaccgccttgctcctgccgctggccttgctgctccacgccgccaggccggaagtgcagctgcttgaaagtggcggcggactgattcagcctggcggatctctgagactgagctgtgccgccagcggcttcaccttttctagccacgccatgacctgggtccgacaggcacctggaaaagggcttgaatgggtgtccgccatcagcggctctggcgattacacacactacgccgacagcgtgaagggcagattcaccatcagcagagacaacagcaagaacaccgtgtacctccagatgaacagcctgagagccgaggacagcgccgtgtattattgcgccaaggatgaggatggcggcagcctgcttggacacagaggacaaggcaccctggtcaccgtttcttccctcgagagcggcggaggcggatctttcgaagtgcagctggttgaatctggcggaggactggttcagcctggcggatctctgagactgtcttgtgccgccagcggcttcagcttcagcgacttttggatgagctgggtccgacaggcccctggcaaaggacttgaatgggtcgccacaatcagccaggccggcagcgagaaggactacgtggactctgtgaagggcagattcaccatcagccgggacaacgccaagaagtccctgtacctccagatgaacagcctgagagccgaggacaccgccgtgtactattgtgcctctggcgtgtacagcttcgactacagaggccagggcaccctggtcacagtctcttctctcgaggacctgaagaacgtgttcccacctgaggtggccgtgttcgagcctagcgaggccgagatcagccacacccagaaagccaccctcgtgtgcctggctaccggcttctaccccgaccatgtggaactgtcttggtgggtcaacggcaaagaggtgcacagcggcgtgtctaccgacccccagccactgaaagaacagcccgccctgaacgacagccggtactgcctgagcagcagactgagagtgtccgccaccttctggcagaacccccggaaccacttcagatgccaggtgcagttctacggcctgagcgagaacgacgagtggacccaggacagagccaagcccgtgacccagatcgtgtctgccgaagcctggggcagagccgattgcggctttaccagcgagagctaccagcagggcgtgctgagcgccaccatcctgtacgagatcctgctgggcaaggccaccctgtacgccgtgctggtgtctgccctggtgctgatggctatggtcaagcggaaggacagccggggaagggccaagcgatctggatctggagcaacaaacttctcactactcaaacaagcaggtgacgtggaggagaatcccgggcctactagaggccatatgaccgagtacaagcccacggtgcgcctcgccacccgcgacgacgtccccagggccgtacgcaccctcgccgccgcgttcgccgactaccccgccacgcgccacaccgtcgatccggaccgccacatcgagcgggtcaccgagctgcaagaactcttcctcacgcgcgtcgggctcgacatcggcaaggtgtgggtcgcggacgacggcgccgcggtggcggtctggaccacgccggagagcgtcgaagcgggggcggtgttcgccgagatcggcccgcgcatggccgagttgagcggttcccggctggccgcgcagcaacagatggaaggcctcctggcgccgcaccggcccaaggagcccgcgtggttcctggccaccgtcggcgtctcgcccgaccaccagggcaagggtctgggcagcgccgtcgtgctccccggagtggaggcggccgagcgcgccggggtgcccgccttcctggagacctccgcgccccgcaacctccccttctacgagcggctcggcttcaccgtcaccgccgacgtcgaggtgcccgaaggaccgcgcacctggtgcatgacccgcaagcccggtgcctga

SEQ ID NO: 7016 - DNA, 2178 bp, Artificial Sequence
  Synthetic Polynucloetide
atggccttaccagtgaccgccttgctcctgccgctggccttgctgctccacgccgccaggccggaagtgcagctgcttgaaagtggcggcggactgattcagcctggcggatctctgagactgagctgtgccgccagcggcttcaccttttctagccacgccatgacctgggtccgacaggcacctggaaaagggcttgaatgggtgtccgccatcagcggctctggcgattacacacactacgccgacagcgtgaagggcagattcaccatcagcagagacaacagcaagaacaccgtgtacctccagatgaacagcctgagagccgaggacagcgccgtgtattattgcgccaaggatgaggatggcggcagcctgcttggacacagaggacaaggcaccctggtcaccgtttcttccctcgagagcggcggaggcggatctttcgaagtgcagctggttgaatctggcggaggactggttcagcctggcggatctctgagactgtcttgtgccgccagcggcttcagcttcagcgacttttggatgagctgggtccgacaggcccctggcaaaggacttgaatgggtcgccacaatcagccaggccggcagcgagaaggactacgtggactctgtgaagggcagattcaccatcagccgggacaacgccaagaagtccctgtacctccagatgaacagcctgagagccgaggacaccgccgtgtactattgtgcctctggcgtgtacagcttcgactacagaggccagggcaccctggtcacagtctcttctacgcgtgagcagaaactgatctcggaagaggatctggggagcggcaccccattcccttctctggcccctcccatcatgctgctggtggacggcaagcagcagatggtggtcgtgtgcctggtgctggatgtggccccacctggactggacagccccatctggtttagcgccggcaatggctctgccctggacgcctttacctacggcccaagccctgccaccgatggcacctggacaaatctggcccacctgagcctgcccagcgaggaactggcttcttgggagcctctcgtgtgccacacaggacctggcgctgagggacacagcagatccacccagcctatgcacctgtctggcgaggccagcaccgccagaacctgtcctcaggaacctctgagaggcacccctggcggagcactgtggctgggagtgctgagactgctgctgttcaagctgctgctgtttgacctgctgctgacctgctcctgtctgtgcgatcctgccggccctctgccttctcctgccaccaccacaagactgagagccctgggcagccacagactgcaccctgccacagagacaggcggcagagaggccacaagcagccctagaccccagcccagagacagaagatggggcgataccccccctggcagaaagcctggatctccagtccgcgccaagagaagcggatctggcgtgaagcagaccctgaatttcgacctgctgaagctggctggcgacgtggaatccaacccaggcccttctagatctagaggccatatgaccgagtacaagcccacggtgcgcctcgccacccgcgacgacgtccccagggccgtacgcaccctcgccgccgcgttcgccgactaccccgccacgcgccacaccgtcgatccggaccgccacatcgagcgggtcaccgagctgcaagaactcttcctcacgcgcgtcgggctcgacatcggcaaggtgtgggtcgcggacgacggcgccgcggtggcggtctggaccacgccggagagcgtcgaagcgggggcggtgttcgccgagatcggcccgcgcatggccgagttgagcggttcccggctggccgcgcagcaacagatggaaggcctcctggcgccgcaccggcccaaggagcccgcgtggttcctggccaccgtcggcgtctcgcccgaccaccagggcaagggtctgggcagcgccgtcgtgctccccggagtggaggcggccgagcgcgccggggtgcccgccttcctggagacctccgcgccccgcaacctccccttctacgagcggctcggcttcaccgtcaccgccgacgtcgaggtgcccgaaggaccgcgcacctggtgcatgacccgcaagcccggtgcctga

SEQ ID NO: 7017 - DNA, 1653 bp, Artificial Sequence
  Synthetic Polynucloetide
atggccttaccagtgaccgccttgctcctgccgctggccttgctgctccacgccgccaggccggaagtgcagctgcttgaaagtggcggcggactgattcagcctggcggatctctgagactgagctgtgccgccagcggcttcaccttttctagccacgccatgacctgggtccgacaggcacctggaaaagggcttgaatgggtgtccgccatcagcggctctggcgattacacacactacgccgacagcgtgaagggcagattcaccatcagcagagacaacagcaagaacaccgtgtacctccagatgaacagcctgagagccgaggacagcgccgtgtattattgcgccaaggatgaggatggcggcagcctgcttggacacagaggacaaggcaccctggtcaccgtttcttccctcgaggacctgaagaacgtgttcccacctgaggtggccgtgttcgagcctagcgaggccgagatcagccacacccagaaagccaccctcgtgtgcctggctaccggcttctaccccgaccatgtggaactgtcttggtgggtcaacggcaaagaggtgcacagcggcgtgtctaccgacccccagccactgaaagaacagcccgccctgaacgacagccggtactgcctgagcagcagactgagagtgtccgccaccttctggcagaacccccggaaccacttcagatgccaggtgcagttctacggcctgagcgagaacgacgagtggacccaggacagagccaagcccgtgacccagatcgtgtctgccgaagcctggggcagagccgattgcggctttaccagcgagagctaccagcagggcgtgctgagcgccaccatcctgtacgagatcctgctgggcaaggccaccctgtacgccgtgctggtgtctgccctggtgctgatggctatggtcaagcggaaggacagccggggaagggccaagcgatctggatctggagcaacaaacttctcactactcaaacaagcaggtgacgtggaggagaatcccgggcctactagaggccatatgaccgagtacaagcccacggtgcgcctcgccacccgcgacgacgtccccagggccgtacgcaccctcgccgccgcgttcgccgactaccccgccacgcgccacaccgtcgatccggaccgccacatcgagcgggtcaccgagctgcaagaactcttcctcacgcgcgtcgggctcgacatcggcaaggtgtgggtcgcggacgacggcgccgcggtggcggtctggaccacgccggagagcgtcgaagcgggggcggtgttcgccgagatcggcccgcgcatggccgagttgagcggttcccggctggccgcgcagcaacagatggaaggcctcctggcgccgcaccggcccaaggagcccgcgtggttcctggccaccgtcggcgtctcgcccgaccaccagggcaagggtctgggcagcgccgtcgtgctccccggagtggaggcggccgagcgcgccggggtgcccgccttcctggagacctccgcgccccgcaacctccccttctacgagcggctcggcttcaccgtcaccgccgacgtcgaggtgcccgaaggaccgcgcacctggtgcatgacccgcaagcccggtgcctga

SEQ ID NO: 7018 - DNA, 960 bp, Artificial Sequence
  Synthetic Polynucloetide
atggccttaccagtgaccgccttgctcctgccgctggccttgctgctccacgccgccaggccggaagtgcagctgcttgaaagtggcggcggactgattcagcctggcggatctctgagactgagctgtgccgccagcggcttcaccttttctagccacgccatgacctgggtccgacaggcacctggaaaagggcttgaatgggtgtccgccatcagcggctctggcgattacacacactacgccgacagcgtgaagggcagattcaccatcagcagagacaacagcaagaacaccgtgtacctccagatgaacagcctgagagccgaggacagcgccgtgtattattgcgccaaggatgaggatggcggcagcctgcttggacacagaggacaaggcaccctggtcaccgtttcttccctcgaggacctgaagaacgtgttcccacctgaggtggccgtgttcgagcctagcgaggccgagatcagccacacccagaaagccaccctcgtgtgcctggctaccggcttctaccccgaccatgtggaactgtcttggtgggtcaacggcaaagaggtgcacagcggcgtgtctaccgacccccagccactgaaagaacagcccgccctgaacgacagccggtactgcctgagcagcagactgagagtgtccgccaccttctggcagaacccccggaaccacttcagatgccaggtgcagttctacggcctgagcgagaacgacgagtggacccaggacagagccaagcccgtgacccagatcgtgtctgccgaagcctggggcagagccgattgcggctttaccagcgagagctaccagcagggcgtgctgagcgccaccatcctgtacgagatcctgctgggcaaggccaccctgtacgccgtgctggtgtctgccctggtgctgatggctatggtcaagcggaaggacagccgggga

SEQ ID NO: 7019 - DNA, 1335 bp, Artificial Sequence; identical to SEQ ID NO: 6654
  Synthetic Polynucloetide

SEQ ID NO: 7020 - DNA, 834 bp, Artificial Sequence; identical to SEQ ID NO: 6655
  Synthetic Polynucloetide

SEQ ID NO: 7021 - DNA, 1707 bp, Artificial Sequence
  Synthetic Polynucloetide
atggccttaccagtgaccgccttgctcctgccgctggccttgctgctccacgccgccaggccggaagtgcagctgcttgaaagtggcggcggactgattcagcctggcggatctctgagactgagctgtgccgccagcggcttcaccttttctagccacgccatgacctgggtccgacaggcacctggaaaagggcttgaatgggtgtccgccatcagcggctctggcgattacacacactacgccgacagcgtgaagggcagattcaccatcagcagagacaacagcaagaacaccgtgtacctccagatgaacagcctgagagccgaggacagcgccgtgtattattgcgccaaggatgaggatggcggcagcctgcttggacacagaggacaaggcaccctggtcaccgtttcttccctcgaggggaaaccaattcccaaccctcttctgggactggattcaaccggcagcggcgaggacctgaagaacgtgttcccacctgaggtggccgtgttcgagcctagcgaggccgagatcagccacacccagaaagccaccctcgtgtgcctggctaccggcttctaccccgaccatgtggaactgtcttggtgggtcaacggcaaagaggtgcacagcggcgtgtgtaccgacccccagccactgaaagaacagcccgccctgaacgacagccggtactgcctgagcagcagactgagagtgtccgccaccttctggcagaacccccggaaccacttcagatgccaggtgcagttctacggcctgagcgagaacgacgagtggacccaggacagagccaagcccgtgacccagatcgtgtctgccgaagcctggggcagagccgattgcggctttaccagcgagagctaccagcagggcgtgctgagcgccaccatcctgtacgagatcctgctgggcaaggccaccctgtacgccgtgctggtgtctgccctggtgctgatggctatggtcaagcggaaggacagccggggaagggccaagcgatctggatctggagcaacaaacttctcactactcaaacaagcaggtgacgtggaggagaatcccgggcctactagaggccatatgaccgagtacaagcccacggtgcgcctcgccacccgcgacgacgtccccagggccgtacgcaccctcgccgccgcgttcgccgactaccccgccacgcgccacaccgtcgatccggaccgccacatcgagcgggtcaccgagctgcaagaactcttcctcacgcgcgtcgggctcgacatcggcaaggtgtgggtcgcggacgacggcgccgcggtggcggtctggaccacgccggagagcgtcgaagcgggggcggtgttcgccgagatcggcccgcgcatggccgagttgagcggttcccggctggccgcgcagcaacagatggaaggcctcctggcgccgcaccggcccaaggagcccgcgtggttcctggccaccgtcggcgtctcgcccgaccaccagggcaagggtctgggcagcgccgtcgtgctccccggagtggaggcggccgagcgcgccggggtgcccgccttcctggagacctccgcgccccgcaacctccccttctacgagcggctcggcttcaccgtcaccgccgacgtcgaggtgcccgaaggaccgcgcacctggtgcatgacccgcaagcccggtgcctga

SEQ ID NO: 7022 - DNA, 1017 bp, Artificial Sequence
  Synthetic Polynucloetide
atggccttaccagtgaccgccttgctcctgccgctggccttgctgctccacgccgccaggccggaagtgcagctgcttgaaagtggcggcggactgattcagcctggcggatctctgagactgagctgtgccgccagcggcttcaccttttctagccacgccatgacctgggtccgacaggcacctggaaaagggcttgaatgggtgtccgccatcagcggctctggcgattacacacactacgccgacagcgtgaagggcagattcaccatcagcagagacaacagcaagaacaccgtgtacctccagatgaacagcctgagagccgaggacagcgccgtgtattattgcgccaaggatgaggatggcggcagcctgcttggacacagaggacaaggcaccctggtcaccgtttcttccctcgaggggaaaccaattcccaaccctcttctgggactggattcaaccggcagcggcgaggacctgaagaacgtgttcccacctgaggtggccgtgttcgagcctagcgaggccgagatcagccacacccagaaagccaccctcgtgtgcctggctaccggcttctaccccgaccatgtggaactgtcttggtgggtcaacggcaaagaggtgcacagcggcgtgtgtaccgacccccagccactgaaagaacagcccgccctgaacgacagccggtactgcctgagcagcagactgagagtgtccgccaccttctggcagaacccccggaaccacttcagatgccaggtgcagttctacggcctgagcgagaacgacgagtggacccaggacagagccaagcccgtgacccagatcgtgtctgccgaagcctggggcagagccgattgcggctttaccagcgagagctaccagcagggcgtgctgagcgccaccatcctgtacgagatcctgctgggcaaggccaccctgtacgccgtgctggtgtctgccctggtgctgatggctatggtcaagcggaaggacagccggggatga

SEQ ID NO: 7023 - DNA, 1371 bp, Artificial Sequence; identical to SEQ ID NO: 6658
  Synthetic Polynucloetide

SEQ ID NO: 7024 - DNA, 873 bp, Artificial Sequence; identical to SEQ ID NO: 6659
  Synthetic Polynucloetide

SEQ ID NO: 7025 - DNA, 1932 bp, Artificial Sequence
  Synthetic Polynucloetide
atggccttaccagtgaccgccttgctcctgccgctggccttgctgctccacgccgccaggccggaagtgcagctgcttgaaagtggcggcggactgattcagcctggcggatctctgagactgagctgtgccgccagcggcttcaccttttctagccacgccatgacctgggtccgacaggcacctggaaaagggcttgaatgggtgtccgccatcagcggctctggcgattacacacactacgccgacagcgtgaagggcagattcaccatcagcagagacaacagcaagaacaccgtgtacctccagatgaacagcctgagagccgaggacagcgccgtgtattattgcgccaaggatgaggatggcggcagcctgcttggacacagaggacaaggcaccctggtcaccgtttcttccctcgagagcggcggaggcggatctttcgaagtgcagctggttgaatctggcggaggactggttcagcctggcggatctctgagactgtcttgtgccgccagcggcttcagcttcagcgacttttggatgagctgggtccgacaggcccctggcaaaggacttgaatgggtcgccacaatcagccaggccggcagcgagaaggactacgtggactctgtgaagggcagattcaccatcagccgggacaacgccaagaagtccctgtacctccagatgaacagcctgagagccgaggacaccgccgtgtactattgtgcctctggcgtgtacagcttcgactacagaggccagggcaccctggtcacagtctcttctacgcgtgggagcggcatccagaaccctgatcctgccgtgtaccagctgcgggatagcaagagcagcgacaagagcgtgtgtctgttcaccgacttcgacagccagaccaacgtgtcccagagcaaggactccgacgtgtacatcaccgataagaccgtgctggacatgcggagcatggacttcaagagcaactccgccgtggcctggtccaacaagtccgatttcgcctgcgccaacgccttcaacaacagcattatccccgaggacacattcttcccaagcagcgacgtgccctgcgacgtgaagctggtggaaaagagcttcgagacagacaccaacctgaacttccagaacctgagcgtgatcggcttcagaatcctgctgctgaaagtggccggctttaacctgctgatgaccctgcggctgtggtccagccgcgccaagagaagcggatctggcgtgaagcagaccctgaatttcgacctgctgaagctggctggcgacgtggaatccaacccaggcccttctagaggccatatgaccgagtacaagcccacggtgcgcctcgccacccgcgacgacgtccccagggccgtacgcaccctcgccgccgcgttcgccgactaccccgccacgcgccacaccgtcgatccggaccgccacatcgagcgggtcaccgagctgcaagaactcttcctcacgcgcgtcgggctcgacatcggcaaggtgtgggtcgcggacgacggcgccgcggtggcggtctggaccacgccggagagcgtcgaagcgggggcggtgttcgccgagatcggcccgcgcatggccgagttgagcggttcccggctggccgcgcagcaacagatggaaggcctcctggcgccgcaccggcccaaggagcccgcgtggttcctggccaccgtcggcgtctcgcccgaccaccagggcaagggtctgggcagcgccgtcgtgctccccggagtggaggcggccgagcgcgccggggtgcccgccttcctggagacctccgcgccccgcaacctccccttctacgagcggctcggcttcaccgtcaccgccgacgtcgaggtgcccgaaggaccgcgcacctggtgcatgacccgcaagcccggtgcctga

SEQ ID NO: 7026 - DNA, 2028 bp, Artificial Sequence
  Synthetic Polynucloetide
atggccttaccagtgaccgccttgctcctgccgctggccttgctgctccacgccgccaggccggaagtgcagctgcttgaaagtggcggcggactgattcagcctggcggatctctgagactgagctgtgccgccagcggcttcaccttttctagccacgccatgacctgggtccgacaggcacctggaaaagggcttgaatgggtgtccgccatcagcggctctggcgattacacacactacgccgacagcgtgaagggcagattcaccatcagcagagacaacagcaagaacaccgtgtacctccagatgaacagcctgagagccgaggacagcgccgtgtattattgcgccaaggatgaggatggcggcagcctgcttggacacagaggacaaggcaccctggtcaccgtttcttccctcgagagcggcggaggcggatctttcgaagtgcagctggttgaatctggcggaggactggttcagcctggcggatctctgagactgtcttgtgccgccagcggcttcagcttcagcgacttttggatgagctgggtccgacaggcccctggcaaaggacttgaatgggtcgccacaatcagccaggccggcagcgagaaggactacgtggactctgtgaagggcagattcaccatcagccgggacaacgccaagaagtccctgtacctccagatgaacagcctgagagccgaggacaccgccgtgtactattgtgcctctggcgtgtacagcttcgactacagaggccagggcaccctggtcacagtctcttctctcgaggacctgaagaacgtgttcccacctgaggtggccgtgttcgagcctagcaaggccgagatcgcccacacccagaaagccaccctcgtgtgcctggctaccggcttctaccccgaccatgtggaactgtcttggtgggtcaacggcaaagaggtgcacagcggcgtgtctaccgacccccagccactgaaagaacagcccgccctgaacgacagccggtactgcctgagcagcagactgagagtgtccgccaccttctggcagaacccccggaaccacttcagatgccaggtgcagttctacggcctgagcgagaacgacgagtggacccaggacagagccaagcccgtgacccagatcgtgtctgccgaagcctggggcagagccgattgcggcatcaccagcgccagctaccaccagggcgtgctgagcgccaccatcctgtacgagatcctgctgggcaaggccaccctgtacgccgtgctggtgtctgccctggtgctgatggctatggtcaagcggaaggacagccggggaagggccaagcgatctggatctggagcaacaaacttctcactactcaaacaagcaggtgacgtggaggagaatcccgggcctactagaggccatatgaccgagtacaagcccacggtgcgcctcgccacccgcgacgacgtccccagggccgtacgcaccctcgccgccgcgttcgccgactaccccgccacgcgccacaccgtcgatccggaccgccacatcgagcgggtcaccgagctgcaagaactcttcctcacgcgcgtcgggctcgacatcggcaaggtgtgggtcgcggacgacggcgccgcggtggcggtctggaccacgccggagagcgtcgaagcgggggcggtgttcgccgagatcggcccgcgcatggccgagttgagcggttcccggctggccgcgcagcaacagatggaaggcctcctggcgccgcaccggcccaaggagcccgcgtggttcctggccaccgtcggcgtctcgcccgaccaccagggcaagggtctgggcagcgccgtcgtgctccccggagtggaggcggccgagcgcgccggggtgcccgccttcctggagacctccgcgccccgcaacctccccttctacgagcggctcggcttcaccgtcaccgccgacgtcgaggtgcccgaaggaccgcgcacctggtgcatgacccgcaagcccggtgcctga

SEQ ID NO: 7027 - DNA, 2097 bp, Artificial Sequence
  Synthetic Polynucloetide
atggccttaccagtgaccgccttgctcctgccgctggccttgctgctccacgccgccaggccggaagtgcagctgcttgaaagtggcggcggactgattcagcctggcggatctctgagactgagctgtgccgccagcggcttcaccttttctagccacgccatgacctgggtccgacaggcacctggaaaagggcttgaatgggtgtccgccatcagcggctctggcgattacacacactacgccgacagcgtgaagggcagattcaccatcagcagagacaacagcaagaacaccgtgtacctccagatgaacagcctgagagccgaggacagcgccgtgtattattgcgccaaggatgaggatggcggcagcctgcttggacacagaggacaaggcaccctggtcaccgtttcttccctcgagagcggcggaggcggatctttcgaagtgcagctggttgaatctggcggaggactggttcagcctggcggatctctgagactgtcttgtgccgccagcggcttcagcttcagcgacttttggatgagctgggtccgacaggcccctggcaaaggacttgaatgggtcgccacaatcagccaggccggcagcgagaaggactacgtggactctgtgaagggcagattcaccatcagccgggacaacgccaagaagtccctgtacctccagatgaacagcctgagagccgaggacaccgccgtgtactattgtgcctctggcgtgtacagcttcgactacagaggccagggcaccctggtcacagtctcttctacgcgtgggtctggaggcggaggcagcggcggaggcgggagcggcgacggtaacgaggagatgggaggaatcactcaaaccccttacaaagtctcaatttcaggaacaactgttatccttacatgtccccagtatcctggcagcgagatcctttggcagcataacgacaagaatatagggggagatgaagacgataagaatatcggatctgacgaggatcacttgagcctgaaagagttctccgagcttgaacaaagcggatattatgtgtgctatccgcgcgggtcaaagccggaagacgctaacttttacctttatctccgagccagagtgtgcgaaaattgcatggaaatggacgttatgtccgttgctacaatagttatcgtagatatatgcatcacgggtggactgcttctgctggtttattattggtccaagaatagaaaggccaaagctaaacccgtgaccagaggcgctggcgcaggcggaaggcaaaggggacaaaacaaagaacggccaccaccagtgccaaatccagattatgagcctattcggaaaggacagagggacctgtactctggcctgaatcagagaagaatccgcgccaagagaagcggatctggcgtgaagcagaccctgaatttcgacctgctgaagctggctggcgacgtggaatccaacccaggcccttctagaggccatatgaccgagtacaagcccacggtgcgcctcgccacccgcgacgacgtccccagggccgtacgcaccctcgccgccgcgttcgccgactaccccgccacgcgccacaccgtcgatccggaccgccacatcgagcgggtcaccgagctgcaagaactcttcctcacgcgcgtcgggctcgacatcggcaaggtgtgggtcgcggacgacggcgccgcggtggcggtctggaccacgccggagagcgtcgaagcgggggcggtgttcgccgagatcggcccgcgcatggccgagttgagcggttcccggctggccgcgcagcaacagatggaaggcctcctggcgccgcaccggcccaaggagcccgcgtggttcctggccaccgtcggcgtctcgcccgaccaccagggcaagggtctgggcagcgccgtcgtgctccccggagtggaggcggccgagcgcgccggggtgcccgccttcctggagacctccgcgccccgcaacctccccttctacgagcggctcggcttcaccgtcaccgccgacgtcgaggtgcccgaaggaccgcgcacctggtgcatgacccgcaagcccggtgcctga

SEQ ID NO: 7028 - DNA, 1992 bp, Artificial Sequence
  Synthetic Polynucloetide
atggccttaccagtgaccgccttgctcctgccgctggccttgctgctccacgccgccaggccggaagtgcagctgcttgaaagtggcggcggactgattcagcctggcggatctctgagactgagctgtgccgccagcggcttcaccttttctagccacgccatgacctgggtccgacaggcacctggaaaagggcttgaatgggtgtccgccatcagcggctctggcgattacacacactacgccgacagcgtgaagggcagattcaccatcagcagagacaacagcaagaacaccgtgtacctccagatgaacagcctgagagccgaggacagcgccgtgtattattgcgccaaggatgaggatggcggcagcctgcttggacacagaggacaaggcaccctggtcaccgtttcttccctcgagagcggcggaggcggatctttcgaagtgcagctggttgaatctggcggaggactggttcagcctggcggatctctgagactgtcttgtgccgccagcggcttcagcttcagcgacttttggatgagctgggtccgacaggcccctggcaaaggacttgaatgggtcgccacaatcagccaggccggcagcgagaaggactacgtggactctgtgaagggcagattcaccatcagccgggacaacgccaagaagtccctgtacctccagatgaacagcctgagagccgaggacaccgccgtgtactattgtgcctctggcgtgtacagcttcgactacagaggccagggcaccctggtcacagtctcttctacgcgtgggtctggaggcggaggcagcggcggaggcgggagcggcttcaagatccccatcgaggaactggaagatcgggtgttcgtgaactgcaacacctctatcacctgggtggaaggcaccgtgggaacactgctgagcgacatcaccagactggacctcggcaagcggattctggaccctcggggcatctacagatgcaacggcaccgacatctacaaggacaaagaaagcaccgtgcaggtccactacagaatgtgccagtcctgcgtggaactggaccctgctacagtggccggcatcatcgtgaccgatgtgatcgctactctgctgctggctctgggagtgttctgcttcgccggacacgaaacaggcagactgtctggcgctgccgatacacaggccctgctgagaaacgaccaagtgtatcagcccctgcgcgacagagatgatgcccagtattctcacctcggcggcaactgggctagaaacaagcgcgccaagagaagcggatctggcgtgaagcagaccctgaatttcgacctgctgaagctggctggcgacgtggaatccaacccaggcccttctagaggccatatgaccgagtacaagcccacggtgcgcctcgccacccgcgacgacgtccccagggccgtacgcaccctcgccgccgcgttcgccgactaccccgccacgcgccacaccgtcgatccggaccgccacatcgagcgggtcaccgagctgcaagaactcttcctcacgcgcgtcgggctcgacatcggcaaggtgtgggtcgcggacgacggcgccgcggtggcggtctggaccacgccggagagcgtcgaagcgggggcggtgttcgccgagatcggcccgcgcatggccgagttgagcggttcccggctggccgcgcagcaacagatggaaggcctcctggcgccgcaccggcccaaggagcccgcgtggttcctggccaccgtcggcgtctcgcccgaccaccagggcaagggtctgggcagcgccgtcgtgctccccggagtggaggcggccgagcgcgccggggtgcccgccttcctggagacctccgcgccccgcaacctccccttctacgagcggctcggcttcaccgtcaccgccgacgtcgaggtgcccgaaggaccgcgcacctggtgcatgacccgcaagcccggtgcctga

SEQ ID NO: 7029 - DNA, 2022 bp, Artificial Sequence
  Synthetic Polynucloetide
atggccttaccagtgaccgccttgctcctgccgctggccttgctgctccacgccgccaggccggaagtgcagctgcttgaaagtggcggcggactgattcagcctggcggatctctgagactgagctgtgccgccagcggcttcaccttttctagccacgccatgacctgggtccgacaggcacctggaaaagggcttgaatgggtgtccgccatcagcggctctggcgattacacacactacgccgacagcgtgaagggcagattcaccatcagcagagacaacagcaagaacaccgtgtacctccagatgaacagcctgagagccgaggacagcgccgtgtattattgcgccaaggatgaggatggcggcagcctgcttggacacagaggacaaggcaccctggtcaccgtttcttccctcgagagcggcggaggcggatctttcgaagtgcagctggttgaatctggcggaggactggttcagcctggcggatctctgagactgtcttgtgccgccagcggcttcagcttcagcgacttttggatgagctgggtccgacaggcccctggcaaaggacttgaatgggtcgccacaatcagccaggccggcagcgagaaggactacgtggactctgtgaagggcagattcaccatcagccgggacaacgccaagaagtccctgtacctccagatgaacagcctgagagccgaggacaccgccgtgtactattgtgcctctggcgtgtacagcttcgactacagaggccagggcaccctggtcacagtctcttctacgcgtgggtctggaggcggaggcagcggcggaggcgggagcggccagagcatcaagggcaaccacctggtcaaggtgtacgactaccaagaggacggcagcgtgctgctgacatgtgatgccgaggccaagaacatcacctggtttaaggacggcaagatgatcggcttcctgaccgaggacaagaagaagtggaacctgggcagcaacgctaaggaccccagaggcatgtatcagtgcaagggcagccagaacaagagcaagcccctccaggtgtactaccggatgtgccagaactgcatcgagctgaacgccgctaccatcagcggctttctgttcgccgagatcgtgtccatcttcgtgctggccgtgggcgtgtactttatcgctggacaggatggcgtgcggcagagcagagcttccgataagcaaaccctgctgcctaacgaccagctgtaccagcctctgaaggacagagaggacgaccagtacagccacctccagggcaatcagctgagaagaaaccgcgccaagagaagcggatctggcgtgaagcagaccctgaatttcgacctgctgaagctggctggcgacgtggaatccaacccaggcccttctagaggccatatgaccgagtacaagcccacggtgcgcctcgccacccgcgacgacgtccccagggccgtacgcaccctcgccgccgcgttcgccgactaccccgccacgcgccacaccgtcgatccggaccgccacatcgagcgggtcaccgagctgcaagaactcttcctcacgcgcgtcgggctcgacatcggcaaggtgtgggtcgcggacgacggcgccgcggtggcggtctggaccacgccggagagcgtcgaagcgggggcggtgttcgccgagatcggcccgcgcatggccgagttgagcggttcccggctggccgcgcagcaacagatggaaggcctcctggcgccgcaccggcccaaggagcccgcgtggttcctggccaccgtcggcgtctcgcccgaccaccagggcaagggtctgggcagcgccgtcgtgctccccggagtggaggcggccgagcgcgccggggtgcccgccttcctggagacctccgcgccccgcaacctccccttctacgagcggctcggcttcaccgtcaccgccgacgtcgaggtgcccgaaggaccgcgcacctggtgcatgacccgcaagcccggtgcctga

SEQ ID NO: 7030 - DNA, 1971 bp, Artificial Sequence
  Synthetic Polynucloetide
atggccttaccagtgaccgccttgctcctgccgctggccttgctgctccacgccgccaggccggaagtgcagctgcttgaaagtggcggcggactgattcagcctggcggatctctgagactgagctgtgccgccagcggcttcaccttttctagccacgccatgacctgggtccgacaggcacctggaaaagggcttgaatgggtgtccgccatcagcggctctggcgattacacacactacgccgacagcgtgaagggcagattcaccatcagcagagacaacagcaagaacaccgtgtacctccagatgaacagcctgagagccgaggacagcgccgtgtattattgcgccaaggatgaggatggcggcagcctgcttggacacagaggacaaggcaccctggtcaccgtttcttccctcgagagcggcggaggcggatctttcgaagtgcagctggttgaatctggcggaggactggttcagcctggcggatctctgagactgtcttgtgccgccagcggcttcagcttcagcgacttttggatgagctgggtccgacaggcccctggcaaaggacttgaatgggtcgccacaatcagccaggccggcagcgagaaggactacgtggactctgtgaagggcagattcaccatcagccgggacaacgccaagaagtccctgtacctccagatgaacagcctgagagccgaggacaccgccgtgtactattgtgcctctggcgtgtacagcttcgactacagaggccagggcaccctggtcacagtctcttctacgcgtgggtctggaggcggaggcagcggcggaggcgggagcggccagagttttgggttgttggaccctaaattgtgctatctgttggacggaatcctgttcatttacggagtgatcctgaccgcattgttcctgcgggttaagttttccagatccgcagacgcacccgcttaccaacaagggcagaaccaactctacaatgaacttaatttggggcggagggaagagtacgacgttctggacaaaaggaggggacgagatcccgagatgggcggaaagcctcagcgaaggaagaatccgcaagaggggctttataacgaactccagaaagataaaatggcagaagcctatagtgagattgggatgaagggagaaaggaggaggggtaaaggtcacgatgggttgtaccaaggattgagcacagccactaaagatacctatgatgcgctccacatgcaggccctgccgccaagacgcgccaagagaagcggatctggcgtgaagcagaccctgaatttcgacctgctgaagctggctggcgacgtggaatccaacccaggcccttctagaggccatatgaccgagtacaagcccacggtgcgcctcgccacccgcgacgacgtccccagggccgtacgcaccctcgccgccgcgttcgccgactaccccgccacgcgccacaccgtcgatccggaccgccacatcgagcgggtcaccgagctgcaagaactcttcctcacgcgcgtcgggctcgacatcggcaaggtgtgggtcgcggacgacggcgccgcggtggcggtctggaccacgccggagagcgtcgaagcgggggcggtgttcgccgagatcggcccgcgcatggccgagttgagcggttcccggctggccgcgcagcaacagatggaaggcctcctggcgccgcaccggcccaaggagcccgcgtggttcctggccaccgtcggcgtctcgcccgaccaccagggcaagggtctgggcagcgccgtcgtgctccccggagtggaggcggccgagcgcgccggggtgcccgccttcctggagacctccgcgccccgcaacctccccttctacgagcggctcggcttcaccgtcaccgccgacgtcgaggtgcccgaaggaccgcgcacctggtgcatgacccgcaagcccggtgcctga

SEQ ID NO: 7031 - DNA, 2595 bp, Artificial Sequence
  Synthetic Polynucloetide
atggccttaccagtgaccgccttgctcctgccgctggccttgctgctccacgccgccaggccggaagtgcagctgcttgaaagtggcggcggactgattcagcctggcggatctctgagactgagctgtgccgccagcggcttcaccttttctagccacgccatgacctgggtccgacaggcacctggaaaagggcttgaatgggtgtccgccatcagcggctctggcgattacacacactacgccgacagcgtgaagggcagattcaccatcagcagagacaacagcaagaacaccgtgtacctccagatgaacagcctgagagccgaggacagcgccgtgtattattgcgccaaggatgaggatggcggcagcctgcttggacacagaggacaaggcaccctggtcaccgtttcttccctcgagggacagcctaaggccaatcctaccgtgacactgttccctccaagcagcgaagaactccaggccaacaaggccacacttgtgtgcctgatctccgacttctaccctggggctgtgacagtggcttggaaggccgatggatctcctgtgaaagccggcgtggaaaccaccaagccatccaagcagagcaacaacaaatacgccgccagctcctacctgagcctgacacctgagcagtggaagtcccacagatcctacagctgccaagtgacccacgaaggcagcaccgtggaaaagacagtggcccctacagagtgcagcggcagagccgattgcggctttaccagcgagagctaccagcagggcgtgctgagcgccaccatcctgtacgagatcctgctgggcaaggccaccctgtacgccgtgctggtgtctgccctggtgctgatggctatggtcaagcggaaggacagccggggaagggccaagcgatctggatctggagcaacaaacttctcactactcaaacaagcaggtgacgtggaggagaatcccgggcctactagtatggactggatttggcgcatccttttccttgtcggcgctgctaccggcgcgcattccttcgaagtgcagctggttgaatctggcggaggactggttcagcctggcggatctctgagactgtcttgtgccgccagcggcttcagcttcagcgacttttggatgagctgggtccgacaggcccctggcaaaggacttgaatgggtcgccacaatcagccaggccggcagcgagaaggactacgtggactctgtgaagggcagattcaccatcagccgggacaacgccaagaagtccctgtacctccagatgaacagcctgagagccgaggacaccgccgtgtactattgtgcctctggcgtgtacagcttcgactacagaggccagggcaccctggtcacagtctcttctacgcgtgcctctacaaagggaccctccgtgtttcctctggctcccagcagcaagtctacaagcggaggaacagccgctctgggctgcctggtcaaggattactttcccgagcctgtgaccgtgtcctggaatagcggagcactgacaagcggcgtgcacacctttccagccgtgctgcaaagcagcggcctgtactctctgagcagcgtggtcacagtgcctagctctagcctgggcacccagacctacatctgcaatgtgaaccacaagcctagcaacaccaaggtggacaagagagtggaacccaagagctgtatccccgaggacacattcttcccaagccccgagagcagctgcgacgtgaagctggtggaaaagagcttcgagacagacaccaacctgaacttccagaacctgagcgtgatcggcttcagaatcctgctgctgaaagtggccggctttaacctgctgatgaccctgcggctgtggtccagccgcgccaagagaagcggatctggcgtgaagcagaccctgaatttcgacctgctgaagctggctggcgacgtggaatccaacccaggcccttctagaggccatatgaccgagtacaagcccacggtgcgcctcgccacccgcgacgacgtccccagggccgtacgcaccctcgccgccgcgttcgccgactaccccgccacgcgccacaccgtcgatccggaccgccacatcgagcgggtcaccgagctgcaagaactcttcctcacgcgcgtcgggctcgacatcggcaaggtgtgggtcgcggacgacggcgccgcggtggcggtctggaccacgccggagagcgtcgaagcgggggcggtgttcgccgagatcggcccgcgcatggccgagttgagcggttcccggctggccgcgcagcaacagatggaaggcctcctggcgccgcaccggcccaaggagcccgcgtggttcctggccaccgtcggcgtctcgcccgaccaccagggcaagggtctgggcagcgccgtcgtgctccccggagtggaggcggccgagcgcgccggggtgcccgccttcctggagacctccgcgccccgcaacctccccttctacgagcggctcggcttcaccgtcaccgccgacgtcgaggtgcccgaaggaccgcgcacctggtgcatgacccgcaagcccggtgcctga

SEQ ID NO: 7032 - DNA, 1893 bp, Artificial Sequence; identical to SEQ ID NO: 7005
  Synthetic Polynucloetide

SEQ ID NO: 7033 - DNA, 1980 bp, Artificial Sequence
  Synthetic Polynucloetide
atggccttaccagtgaccgccttgctcctgccgctggccttgctgctccacgccgccaggccggaagtgcagctgcttgaaagtggcggcggactgattcagcctggcggatctctgagactgagctgtgccgccagcggcttcaccttttctagccacgccatgacctgggtccgacaggcacctggaaaagggcttgaatgggtgtccgccatcagcggctctggcgattacacacactacgccgacagcgtgaagggcagattcaccatcagcagagacaacagcaagaacaccgtgtacctccagatgaacagcctgagagccgaggacagcgccgtgtattattgcgccaaggatgaggatggcggcagcctgcttggacacagaggacaaggcaccctggtcaccgtttcttccctcgagggatctggcagagccgattgcggctttaccagcgagagctaccagcagggcgtgctgagcgccaccatcctgtacgagatcctgctgggcaaggccaccctgtacgccgtgctggtgtctgccctggtgctgatggctatggtcaagcggaaggacagccggggaagggccaagcgatctggatctggagcaacaaacttctcactactcaaacaagcaggtgacgtggaggagaatcccgggcctactagtatggactggatttggcgcatccttttccttgtcggcgctgctaccggcgcgcattccttcgaagtgcagctggttgaatctggcggaggactggttcagcctggcggatctctgagactgtcttgtgccgccagcggcttcagcttcagcgacttttggatgagctgggtccgacaggcccctggcaaaggacttgaatgggtcgccacaatcagccaggccggcagcgagaaggactacgtggactctgtgaagggcagattcaccatcagccgggacaacgccaagaagtccctgtacctccagatgaacagcctgagagccgaggacaccgccgtgtactattgtgcctctggcgtgtacagcttcgactacagaggccagggcaccctggtcacagtctcttctacgcgtggcagcatccccgaggacacattcttcccaagccccgagagcagctgcgacgtgaagctggtggaaaagagcttcgagacagacaccaacctgaacttccagaacctgagcgtgatcggcttcagaatcctgctgctgaaagtggccggctttaacctgctgatgaccctgcggctgtggtccagccgcgccaagagaagcggatctggcgtgaagcagaccctgaatttcgacctgctgaagctggctggcgacgtggaatccaacccaggcccttctagaggccatatgaccgagtacaagcccacggtgcgcctcgccacccgcgacgacgtccccagggccgtacgcaccctcgccgccgcgttcgccgactaccccgccacgcgccacaccgtcgatccggaccgccacatcgagcgggtcaccgagctgcaagaactcttcctcacgcgcgtcgggctcgacatcggcaaggtgtgggtcgcggacgacggcgccgcggtggcggtctggaccacgccggagagcgtcgaagcgggggcggtgttcgccgagatcggcccgcgcatggccgagttgagcggttcccggctggccgcgcagcaacagatggaaggcctcctggcgccgcaccggcccaaggagcccgcgtggttcctggccaccgtcggcgtctcgcccgaccaccagggcaagggtctgggcagcgccgtcgtgctccccggagtggaggcggccgagcgcgccggggtgcccgccttcctggagacctccgcgccccgcaacctccccttctacgagcggctcggcttcaccgtcaccgccgacgtcgaggtgcccgaaggaccgcgcacctggtgcatgacccgcaagcccggtgcctga

SEQ ID NO: 7034 - DNA, 1278 bp, Artificial Sequence
  Synthetic Polynucloetide
atggccttaccagtgaccgccttgctcctgccgctggccttgctgctccacgccgccaggccggaagtgcagctgcttgaaagtggcggcggactgattcagcctggcggatctctgagactgagctgtgccgccagcggcttcaccttttctagccacgccatgacctgggtccgacaggcacctggaaaagggcttgaatgggtgtccgccatcagcggctctggcgattacacacactacgccgacagcgtgaagggcagattcaccatcagcagagacaacagcaagaacaccgtgtacctccagatgaacagcctgagagccgaggacagcgccgtgtattattgcgccaaggatgaggatggcggcagcctgcttggacacagaggacaaggcaccctggtcaccgtttcttccctcgagggatctggcagagccgattgcggctttaccagcgagagctaccagcagggcgtgctgagcgccaccatcctgtacgagatcctgctgggcaaggccaccctgtacgccgtgctggtgtctgccctggtgctgatggctatggtcaagcggaaggacagccggggaagggccaagcgatctggatctggagcaacaaacttctcactactcaaacaagcaggtgacgtggaggagaatcccgggcctactagtatggactggatttggcgcatccttttccttgtcggcgctgctaccggcgcgcattccttcgaagtgcagctggttgaatctggcggaggactggttcagcctggcggatctctgagactgtcttgtgccgccagcggcttcagcttcagcgacttttggatgagctgggtccgacaggcccctggcaaaggacttgaatgggtcgccacaatcagccaggccggcagcgagaaggactacgtggactctgtgaagggcagattcaccatcagccgggacaacgccaagaagtccctgtacctccagatgaacagcctgagagccgaggacaccgccgtgtactattgtgcctctggcgtgtacagcttcgactacagaggccagggcaccctggtcacagtctcttctacgcgtggcagcatccccgaggacacattcttcccaagccccgagagcagctgcgacgtgaagctggtggaaaagagcttcgagacagacaccaacctgaacttccagaacctgagcgtgatcggcttcagaatcctgctgctgaaagtggccggctttaacctgctgatgaccctgcggctgtggtccagc

SEQ ID NO: 7035 - DNA, 2007 bp, Artificial Sequence
  Synthetic Polynucloetide
atggccttaccagtgaccgccttgctcctgccgctggccttgctgctccacgccgccaggccggaagtgcagctgcttgaaagtggcggcggactgattcagcctggcggatctctgagactgagctgtgccgccagcggcttcaccttttctagccacgccatgacctgggtccgacaggcacctggaaaagggcttgaatgggtgtccgccatcagcggctctggcgattacacacactacgccgacagcgtgaagggcagattcaccatcagcagagacaacagcaagaacaccgtgtacctccagatgaacagcctgagagccgaggacagcgccgtgtattattgcgccaaggatgaggatggcggcagcctgcttggacacagaggacaaggcaccctggtcaccgtttcttccctcgaggacaaaactcacacatgcccaccgtgcccagcaggcagagccgattgcggctttaccagcgagagctaccagcagggcgtgctgagcgccaccatcctgtacgagatcctgctgggcaaggccaccctgtacgccgtgctggtgtctgccctggtgctgatggctatggtcaagcggaaggacagccggggaagggccaagcgatctggatctggagcaacaaacttctcactactcaaacaagcaggtgacgtggaggagaatcccgggcctactagtatggactggatttggcgcatccttttccttgtcggcgctgctaccggcgcgcattccttcgaagtgcagctggttgaatctggcggaggactggttcagcctggcggatctctgagactgtcttgtgccgccagcggcttcagcttcagcgacttttggatgagctgggtccgacaggcccctggcaaaggacttgaatgggtcgccacaatcagccaggccggcagcgagaaggactacgtggactctgtgaagggcagattcaccatcagccgggacaacgccaagaagtccctgtacctccagatgaacagcctgagagccgaggacaccgccgtgtactattgtgcctctggcgtgtacagcttcgactacagaggccagggcaccctggtcacagtctcttctacgcgtggcagcatccccgaggacacattcttcccaagccccgagagcagctgcgacgtgaagctggtggaaaagagcttcgagacagacaccaacctgaacttccagaacctgagcgtgatcggcttcagaatcctgctgctgaaagtggccggctttaacctgctgatgaccctgcggctgtggtccagccgcgccaagagaagcggatctggcgtgaagcagaccctgaatttcgacctgctgaagctggctggcgacgtggaatccaacccaggcccttctagaggccatatgaccgagtacaagcccacggtgcgcctcgccacccgcgacgacgtccccagggccgtacgcaccctcgccgccgcgttcgccgactaccccgccacgcgccacaccgtcgatccggaccgccacatcgagcgggtcaccgagctgcaagaactcttcctcacgcgcgtcgggctcgacatcggcaaggtgtgggtcgcggacgacggcgccgcggtggcggtctggaccacgccggagagcgtcgaagcgggggcggtgttcgccgagatcggcccgcgcatggccgagttgagcggttcccggctggccgcgcagcaacagatggaaggcctcctggcgccgcaccggcccaaggagcccgcgtggttcctggccaccgtcggcgtctcgcccgaccaccagggcaagggtctgggcagcgccgtcgtgctccccggagtggaggcggccgagcgcgccggggtgcccgccttcctggagacctccgcgccccgcaacctccccttctacgagcggctcggcttcaccgtcaccgccgacgtcgaggtgcccgaaggaccgcgcacctggtgcatgacccgcaagcccggtgcctga

SEQ ID NO: 7036 - DNA, 2007 bp, Artificial Sequence
  Synthetic Polynucloetide
atggccttaccagtgaccgccttgctcctgccgctggccttgctgctccacgccgccaggccggaagtgcagctgcttgaaagtggcggcggactgattcagcctggcggatctctgagactgagctgtgccgccagcggcttcaccttttctagccacgccatgacctgggtccgacaggcacctggaaaagggcttgaatgggtgtccgccatcagcggctctggcgattacacacactacgccgacagcgtgaagggcagattcaccatcagcagagacaacagcaagaacaccgtgtacctccagatgaacagcctgagagccgaggacagcgccgtgtattattgcgccaaggatgaggatggcggcagcctgcttggacacagaggacaaggcaccctggtcaccgtttcttccctcgagggatctggcagagccgattgcggctttaccagcgagagctaccagcagggcgtgctgagcgccaccatcctgtacgagatcctgctgggcaaggccaccctgtacgccgtgctggtgtctgccctggtgctgatggctatggtcaagcggaaggacagccggggaagggccaagcgatctggatctggagcaacaaacttctcactactcaaacaagcaggtgacgtggaggagaatcccgggcctactagtatggactggatttggcgcatccttttccttgtcggcgctgctaccggcgcgcattccttcgaagtgcagctggttgaatctggcggaggactggttcagcctggcggatctctgagactgtcttgtgccgccagcggcttcagcttcagcgacttttggatgagctgggtccgacaggcccctggcaaaggacttgaatgggtcgccacaatcagccaggccggcagcgagaaggactacgtggactctgtgaagggcagattcaccatcagccgggacaacgccaagaagtccctgtacctccagatgaacagcctgagagccgaggacaccgccgtgtactattgtgcctctggcgtgtacagcttcgactacagaggccagggcaccctggtcacagtctcttctacgcgtgataaaactcatacctgtccgccatgcccggcaatccccgaggacacattcttcccaagccccgagagcagctgcgacgtgaagctggtggaaaagagcttcgagacagacaccaacctgaacttccagaacctgagcgtgatcggcttcagaatcctgctgctgaaagtggccggctttaacctgctgatgaccctgcggctgtggtccagccgcgccaagagaagcggatctggcgtgaagcagaccctgaatttcgacctgctgaagctggctggcgacgtggaatccaacccaggcccttctagaggccatatgaccgagtacaagcccacggtgcgcctcgccacccgcgacgacgtccccagggccgtacgcaccctcgccgccgcgttcgccgactaccccgccacgcgccacaccgtcgatccggaccgccacatcgagcgggtcaccgagctgcaagaactcttcctcacgcgcgtcgggctcgacatcggcaaggtgtgggtcgcggacgacggcgccgcggtggcggtctggaccacgccggagagcgtcgaagcgggggcggtgttcgccgagatcggcccgcgcatggccgagttgagcggttcccggctggccgcgcagcaacagatggaaggcctcctggcgccgcaccggcccaaggagcccgcgtggttcctggccaccgtcggcgtctcgcccgaccaccagggcaagggtctgggcagcgccgtcgtgctccccggagtggaggcggccgagcgcgccggggtgcccgccttcctggagacctccgcgccccgcaacctccccttctacgagcggctcggcttcaccgtcaccgccgacgtcgaggtgcccgaaggaccgcgcacctggtgcatgacccgcaagcccggtgcctga

SEQ ID NO: 7037 - DNA, 2034 bp, Artificial Sequence
  Synthetic Polynucloetide
atggccttaccagtgaccgccttgctcctgccgctggccttgctgctccacgccgccaggccggaagtgcagctgcttgaaagtggcggcggactgattcagcctggcggatctctgagactgagctgtgccgccagcggcttcaccttttctagccacgccatgacctgggtccgacaggcacctggaaaagggcttgaatgggtgtccgccatcagcggctctggcgattacacacactacgccgacagcgtgaagggcagattcaccatcagcagagacaacagcaagaacaccgtgtacctccagatgaacagcctgagagccgaggacagcgccgtgtattattgcgccaaggatgaggatggcggcagcctgcttggacacagaggacaaggcaccctggtcaccgtttcttccctcgaggacaaaactcacacatgcccaccgtgcccagcaggcagagccgattgcggctttaccagcgagagctaccagcagggcgtgctgagcgccaccatcctgtacgagatcctgctgggcaaggccaccctgtacgccgtgctggtgtctgccctggtgctgatggctatggtcaagcggaaggacagccggggaagggccaagcgatctggatctggagcaacaaacttctcactactcaaacaagcaggtgacgtggaggagaatcccgggcctactagtatggactggatttggcgcatccttttccttgtcggcgctgctaccggcgcgcattccttcgaagtgcagctggttgaatctggcggaggactggttcagcctggcggatctctgagactgtcttgtgccgccagcggcttcagcttcagcgacttttggatgagctgggtccgacaggcccctggcaaaggacttgaatgggtcgccacaatcagccaggccggcagcgagaaggactacgtggactctgtgaagggcagattcaccatcagccgggacaacgccaagaagtccctgtacctccagatgaacagcctgagagccgaggacaccgccgtgtactattgtgcctctggcgtgtacagcttcgactacagaggccagggcaccctggtcacagtctcttctacgcgtgataaaactcatacctgtccgccatgcccggcaatccccgaggacacattcttcccaagccccgagagcagctgcgacgtgaagctggtggaaaagagcttcgagacagacaccaacctgaacttccagaacctgagcgtgatcggcttcagaatcctgctgctgaaagtggccggctttaacctgctgatgaccctgcggctgtggtccagccgcgccaagagaagcggatctggcgtgaagcagaccctgaatttcgacctgctgaagctggctggcgacgtggaatccaacccaggcccttctagaggccatatgaccgagtacaagcccacggtgcgcctcgccacccgcgacgacgtccccagggccgtacgcaccctcgccgccgcgttcgccgactaccccgccacgcgccacaccgtcgatccggaccgccacatcgagcgggtcaccgagctgcaagaactcttcctcacgcgcgtcgggctcgacatcggcaaggtgtgggtcgcggacgacggcgccgcggtggcggtctggaccacgccggagagcgtcgaagcgggggcggtgttcgccgagatcggcccgcgcatggccgagttgagcggttcccggctggccgcgcagcaacagatggaaggcctcctggcgccgcaccggcccaaggagcccgcgtggttcctggccaccgtcggcgtctcgcccgaccaccagggcaagggtctgggcagcgccgtcgtgctccccggagtggaggcggccgagcgcgccggggtgcccgccttcctggagacctccgcgccccgcaacctccccttctacgagcggctcggcttcaccgtcaccgccgacgtcgaggtgcccgaaggaccgcgcacctggtgcatgacccgcaagcccggtgcctga

SEQ ID NO: 7038 - DNA, 1332 bp, Artificial Sequence
  Synthetic Polynucloetide
atggccttaccagtgaccgccttgctcctgccgctggccttgctgctccacgccgccaggccggaagtgcagctgcttgaaagtggcggcggactgattcagcctggcggatctctgagactgagctgtgccgccagcggcttcaccttttctagccacgccatgacctgggtccgacaggcacctggaaaagggcttgaatgggtgtccgccatcagcggctctggcgattacacacactacgccgacagcgtgaagggcagattcaccatcagcagagacaacagcaagaacaccgtgtacctccagatgaacagcctgagagccgaggacagcgccgtgtattattgcgccaaggatgaggatggcggcagcctgcttggacacagaggacaaggcaccctggtcaccgtttcttccctcgaggacaaaactcacacatgcccaccgtgcccagcaggcagagccgattgcggctttaccagcgagagctaccagcagggcgtgctgagcgccaccatcctgtacgagatcctgctgggcaaggccaccctgtacgccgtgctggtgtctgccctggtgctgatggctatggtcaagcggaaggacagccggggaagggccaagcgatctggatctggagcaacaaacttctcactactcaaacaagcaggtgacgtggaggagaatcccgggcctactagtatggactggatttggcgcatccttttccttgtcggcgctgctaccggcgcgcattccttcgaagtgcagctggttgaatctggcggaggactggttcagcctggcggatctctgagactgtcttgtgccgccagcggcttcagcttcagcgacttttggatgagctgggtccgacaggcccctggcaaaggacttgaatgggtcgccacaatcagccaggccggcagcgagaaggactacgtggactctgtgaagggcagattcaccatcagccgggacaacgccaagaagtccctgtacctccagatgaacagcctgagagccgaggacaccgccgtgtactattgtgcctctggcgtgtacagcttcgactacagaggccagggcaccctggtcacagtctcttctacgcgtgataaaactcatacctgtccgccatgcccggcaatccccgaggacacattcttcccaagccccgagagcagctgcgacgtgaagctggtggaaaagagcttcgagacagacaccaacctgaacttccagaacctgagcgtgatcggcttcagaatcctgctgctgaaagtggccggctttaacctgctgatgaccctgcggctgtggtccagc

SEQ ID NO: 7039 - DNA, 1305 bp, Artificial Sequence
  Synthetic Polynucloetide
atggccttaccagtgaccgccttgctcctgccgctggccttgctgctccacgccgccaggccggaagtgcagctgcttgaaagtggcggcggactgattcagcctggcggatctctgagactgagctgtgccgccagcggcttcaccttttctagccacgccatgacctgggtccgacaggcacctggaaaagggcttgaatgggtgtccgccatcagcggctctggcgattacacacactacgccgacagcgtgaagggcagattcaccatcagcagagacaacagcaagaacaccgtgtacctccagatgaacagcctgagagccgaggacagcgccgtgtattattgcgccaaggatgaggatggcggcagcctgcttggacacagaggacaaggcaccctggtcaccgtttcttccctcgagggatctggcagagccgattgcggctttaccagcgagagctaccagcagggcgtgctgagcgccaccatcctgtacgagatcctgctgggcaaggccaccctgtacgccgtgctggtgtctgccctggtgctgatggctatggtcaagcggaaggacagccggggaagggccaagcgatctggatctggagcaacaaacttctcactactcaaacaagcaggtgacgtggaggagaatcccgggcctactagtatggactggatttggcgcatccttttccttgtcggcgctgctaccggcgcgcattccttcgaagtgcagctggttgaatctggcggaggactggttcagcctggcggatctctgagactgtcttgtgccgccagcggcttcagcttcagcgacttttggatgagctgggtccgacaggcccctggcaaaggacttgaatgggtcgccacaatcagccaggccggcagcgagaaggactacgtggactctgtgaagggcagattcaccatcagccgggacaacgccaagaagtccctgtacctccagatgaacagcctgagagccgaggacaccgccgtgtactattgtgcctctggcgtgtacagcttcgactacagaggccagggcaccctggtcacagtctcttctacgcgtgataaaactcatacctgtccgccatgcccggcaatccccgaggacacattcttcccaagccccgagagcagctgcgacgtgaagctggtggaaaagagcttcgagacagacaccaacctgaacttccagaacctgagcgtgatcggcttcagaatcctgctgctgaaagtggccggctttaacctgctgatgaccctgcggctgtggtccagc

SEQ ID NO: 7040 - DNA, 2661 bp, Artificial Sequence
  Synthetic Polynucloetide
atggccttaccagtgaccgccttgctcctgccgctggccttgctgctccacgccgccaggccggaagtgcagctgcttgaaagtggcggcggactgattcagcctggcggatctctgagactgagctgtgccgccagcggcttcaccttttctagccacgccatgacctgggtccgacaggcacctggaaaagggcttgaatgggtgtccgccatcagcggctctggcgattacacacactacgccgacagcgtgaagggcagattcaccatcagcagagacaacagcaagaacaccgtgtacctccagatgaacagcctgagagccgaggacagcgccgtgtattattgcgccaaggatgaggatggcggcagcctgcttggacacagaggacaaggcaccctggtcaccgtttcttccctcgagggacagcctaaggccaatcctaccgtgacactgttccctccaagcagcgaagaactccaggccaacaaggccacacttgtgtgcctgatctccgacttctaccctggggctgtgacagtggcttggaaggccgatggatctcctgtgaaagccggcgtggaaaccaccaagccatccaagcagagcaacaacaaatacgccgccagctcctacctgagcctgacacctgagcagtggaagtcccacagatcctacagctgccaagtgacccacgaaggcagcaccgtggaaaagacagtggcccctacagagtgcagccccatcaagaccgatgtgattacaatggaccccaaggacaactgctccaaggacgccaacgataccctgctgctccagctgaccaacaccagcgcctactacatgtacttgttgctgctgctgaagtccgtggtgtacttcgccatcatcacatgctgcctgctgcggagaaccgccttctgctgcaacggcgagaagtctagggccaagcgatctggatctggagcaacaaacttctcactactcaaacaagcaggtgacgtggaggagaatcccgggcctactagtatggactggatttggcgcatccttttccttgtcggcgctgctaccggcgcgcattccttcgaagtgcagctggttgaatctggcggaggactggttcagcctggcggatctctgagactgtcttgtgccgccagcggcttcagcttcagcgacttttggatgagctgggtccgacaggcccctggcaaaggacttgaatgggtcgccacaatcagccaggccggcagcgagaaggactacgtggactctgtgaagggcagattcaccatcagccgggacaacgccaagaagtccctgtacctccagatgaacagcctgagagccgaggacaccgccgtgtactattgtgcctctggcgtgtacagcttcgactacagaggccagggcaccctggtcacagtctcttctacgcgtgcctctacaaagggaccctccgtgtttcctctggctcccagcagcaagtctacaagcggaggaacagccgctctgggctgcctggtcaaggattactttcccgagcctgtgaccgtgtcctggaatagcggagcactgacaagcggcgtgcacacctttccagccgtgctgcaaagcagcggcctgtactctctgagcagcgtggtcacagtgcctagctctagcctgggcacccagacctacatctgcaatgtgaaccacaagcctagcaacaccaaggtggacaagagagtggaacccaagagctgtgaagtgaaaaccgactccaccgaccacgtgaagcccaaagagacagagaacaccaagcagcccagcaagagctgccacaagcccaaggccatcgtgcacaccgagaaagtgaacatgatgagcctgaccgtgctgggcctgcggatgctgttcgccaaaaccgtggccgtgaacttcctgctgaccgccaagctgttcttcctccgcgccaagagaagcggatctggcgtgaagcagaccctgaatttcgacctgctgaagctggctggcgacgtggaatccaacccaggcccttctagaggccatatgaccgagtacaagcccacggtgcgcctcgccacccgcgacgacgtccccagggccgtacgcaccctcgccgccgcgttcgccgactaccccgccacgcgccacaccgtcgatccggaccgccacatcgagcgggtcaccgagctgcaagaactcttcctcacgcgcgtcgggctcgacatcggcaaggtgtgggtcgcggacgacggcgccgcggtggcggtctggaccacgccggagagcgtcgaagcgggggcggtgttcgccgagatcggcccgcgcatggccgagttgagcggttcccggctggccgcgcagcaacagatggaaggcctcctggcgccgcaccggcccaaggagcccgcgtggttcctggccaccgtcggcgtctcgcccgaccaccagggcaagggtctgggcagcgccgtcgtgctccccggagtggaggcggccgagcgcgccggggtgcccgccttcctggagacctccgcgccccgcaacctccccttctacgagcggctcggcttcaccgtcaccgccgacgtcgaggtgcccgaaggaccgcgcacctggtgcatgacccgcaagcccggtgcctga

SEQ ID NO: 7041 - DNA, 1959 bp, Artificial Sequence; identical to SEQ ID NO: 7003
  Synthetic Polynucloetide

SEQ ID NO: 7042 - DNA, 2046 bp, Artificial Sequence
  Synthetic Polynucloetide
atggccttaccagtgaccgccttgctcctgccgctggccttgctgctccacgccgccaggccggaagtgcagctgcttgaaagtggcggcggactgattcagcctggcggatctctgagactgagctgtgccgccagcggcttcaccttttctagccacgccatgacctgggtccgacaggcacctggaaaagggcttgaatgggtgtccgccatcagcggctctggcgattacacacactacgccgacagcgtgaagggcagattcaccatcagcagagacaacagcaagaacaccgtgtacctccagatgaacagcctgagagccgaggacagcgccgtgtattattgcgccaaggatgaggatggcggcagcctgcttggacacagaggacaaggcaccctggtcaccgtttcttccctcgagggatctcccatcaagaccgatgtgattacaatggaccccaaggacaactgctccaaggacgccaacgataccctgctgctccagctgaccaacaccagcgcctactacatgtacttgttgctgctgctgaagtccgtggtgtacttcgccatcatcacatgctgcctgctgcggagaaccgccttctgctgcaacggcgagaagtctagggccaagcgatctggatctggagcaacaaacttctcactactcaaacaagcaggtgacgtggaggagaatcccgggcctactagtatggactggatttggcgcatccttttccttgtcggcgctgctaccggcgcgcattccttcgaagtgcagctggttgaatctggcggaggactggttcagcctggcggatctctgagactgtcttgtgccgccagcggcttcagcttcagcgacttttggatgagctgggtccgacaggcccctggcaaaggacttgaatgggtcgccacaatcagccaggccggcagcgagaaggactacgtggactctgtgaagggcagattcaccatcagccgggacaacgccaagaagtccctgtacctccagatgaacagcctgagagccgaggacaccgccgtgtactattgtgcctctggcgtgtacagcttcgactacagaggccagggcaccctggtcacagtctcttctacgcgtggcagcgaagtgaaaaccgactccaccgaccacgtgaagcccaaagagacagagaacaccaagcagcccagcaagagctgccacaagcccaaggccatcgtgcacaccgagaaagtgaacatgatgagcctgaccgtgctgggcctgcggatgctgttcgccaaaaccgtggccgtgaacttcctgctgaccgccaagctgttcttcctccgcgccaagagaagcggatctggcgtgaagcagaccctgaatttcgacctgctgaagctggctggcgacgtggaatccaacccaggcccttctagaggccatatgaccgagtacaagcccacggtgcgcctcgccacccgcgacgacgtccccagggccgtacgcaccctcgccgccgcgttcgccgactaccccgccacgcgccacaccgtcgatccggaccgccacatcgagcgggtcaccgagctgcaagaactcttcctcacgcgcgtcgggctcgacatcggcaaggtgtgggtcgcggacgacggcgccgcggtggcggtctggaccacgccggagagcgtcgaagcgggggcggtgttcgccgagatcggcccgcgcatggccgagttgagcggttcccggctggccgcgcagcaacagatggaaggcctcctggcgccgcaccggcccaaggagcccgcgtggttcctggccaccgtcggcgtctcgcccgaccaccagggcaagggtctgggcagcgccgtcgtgctccccggagtggaggcggccgagcgcgccggggtgcccgccttcctggagacctccgcgccccgcaacctccccttctacgagcggctcggcttcaccgtcaccgccgacgtcgaggtgcccgaaggaccgcgcacctggtgcatgacccgcaagcccggtgcctga

SEQ ID NO: 7043 - DNA, 1344 bp, Artificial Sequence
  Synthetic Polynucloetide
atggccttaccagtgaccgccttgctcctgccgctggccttgctgctccacgccgccaggccggaagtgcagctgcttgaaagtggcggcggactgattcagcctggcggatctctgagactgagctgtgccgccagcggcttcaccttttctagccacgccatgacctgggtccgacaggcacctggaaaagggcttgaatgggtgtccgccatcagcggctctggcgattacacacactacgccgacagcgtgaagggcagattcaccatcagcagagacaacagcaagaacaccgtgtacctccagatgaacagcctgagagccgaggacagcgccgtgtattattgcgccaaggatgaggatggcggcagcctgcttggacacagaggacaaggcaccctggtcaccgtttcttccctcgagggatctcccatcaagaccgatgtgattacaatggaccccaaggacaactgctccaaggacgccaacgataccctgctgctccagctgaccaacaccagcgcctactacatgtacttgttgctgctgctgaagtccgtggtgtacttcgccatcatcacatgctgcctgctgcggagaaccgccttctgctgcaacggcgagaagtctagggccaagcgatctggatctggagcaacaaacttctcactactcaaacaagcaggtgacgtggaggagaatcccgggcctactagtatggactggatttggcgcatccttttccttgtcggcgctgctaccggcgcgcattccttcgaagtgcagctggttgaatctggcggaggactggttcagcctggcggatctctgagactgtcttgtgccgccagcggcttcagcttcagcgacttttggatgagctgggtccgacaggcccctggcaaaggacttgaatgggtcgccacaatcagccaggccggcagcgagaaggactacgtggactctgtgaagggcagattcaccatcagccgggacaacgccaagaagtccctgtacctccagatgaacagcctgagagccgaggacaccgccgtgtactattgtgcctctggcgtgtacagcttcgactacagaggccagggcaccctggtcacagtctcttctacgcgtggcagcgaagtgaaaaccgactccaccgaccacgtgaagcccaaagagacagagaacaccaagcagcccagcaagagctgccacaagcccaaggccatcgtgcacaccgagaaagtgaacatgatgagcctgaccgtgctgggcctgcggatgctgttcgccaaaaccgtggccgtgaacttcctgctgaccgccaagctgttcttcctc

SEQ ID NO: 7044 - DNA, 2073 bp, Artificial Sequence
  Synthetic Polynucloetide
atggccttaccagtgaccgccttgctcctgccgctggccttgctgctccacgccgccaggccggaagtgcagctgcttgaaagtggcggcggactgattcagcctggcggatctctgagactgagctgtgccgccagcggcttcaccttttctagccacgccatgacctgggtccgacaggcacctggaaaagggcttgaatgggtgtccgccatcagcggctctggcgattacacacactacgccgacagcgtgaagggcagattcaccatcagcagagacaacagcaagaacaccgtgtacctccagatgaacagcctgagagccgaggacagcgccgtgtattattgcgccaaggatgaggatggcggcagcctgcttggacacagaggacaaggcaccctggtcaccgtttcttccctcgaggacaaaactcacacatgcccaccgtgcccagcacccatcaagaccgatgtgattacaatggaccccaaggacaactgctccaaggacgccaacgataccctgctgctccagctgaccaacaccagcgcctactacatgtacttgttgctgctgctgaagtccgtggtgtacttcgccatcatcacatgctgcctgctgcggagaaccgccttctgctgcaacggcgagaagtctagggccaagcgatctggatctggagcaacaaacttctcactactcaaacaagcaggtgacgtggaggagaatcccgggcctactagtatggactggatttggcgcatccttttccttgtcggcgctgctaccggcgcgcattccttcgaagtgcagctggttgaatctggcggaggactggttcagcctggcggatctctgagactgtcttgtgccgccagcggcttcagcttcagcgacttttggatgagctgggtccgacaggcccctggcaaaggacttgaatgggtcgccacaatcagccaggccggcagcgagaaggactacgtggactctgtgaagggcagattcaccatcagccgggacaacgccaagaagtccctgtacctccagatgaacagcctgagagccgaggacaccgccgtgtactattgtgcctctggcgtgtacagcttcgactacagaggccagggcaccctggtcacagtctcttctacgcgtggcagcgaagtgaaaaccgactccaccgaccacgtgaagcccaaagagacagagaacaccaagcagcccagcaagagctgccacaagcccaaggccatcgtgcacaccgagaaagtgaacatgatgagcctgaccgtgctgggcctgcggatgctgttcgccaaaaccgtggccgtgaacttcctgctgaccgccaagctgttcttcctccgcgccaagagaagcggatctggcgtgaagcagaccctgaatttcgacctgctgaagctggctggcgacgtggaatccaacccaggcccttctagaggccatatgaccgagtacaagcccacggtgcgcctcgccacccgcgacgacgtccccagggccgtacgcaccctcgccgccgcgttcgccgactaccccgccacgcgccacaccgtcgatccggaccgccacatcgagcgggtcaccgagctgcaagaactcttcctcacgcgcgtcgggctcgacatcggcaaggtgtgggtcgcggacgacggcgccgcggtggcggtctggaccacgccggagagcgtcgaagcgggggcggtgttcgccgagatcggcccgcgcatggccgagttgagcggttcccggctggccgcgcagcaacagatggaaggcctcctggcgccgcaccggcccaaggagcccgcgtggttcctggccaccgtcggcgtctcgcccgaccaccagggcaagggtctgggcagcgccgtcgtgctccccggagtggaggcggccgagcgcgccggggtgcccgccttcctggagacctccgcgccccgcaacctccccttctacgagcggctcggcttcaccgtcaccgccgacgtcgaggtgcccgaaggaccgcgcacctggtgcatgacccgcaagcccggtgcctga

SEQ ID NO: 7045 - DNA, 2073 bp, Artificial Sequence
  Synthetic Polynucloetide
atggccttaccagtgaccgccttgctcctgccgctggccttgctgctccacgccgccaggccggaagtgcagctgcttgaaagtggcggcggactgattcagcctggcggatctctgagactgagctgtgccgccagcggcttcaccttttctagccacgccatgacctgggtccgacaggcacctggaaaagggcttgaatgggtgtccgccatcagcggctctggcgattacacacactacgccgacagcgtgaagggcagattcaccatcagcagagacaacagcaagaacaccgtgtacctccagatgaacagcctgagagccgaggacagcgccgtgtattattgcgccaaggatgaggatggcggcagcctgcttggacacagaggacaaggcaccctggtcaccgtttcttccctcgagggatctcccatcaagaccgatgtgattacaatggaccccaaggacaactgctccaaggacgccaacgataccctgctgctccagctgaccaacaccagcgcctactacatgtacttgttgctgctgctgaagtccgtggtgtacttcgccatcatcacatgctgcctgctgcggagaaccgccttctgctgcaacggcgagaagtctagggccaagcgatctggatctggagcaacaaacttctcactactcaaacaagcaggtgacgtggaggagaatcccgggcctactagtatggactggatttggcgcatccttttccttgtcggcgctgctaccggcgcgcattccttcgaagtgcagctggttgaatctggcggaggactggttcagcctggcggatctctgagactgtcttgtgccgccagcggcttcagcttcagcgacttttggatgagctgggtccgacaggcccctggcaaaggacttgaatgggtcgccacaatcagccaggccggcagcgagaaggactacgtggactctgtgaagggcagattcaccatcagccgggacaacgccaagaagtccctgtacctccagatgaacagcctgagagccgaggacaccgccgtgtactattgtgcctctggcgtgtacagcttcgactacagaggccagggcaccctggtcacagtctcttctacgcgtgataaaactcatacctgtccgccatgcccggcagaagtgaaaaccgactccaccgaccacgtgaagcccaaagagacagagaacaccaagcagcccagcaagagctgccacaagcccaaggccatcgtgcacaccgagaaagtgaacatgatgagcctgaccgtgctgggcctgcggatgctgttcgccaaaaccgtggccgtgaacttcctgctgaccgccaagctgttcttcctccgcgccaagagaagcggatctggcgtgaagcagaccctgaatttcgacctgctgaagctggctggcgacgtggaatccaacccaggcccttctagaggccatatgaccgagtacaagcccacggtgcgcctcgccacccgcgacgacgtccccagggccgtacgcaccctcgccgccgcgttcgccgactaccccgccacgcgccacaccgtcgatccggaccgccacatcgagcgggtcaccgagctgcaagaactcttcctcacgcgcgtcgggctcgacatcggcaaggtgtgggtcgcggacgacggcgccgcggtggcggtctggaccacgccggagagcgtcgaagcgggggcggtgttcgccgagatcggcccgcgcatggccgagttgagcggttcccggctggccgcgcagcaacagatggaaggcctcctggcgccgcaccggcccaaggagcccgcgtggttcctggccaccgtcggcgtctcgcccgaccaccagggcaagggtctgggcagcgccgtcgtgctccccggagtggaggcggccgagcgcgccggggtgcccgccttcctggagacctccgcgccccgcaacctccccttctacgagcggctcggcttcaccgtcaccgccgacgtcgaggtgcccgaaggaccgcgcacctggtgcatgacccgcaagcccggtgcctga

SEQ ID NO: 7046 - DNA, 2100 bp, Artificial Sequence
  Synthetic Polynucloetide
atggccttaccagtgaccgccttgctcctgccgctggccttgctgctccacgccgccaggccggaagtgcagctgcttgaaagtggcggcggactgattcagcctggcggatctctgagactgagctgtgccgccagcggcttcaccttttctagccacgccatgacctgggtccgacaggcacctggaaaagggcttgaatgggtgtccgccatcagcggctctggcgattacacacactacgccgacagcgtgaagggcagattcaccatcagcagagacaacagcaagaacaccgtgtacctccagatgaacagcctgagagccgaggacagcgccgtgtattattgcgccaaggatgaggatggcggcagcctgcttggacacagaggacaaggcaccctggtcaccgtttcttccctcgaggacaaaactcacacatgcccaccgtgcccagcacccatcaagaccgatgtgattacaatggaccccaaggacaactgctccaaggacgccaacgataccctgctgctccagctgaccaacaccagcgcctactacatgtacttgttgctgctgctgaagtccgtggtgtacttcgccatcatcacatgctgcctgctgcggagaaccgccttctgctgcaacggcgagaagtctagggccaagcgatctggatctggagcaacaaacttctcactactcaaacaagcaggtgacgtggaggagaatcccgggcctactagtatggactggatttggcgcatccttttccttgtcggcgctgctaccggcgcgcattccttcgaagtgcagctggttgaatctggcggaggactggttcagcctggcggatctctgagactgtcttgtgccgccagcggcttcagcttcagcgacttttggatgagctgggtccgacaggcccctggcaaaggacttgaatgggtcgccacaatcagccaggccggcagcgagaaggactacgtggactctgtgaagggcagattcaccatcagccgggacaacgccaagaagtccctgtacctccagatgaacagcctgagagccgaggacaccgccgtgtactattgtgcctctggcgtgtacagcttcgactacagaggccagggcaccctggtcacagtctcttctacgcgtgataaaactcatacctgtccgccatgcccggcagaagtgaaaaccgactccaccgaccacgtgaagcccaaagagacagagaacaccaagcagcccagcaagagctgccacaagcccaaggccatcgtgcacaccgagaaagtgaacatgatgagcctgaccgtgctgggcctgcggatgctgttcgccaaaaccgtggccgtgaacttcctgctgaccgccaagctgttcttcctccgcgccaagagaagcggatctggcgtgaagcagaccctgaatttcgacctgctgaagctggctggcgacgtggaatccaacccaggcccttctagaggccatatgaccgagtacaagcccacggtgcgcctcgccacccgcgacgacgtccccagggccgtacgcaccctcgccgccgcgttcgccgactaccccgccacgcgccacaccgtcgatccggaccgccacatcgagcgggtcaccgagctgcaagaactcttcctcacgcgcgtcgggctcgacatcggcaaggtgtgggtcgcggacgacggcgccgcggtggcggtctggaccacgccggagagcgtcgaagcgggggcggtgttcgccgagatcggcccgcgcatggccgagttgagcggttcccggctggccgcgcagcaacagatggaaggcctcctggcgccgcaccggcccaaggagcccgcgtggttcctggccaccgtcggcgtctcgcccgaccaccagggcaagggtctgggcagcgccgtcgtgctccccggagtggaggcggccgagcgcgccggggtgcccgccttcctggagacctccgcgccccgcaacctccccttctacgagcggctcggcttcaccgtcaccgccgacgtcgaggtgcccgaaggaccgcgcacctggtgcatgacccgcaagcccggtgcctga

SEQ ID NO: 7047 - DNA, 1398 bp, Artificial Sequence
  Synthetic Polynucloetide
atggccttaccagtgaccgccttgctcctgccgctggccttgctgctccacgccgccaggccggaagtgcagctgcttgaaagtggcggcggactgattcagcctggcggatctctgagactgagctgtgccgccagcggcttcaccttttctagccacgccatgacctgggtccgacaggcacctggaaaagggcttgaatgggtgtccgccatcagcggctctggcgattacacacactacgccgacagcgtgaagggcagattcaccatcagcagagacaacagcaagaacaccgtgtacctccagatgaacagcctgagagccgaggacagcgccgtgtattattgcgccaaggatgaggatggcggcagcctgcttggacacagaggacaaggcaccctggtcaccgtttcttccctcgaggacaaaactcacacatgcccaccgtgcccagcacccatcaagaccgatgtgattacaatggaccccaaggacaactgctccaaggacgccaacgataccctgctgctccagctgaccaacaccagcgcctactacatgtacttgttgctgctgctgaagtccgtggtgtacttcgccatcatcacatgctgcctgctgcggagaaccgccttctgctgcaacggcgagaagtctagggccaagcgatctggatctggagcaacaaacttctcactactcaaacaagcaggtgacgtggaggagaatcccgggcctactagtatggactggatttggcgcatccttttccttgtcggcgctgctaccggcgcgcattccttcgaagtgcagctggttgaatctggcggaggactggttcagcctggcggatctctgagactgtcttgtgccgccagcggcttcagcttcagcgacttttggatgagctgggtccgacaggcccctggcaaaggacttgaatgggtcgccacaatcagccaggccggcagcgagaaggactacgtggactctgtgaagggcagattcaccatcagccgggacaacgccaagaagtccctgtacctccagatgaacagcctgagagccgaggacaccgccgtgtactattgtgcctctggcgtgtacagcttcgactacagaggccagggcaccctggtcacagtctcttctacgcgtgataaaactcatacctgtccgccatgcccggcagaagtgaaaaccgactccaccgaccacgtgaagcccaaagagacagagaacaccaagcagcccagcaagagctgccacaagcccaaggccatcgtgcacaccgagaaagtgaacatgatgagcctgaccgtgctgggcctgcggatgctgttcgccaaaaccgtggccgtgaacttcctgctgaccgccaagctgttcttcctc

SEQ ID NO: 7048 - DNA, 2199 bp, Artificial Sequence
  Synthetic Polynucloetide
atggccttaccagtgaccgccttgctcctgccgctggccttgctgctccacgccgccaggccgcaggtgcagctggttgaatctggcggaggactggttcagcctggcggatctctgagactgtcttgtgccgccagcggcttcaccttcaccaatcacgccatgagctgggtccgacaggcccctggaaaaggactggaactggtgtctagcatcagcggcaacggcagaaccacctactacgccgatagcgtgaagggcagattcaccatcagccgggacatcagcaagaacaccctggacctccagatgaacagcctgagagccgaggataccgccgtgtactactgtgccaaggatggcggagagacactggtggatagcagaggccagggcacactggtcacagtgtcatctctcgagagcggcggaggcggatctttcgaagaagttcagctgcttgagtctggcggaggactggttcaacctggcggaagcctgagactgtcttgtgccgccagcggcttcatcttcagcagctacgccatgagctgggtccgacaggctcctggaaagggccaagaatgggtttccggcgttagcggcacaggcgtgaacacctactacgccgatagcgtgaagggcagattcaccatcagccgggacaacagcaagaacaccctgtacctccagatgaacagcctgagagccgaggacaccgccgtgtactattgtgcctctggcaaaggctgggacagcggctcttggtacgaggactatagaggccagggcaccctggtcacagtttcttcaacgcgtgagcagaaactgatctcggaagaggatctggcgaagcccaccacgacgccagcgccgcgaccaccaacaccggcgcccaccatcgcgtcgcagcccctgtccctgcgcccagaggcgtgccggccagcggcggggggcgcagtgcacacgagggggctggacttcgcctgtgacatctacatctgggcgcccttggccgggacttgtggggtccttctcctgtcactggttatcaccctttactgcaaacggggcagaaagaaactcctgtatatattcaaacaaccatttatgagaccagtacaaactactcaagaggaagatggctgtagctgccgatttccagaagaagaagaaggaggatgtgaactgagagtgaagttcagcaggagcgcagacgcccccgcgtaccagcagggccagaaccagctctataacgagctgaatctaggacgaagagaggagtacgatgttttggacaagagacgtggccgggaccctgagatggggggaaagccgagaaggaagaaccctcaggaaggcctgtacaatgaactgcagaaagataagatggcggaggcctacagtgagattgggatgaaaggcgagcgccggaggggcaaggggcacgatggcctttaccagggtctcagtacagccaccaaggacacctacgacgcccttcacatgcaggccctgccccctcgctctagtggctccggcgagggcagaggaagtctactaacctgcggagatgtggaagaaaatcctggcccacatatgaccgagtacaagcccacggtgcgcctcgccacccgcgacgacgtccccagggccgtacgcaccctcgccgccgcgttcgccgactaccccgccacgcgccacaccgtcgatccggaccgccacatcgagcgggtcaccgagctgcaagaactcttcctcacgcgcgtcgggctcgacatcggcaaggtgtgggtcgcggacgacggcgccgcggtggcggtctggaccacgccggagagcgtcgaagcgggggcggtgttcgccgagatcggcccgcgcatggccgagttgagcggttcccggctggccgcgcagcaacagatggaaggcctcctggcgccgcaccggcccaaggagcccgcgtggttcctggccaccgtcggcgtctcgcccgaccaccagggcaagggtctgggcagcgccgtcgtgctccccggagtggaggcggccgagcgcgccggggtgcccgccttcctggagacctccgcgccccgcaacctccccttctacgagcggctcggcttcaccgtcaccgccgacgtcgaggtgcccgaaggaccgcgcacctggtgcatgacccgcaagcccggtgcctga

SEQ ID NO: 7049 - DNA, 2181 bp, Artificial Sequence
  Synthetic Polynucloetide
atggccttaccagtgaccgccttgctcctgccgctggccttgctgctccacgccgccaggccgcaggtgcagctggttgaatctggcggaggactggttcagcctggcggatctctgagactgtcttgtgccgccagcggcttcaccttcaccaatcacgccatgagctgggtccgacaggcccctggaaaaggactggaactggtgtctagcatcagcggcaacggcagaaccacctactacgccgatagcgtgaagggcagattcaccatcagccgggacatcagcaagaacaccctggacctccagatgaacagcctgagagccgaggataccgccgtgtactactgtgccaaggatggcggagagacactggtggatagcagaggccagggcacactggtcacagtgtcatctctcgagagcggcggaggcggatctttcgaagaagttcagctgcttgagtctggcggaggactggttcaacctggcggaagcctgagactgtcttgtgccgccagcggcttcatcttcagcagctacgccatgagctgggtccgacaggctcctggaaagggccaagaatgggtttccggcgttagcggcacaggcgtgaacacctactacgccgatagcgtgaagggcagattcaccatcagccgggacaacagcaagaacaccctgtacctccagatgaacagcctgagagccgaggacaccgccgtgtactattgtgcctctggcaaaggctgggacagcggctcttggtacgaggactatagaggccagggcaccctggtcacagtttcttcaacgcgtgagcagaaactgatctcggaagaggatctgaaaattgaagttatgtatcctcctccttacctagacaatgagaagagcaatggaaccattatccatgtgaaagggaaacacctttgtccaagtcccctatttcccggaccttctaagcccttttgggtgctggtggtggttgggggagtcctggcttgctatagcttgctagtaacagtggcctttattattttctgggtgaggagtaagaggagcaggctcctgcacagtgactacatgaacatgactccacgccgccccggacccacccgcaagcattaccagccctatgccccaccacgcgacttcgcagcctatcgctccagagtgaagttcagcaggagcgcagacgcccccgcgtaccagcagggccagaaccagctctataacgagctcaatctaggacgaagagaggagtacgatgttttggacaagagacgtggccgggaccctgagatggggggaaagccgagaaggaagaaccctcaggaaggcctgtacaatgaactgcagaaagataagatggcggaggcctacagtgagattgggatgaaaggcgagcgccggaggggcaaggggcacgatggcctttaccagggtctcagtacagccaccaaggacacctacgacgcccttcacatgcaggccctgccccctcgctctagtggctccggcgagggcagaggaagtctactaacctgcggagatgtggaagaaaatcctggcccacatatgaccgagtacaagcccacggtgcgcctcgccacccgcgacgacgtccccagggccgtacgcaccctcgccgccgcgttcgccgactaccccgccacgcgccacaccgtcgatccggaccgccacatcgagcgggtcaccgagctgcaagaactcttcctcacgcgcgtcgggctcgacatcggcaaggtgtgggtcgcggacgacggcgccgcggtggcggtctggaccacgccggagagcgtcgaagcgggggcggtgttcgccgagatcggcccgcgcatggccgagttgagcggttcccggctggccgcgcagcaacagatggaaggcctcctggcgccgcaccggcccaaggagcccgcgtggttcctggccaccgtcggcgtctcgcccgaccaccagggcaagggtctgggcagcgccgtcgtgctccccggagtggaggcggccgagcgcgccggggtgcccgccttcctggagacctccgcgccccgcaacctccccttctacgagcggctcggcttcaccgtcaccgccgacgtcgaggtgcccgaaggaccgcgcacctggtgcatgacccgcaagcccggtgcctga

SEQ ID NO: 7050 - DNA, 1509 bp, Artificial Sequence
  Synthetic Polynucloetide
atggccttaccagtgaccgccttgctcctgccgctggccttgctgctccacgccgccaggccgcaggtgcagctggttgaatctggcggaggactggttcagcctggcggatctctgagactgtcttgtgccgccagcggcttcaccttcaccaatcacgccatgagctgggtccgacaggcccctggaaaaggactggaactggtgtctagcatcagcggcaacggcagaaccacctactacgccgatagcgtgaagggcagattcaccatcagccgggacatcagcaagaacaccctggacctccagatgaacagcctgagagccgaggataccgccgtgtactactgtgccaaggatggcggagagacactggtggatagcagaggccagggcacactggtcacagtgtcatctctcgagagcggcggaggcggatctttcgaagaagttcagctgcttgagtctggcggaggactggttcaacctggcggaagcctgagactgtcttgtgccgccagcggcttcatcttcagcagctacgccatgagctgggtccgacaggctcctggaaagggccaagaatgggtttccggcgttagcggcacaggcgtgaacacctactacgccgatagcgtgaagggcagattcaccatcagccgggacaacagcaagaacaccctgtacctccagatgaacagcctgagagccgaggacaccgccgtgtactattgtgcctctggcaaaggctgggacagcggctcttggtacgaggactatagaggccagggcaccctggtcacagtttcttcaacgcgtgagcagaaactgatctcggaagaggatctgaaaattgaagttatgtatcctcctccttacctagacaatgagaagagcaatggaaccattatccatgtgaaagggaaacacctttgtccaagtcccctatttcccggaccttctaagcccttttgggtgctggtggtggttgggggagtcctggcttgctatagcttgctagtaacagtggcctttattattttctgggtgaggagtaagaggagcaggctcctgcacagtgactacatgaacatgactccacgccgccccggacccacccgcaagcattaccagccctatgccccaccacgcgacttcgcagcctatcgctccagagtgaagttcagcaggagcgcagacgcccccgcgtaccagcagggccagaaccagctctataacgagctcaatctaggacgaagagaggagtacgatgttttggacaagagacgtggccgggaccctgagatggggggaaagccgagaaggaagaaccctcaggaaggcctgtacaatgaactgcagaaagataagatggcggaggcctacagtgagattgggatgaaaggcgagcgccggaggggcaaggggcacgatggcctttaccagggtctcagtacagccaccaaggacacctacgacgcccttcacatgcaggccctgccccctcgc

SEQ ID NO: 7051 - DNA, 1530 bp, Artificial Sequence
  Synthetic Polynucloetide
atggccttaccagtgaccgccttgctcctgccgctggccttgctgctccacgccgccaggccgcaggtgcagctggttgaatctggcggaggactggttcagcctggcggatctctgagactgtcttgtgccgccagcggcttcaccttcaccaatcacgccatgagctgggtccgacaggcccctggaaaaggactggaactggtgtctagcatcagcggcaacggcagaaccacctactacgccgatagcgtgaagggcagattcaccatcagccgggacatcagcaagaacaccctggacctccagatgaacagcctgagagccgaggataccgccgtgtactactgtgccaaggatggcggagagacactggtggatagcagaggccagggcacactggtcacagtgtcatctctcgagagcggcggaggcggatctttcgaagaagttcagctgcttgagtctggcggaggactggttcaacctggcggaagcctgagactgtcttgtgccgccagcggcttcatcttcagcagctacgccatgagctgggtccgacaggctcctggaaagggccaagaatgggtttccggcgttagcggcacaggcgtgaacacctactacgccgatagcgtgaagggcagattcaccatcagccgggacaacagcaagaacaccctgtacctccagatgaacagcctgagagccgaggacaccgccgtgtactattgtgcctctggcaaaggctgggacagcggctcttggtacgaggactatagaggccagggcaccctggtcacagtttcttcaacgcgtgagcagaaactgatctcggaagaggatctggcgaagcccaccacgacgccagcgccgcgaccaccaacaccggcgcccaccatcgcgtcgcagcccctgtccctgcgcccagaggcgtgccggccagcggcggggggcgcagtgcacacgagggggctggacttcgcctgtgacatctacatctgggcgcccttggccgggacttgtggggtccttctcctgtcactggttatcaccctttactgcaaacggggcagaaagaaactcctgtatatattcaaacaaccatttatgagaccagtacaaactactcaagaggaagatggctgtagctgccgatttccagaagaagaagaaggaggatgtgaactgagagtgaagttcagcaggagcgcagacgcccccgcgtaccagcagggccagaaccagctctataacgagctgaatctaggacgaagagaggagtacgatgttttggacaagagacgtggccgggaccctgagatggggggaaagccgagaaggaagaaccctcaggaaggcctgtacaatgaactgcagaaagataagatggcggaggcctacagtgagattgggatgaaaggcgagcgccggaggggcaaggggcacgatggcctttaccagggtctcagtacagccaccaaggacacctacgacgcccttcacatgcaggccctgccccctcgctga

SEQ ID NO: 7052 - DNA, 1533 bp, Artificial Sequence
  Synthetic Polynucloetide
atggccttaccagtgaccgccttgctcctgccgctggccttgctgctccacgccgccaggccggaagaagttcagctgcttgagtctggcggaggactggttcaacctggcggaagcctgagactgtcttgtgccgccagcggcttcatcttcagcagctacgccatgagctgggtccgacaggctcctggaaagggccaagaatgggtttccggcgttagcggcacaggcgtgaacacctactacgccgatagcgtgaagggcagattcaccatcagccgggacaacagcaagaacaccctgtacctccagatgaacagcctgagagccgaggacaccgccgtgtactattgtgcctctggcaaaggctgggacagcggctcttggtacgaggactatagaggccagggcaccctggtcacagtttcttcactcgagagcggcggaggcggatctttcgaacaggtgcagctggttgaatctggcggaggactggttcagcctggcggatctctgagactgtcttgtgccgccagcggcttcaccttcaccaatcacgccatgagctgggtccgacaggcccctggaaaaggactggaactggtgtctagcatcagcggcaacggcagaaccacctactacgccgatagcgtgaagggcagattcaccatcagccgggacatcagcaagaacaccctggacctccagatgaacagcctgagagccgaggataccgccgtgtactactgtgccaaggatggcggagagacactggtggatagcagaggccagggcacactggtcacagtgtcatctacgcgtgagcagaaactgatctcggaagaggatctggcgaagcccaccacgacgccagcgccgcgaccaccaacaccggcgcccaccatcgcgtcgcagcccctgtccctgcgcccagaggcgtgccggccagcggcggggggcgcagtgcacacgagggggctggacttcgcctgtgacatctacatctgggcgcccttggccgggacttgtggggtccttctcctgtcactggttatcaccctttactgcaaacggggcagaaagaaactcctgtatatattcaaacaaccatttatgagaccagtacaaactactcaagaggaagatggctgtagctgccgatttccagaagaagaagaaggaggatgtgaactgagagtgaagttcagcaggagcgcagacgcccccgcgtaccagcagggccagaaccagctctataacgagctgaatctaggacgaagagaggagtacgatgttttggacaagagacgtggccgggaccctgagatggggggaaagccgagaaggaagaaccctcaggaaggcctgtacaatgaactgcagaaagataagatggcggaggcctacagtgagattgggatgaaaggcgagcgccggaggggcaaggggcacgatggcctttaccagggtctcagtacagccaccaaggacacctacgacgcccttcacatgcaggccctgccccctcgctga

SEQ ID NO: 7053 - DNA, 2769 bp, Artificial Sequence
  Synthetic Polynucloetide
atggccttaccagtgaccgccttgctcctgccgctggccttgctgctccacgccgccaggccgcaggtgcagctggttgaatctggcggaggactggttcagcctggcggatctctgagactgtcttgtgccgccagcggcttcaccttcaccaatcacgccatgagctgggtccgacaggcccctggaaaaggactggaactggtgtctagcatcagcggcaacggcagaaccacctactacgccgatagcgtgaagggcagattcaccatcagccgggacatcagcaagaacaccctggacctccagatgaacagcctgagagccgaggataccgccgtgtactactgtgccaaggatggcggagagacactggtggatagcagaggccagggcacactggtcacagtgtcatctctcgagagcggcggaggcggatctttcgaagaagttcagctgcttgagtctggcggaggactggttcaacctggcggaagcctgagactgtcttgtgccgccagcggcttcatcttcagcagctacgccatgagctgggtccgacaggctcctggaaagggccaagaatgggtttccggcgttagcggcacaggcgtgaacacctactacgccgatagcgtgaagggcagattcaccatcagccgggacaacagcaagaacaccctgtacctccagatgaacagcctgagagccgaggacaccgccgtgtactattgtgcctctggcaaaggctgggacagcggctcttggtacgaggactatagaggccagggcaccctggtcacagtttcttcaacgcgtgagcagaaactgatctcggaagaggatctggcgaagcccaccacgacgccagcgccgcgaccaccaacaccggcgcccaccatcgcgtcgcagcccctgtccctgcgcccagaggcgtgccggccagcggcggggggcgcagtgcacacgagggggctggacttcgcctgtgacatctacatctgggcgcccttggccgggacttgtggggtccttctcctgtcactggttatcaccctttactgcgggcgcgccagagtgaagttcagcaggagcgcagacgcccccgcgtaccagcagggccagaaccagctctataacgagctgaatctaggacgaagagaggagtacgatgttttggacaagagacgtggccgggaccctgagatggggggaaagccgagaaggaagaaccctcaggaaggcctgtacaatgaactgcagaaagataagatggcggaggcctacagtgagattgggatgaaaggcgagcgccggaggggcaaggggcacgatggcctttaccagggtctcagtacagccaccaaggacacctacgacgcccttcacatgcaggccctgccccctcgctctagaggatctggagcaacaaacttctcactactcaaacaagcaggtgacgtggaggagaatcccgggcctgggatccacatggccacttacgaggttctctgtgaggtggcgcggaaactgggcacggatgacagggaagtggtattgttcctcctaaacgtgttcatacctcaacccacactggcccaattaattggagctcttagagctttaaaggaggagggcaggttaacgtttcccctgttagcggaatgtctgtttcgtgcaggtcgcagagacctcttgcgcgacctgcttcacttagacccgcgttttttagagcgccacctagcgggcacaatgagttatttcagcccttatcagctcactgttctccacgtagacggggagctgtgtgcgagggatattaggtctttgatatttttaagcaaggacactatagggtctcgcagcacaccacagacattcttacactgggtgtactgtatggaaaacttagacctactgggtcccactgacgtggatgccctaatgtcaatgcttagatctttgtcaagagtagacctacagcgccaagtgcaaaccctaatgggccttcacctttccggcccatcacactcccaacactatcgccatacaccactcgagaccgatttctacgactacaaggacgacgatgacaagactagtggctccggcgagggcagaggaagtctactaacctgcggagatgtggaagaaaatcctggcccacatatgaccgagtacaagcccacggtgcgcctcgccacccgcgacgacgtccccagggccgtacgcaccctcgccgccgcgttcgccgactaccccgccacgcgccacaccgtcgatccggaccgccacatcgagcgggtcaccgagctgcaagaactcttcctcacgcgcgtcgggctcgacatcggcaaggtgtgggtcgcggacgacggcgccgcggtggcggtctggaccacgccggagagcgtcgaagcgggggcggtgttcgccgagatcggcccgcgcatggccgagttgagcggttcccggctggccgcgcagcaacagatggaaggcctcctggcgccgcaccggcccaaggagcccgcgtggttcctggccaccgtcggcgtctcgcccgaccaccagggcaagggtctgggcagcgccgtcgtgctccccggagtggaggcggccgagcgcgccggggtgcccgccttcctggagacctccgcgccccgcaacctccccttctacgagcggctcggcttcaccgtcaccgccgacgtcgaggtgcccgaaggaccgcgcacctggtgcatgacccgcaagcccggtgcctga

SEQ ID NO: 7054 - DNA, 2604 bp, Artificial Sequence
  Synthetic Polynucloetide
atggccttaccagtgaccgccttgctcctgccgctggccttgctgctccacgccgccaggccgcaggtgcagctggttgaatctggcggaggactggttcagcctggcggatctctgagactgtcttgtgccgccagcggcttcaccttcaccaatcacgccatgagctgggtccgacaggcccctggaaaaggactggaactggtgtctagcatcagcggcaacggcagaaccacctactacgccgatagcgtgaagggcagattcaccatcagccgggacatcagcaagaacaccctggacctccagatgaacagcctgagagccgaggataccgccgtgtactactgtgccaaggatggcggagagacactggtggatagcagaggccagggcacactggtcacagtgtcatctctcgagatccagaaccctgatcctgccgtgtaccagctgcgggatagcaagagcagcgacaagagcgtgtgtctgttcaccgacttcgacagccagaccaacgtgtcccagagcaaggactccgacgtgtacatcaccgataagtgcgtgctggacatgcggagcatggacttcaagagcaactccgccgtggcctggtccaacaagtccgatttcgcctgcgccaacgccttcaacaacagcattatccccgaggacacattcttcccaagcagcgacgtgccctgcgacgtgaagctggtggaaaagagcttcgagacagacaccaacctgaacttccagaacctgagcgtgatcggcttcagaatcctgctgctgaaagtggccggctttaacctgctgatgaccctgcggctgtggtccagccgcgccaagagaagcggatctggcgtgaagcagaccctgaatttcgacctgctgaagctggctggcgacgtggaatccaacccaggccctactagtatggactggatttggcgcatccttttccttgtcggcgctgctaccggcgcgcattccttcgaagaagttcagctgcttgagtctggcggaggactggttcaacctggcggaagcctgagactgtcttgtgccgccagcggcttcatcttcagcagctacgccatgagctgggtccgacaggctcctggaaagggccaagaatgggtttccggcgttagcggcacaggcgtgaacacctactacgccgatagcgtgaagggcagattcaccatcagccgggacaacagcaagaacaccctgtacctccagatgaacagcctgagagccgaggacaccgccgtgtactattgtgcctctggcaaaggctgggacagcggctcttggtacgaggactatagaggccagggcaccctggtcacagtttcttcaacgcgtgaggacctgaagaacgtgttcccacctgaggtggccgtgttcgagcctagcaaggccgagatcgcccacacccagaaagccaccctcgtgtgcctggctaccggcttctaccccgaccatgtggaactgtcttggtgggtcaacggcaaagaggtgcacagcggcgtgtgtaccgacccccagccactgaaagaacagcccgccctgaacgacagccggtactgcctgagcagcagactgagagtgtccgccaccttctggcagaacccccggaaccacttcagatgccaggtgcagttctacggcctgagcgagaacgacgagtggacccaggacagagccaagcccgtgacccagatcgtgtctgccgaagcctggggcagagccgattgcggcatcaccagcgccagctaccaccagggcgtgctgagcgccaccatcctgtacgagatcctgctgggcaaggccaccctgtacgccgtgctggtgtctgccctggtgctgatggctatggtcaagcggaaggacagccggggaagggccaagcgatctggatctggagcaacaaacttctcactactcaaacaagcaggtgacgtggaggagaatcccgggccttctagaggccatatgaccgagtacaagcccacggtgcgcctcgccacccgcgacgacgtccccagggccgtacgcaccctcgccgccgcgttcgccgactaccccgccacgcgccacaccgtcgatccggaccgccacatcgagcgggtcaccgagctgcaagaactcttcctcacgcgcgtcgggctcgacatcggcaaggtgtgggtcgcggacgacggcgccgcggtggcggtctggaccacgccggagagcgtcgaagcgggggcggtgttcgccgagatcggcccgcgcatggccgagttgagcggttcccggctggccgcgcagcaacagatggaaggcctcctggcgccgcaccggcccaaggagcccgcgtggttcctggccaccgtcggcgtctcgcccgaccaccagggcaagggtctgggcagcgccgtcgtgctccccggagtggaggcggccgagcgcgccggggtgcccgccttcctggagacctccgcgccccgcaacctccccttctacgagcggctcggcttcaccgtcaccgccgacgtcgaggtgcccgaaggaccgcgcacctggtgcatgacccgcaagcccggtgcctga

SEQ ID NO: 7055 - DNA, 2601 bp, Artificial Sequence
  Synthetic Polynucloetide
atggccttaccagtgaccgccttgctcctgccgctggccttgctgctccacgccgccaggccgcaggtgcagctggttgaatctggcggaggactggttcagcctggcggatctctgagactgtcttgtgccgccagcggcttcaccttcaccaatcacgccatgagctgggtccgacaggcccctggaaaaggactggaactggtgtctagcatcagcggcaacggcagaaccacctactacgccgatagcgtgaagggcagattcaccatcagccgggacatcagcaagaacaccctggacctccagatgaacagcctgagagccgaggataccgccgtgtactactgtgccaaggatggcggagagacactggtggatagcagaggccagggcacactggtcacagtgtcatctctcgaggacctgaagaacgtgttcccacctgaggtggccgtgttcgagcctagcaaggccgagatcgcccacacccagaaagccaccctcgtgtgcctggctaccggcttctaccccgaccatgtggaactgtcttggtgggtcaacggcaaagaggtgcacagcggcgtgtgtaccgacccccagccactgaaagaacagcccgccctgaacgacagccggtactgcctgagcagcagactgagagtgtccgccaccttctggcagaacccccggaaccacttcagatgccaggtgcagttctacggcctgagcgagaacgacgagtggacccaggacagagccaagcccgtgacccagatcgtgtctgccgaagcctggggcagagccgattgcggcatcaccagcgccagctaccaccagggcgtgctgagcgccaccatcctgtacgagatcctgctgggcaaggccaccctgtacgccgtgctggtgtctgccctggtgctgatggctatggtcaagcggaaggacagccggggaagggccaagcgatctggatctggagcaacaaacttctcactactcaaacaagcaggtgacgtggaggagaatcccgggcctactagtatggactggatttggcgcatccttttccttgtcggcgctgctaccggcgcgcattccttcgaagaagttcagctgcttgagtctggcggaggactggttcaacctggcggaagcctgagactgtcttgtgccgccagcggcttcatcttcagcagctacgccatgagctgggtccgacaggctcctggaaagggccaagaatgggtttccggcgttagcggcacaggcgtgaacacctactacgccgatagcgtgaagggcagattcaccatcagccgggacaacagcaagaacaccctgtacctccagatgaacagcctgagagccgaggacaccgccgtgtactattgtgcctctggcaaaggctgggacagcggctcttggtacgaggactatagaggccagggcaccctggtcacagtttcttcaacgcgtatccagaaccctgatcctgccgtgtaccagctgcgggatagcaagagcagcgacaagagcgtgtgtctgttcaccgacttcgacagccagaccaacgtgtcccagagcaaggactccgacgtgtacatcaccgataagtgcgtgctggacatgcggagcatggacttcaagagcaactccgccgtggcctggtccaacaagtccgatttcgcctgcgccaacgccttcaacaacagcattatccccgaggacacattcttcccaagcagcgacgtgccctgcgacgtgaagctggtggaaaagagcttcgagacagacaccaacctgaacttccagaacctgagcgtgatcggcttcagaatcctgctgctgaaagtggccggctttaacctgctgatgaccctgcggctgtggtccagccgcgccaagagaagcggatctggcgtgaagcagaccctgaatttcgacctgctgaagctggctggcgacgtggaatccaacccaggcccttctagaggccatatgaccgagtacaagcccacggtgcgcctcgccacccgcgacgacgtccccagggccgtacgcaccctcgccgccgcgttcgccgactaccccgccacgcgccacaccgtcgatccggaccgccacatcgagcgggtcaccgagctgcaagaactcttcctcacgcgcgtcgggctcgacatcggcaaggtgtgggtcgcggacgacggcgccgcggtggcggtctggaccacgccggagagcgtcgaagcgggggcggtgttcgccgagatcggcccgcgcatggccgagttgagcggttcccggctggccgcgcagcaacagatggaaggcctcctggcgccgcaccggcccaaggagcccgcgtggttcctggccaccgtcggcgtctcgcccgaccaccagggcaagggtctgggcagcgccgtcgtgctccccggagtggaggcggccgagcgcgccggggtgcccgccttcctggagacctccgcgccccgcaacctccccttctacgagcggctcggcttcaccgtcaccgccgacgtcgaggtgcccgaaggaccgcgcacctggtgcatgacccgcaagcccggtgcctga

SEQ ID NO: 7056 - DNA, 1899 bp, Artificial Sequence
  Synthetic Polynucloetide
atggccttaccagtgaccgccttgctcctgccgctggccttgctgctccacgccgccaggccgcaggtgcagctggttgaatctggcggaggactggttcagcctggcggatctctgagactgtcttgtgccgccagcggcttcaccttcaccaatcacgccatgagctgggtccgacaggcccctggaaaaggactggaactggtgtctagcatcagcggcaacggcagaaccacctactacgccgatagcgtgaagggcagattcaccatcagccgggacatcagcaagaacaccctggacctccagatgaacagcctgagagccgaggataccgccgtgtactactgtgccaaggatggcggagagacactggtggatagcagaggccagggcacactggtcacagtgtcatctctcgaggacctgaagaacgtgttcccacctgaggtggccgtgttcgagcctagcgaggccgagatcagccacacccagaaagccaccctcgtgtgcctggctaccggcttctaccccgaccatgtggaactgtcttggtgggtcaacggcaaagaggtgcacagcggcgtgtgtaccgacccccagccactgaaagaacagcccgccctgaacgacagccggtactgcctgagcagcagactgagagtgtccgccaccttctggcagaacccccggaaccacttcagatgccaggtgcagttctacggcctgagcgagaacgacgagtggacccaggacagagccaagcccgtgacccagatcgtgtctgccgaagcctggggcagagccgattgcggctttaccagcgagagctaccagcagggcgtgctgagcgccaccatcctgtacgagatcctgctgggcaaggccaccctgtacgccgtgctggtgtctgccctggtgctgatggctatggtcaagcggaaggacagccggggaagggccaagcgatctggatctggagcaacaaacttctcactactcaaacaagcaggtgacgtggaggagaatcccgggcctactagtatggactggatttggcgcatccttttccttgtcggcgctgctaccggcgcgcattccttcgaagaagttcagctgcttgagtctggcggaggactggttcaacctggcggaagcctgagactgtcttgtgccgccagcggcttcatcttcagcagctacgccatgagctgggtccgacaggctcctggaaagggccaagaatgggtttccggcgttagcggcacaggcgtgaacacctactacgccgatagcgtgaagggcagattcaccatcagccgggacaacagcaagaacaccctgtacctccagatgaacagcctgagagccgaggacaccgccgtgtactattgtgcctctggcaaaggctgggacagcggctcttggtacgaggactatagaggccagggcaccctggtcacagtttcttcaacgcgtatccagaaccctgatcctgccgtgtaccagctgcgggatagcaagagcagcgacaagagcgtgtgtctgttcaccgacttcgacagccagaccaacgtgtcccagagcaaggactccgacgtgtacatcaccgataagtgcgtgctggacatgcggagcatggacttcaagagcaactccgccgtggcctggtccaacaagtccgatttcgcctgcgccaacgccttcaacaacagcattatccccgaggacacattcttcccaagccccgagagcagctgcgacgtgaagctggtggaaaagagcttcgagacagacaccaacctgaacttccagaacctgagcgtgatcggcttcagaatcctgctgctgaaagtggccggctttaacctgctgatgaccctgcggctgtggtccagc

SEQ ID NO: 7057 - DNA, 2574 bp, Artificial Sequence
  Synthetic Polynucloetide
atggccttaccagtgaccgccttgctcctgccgctggccttgctgctccacgccgccaggccgcaggtgcagctggttgaatctggcggaggactggttcagcctggcggatctctgagactgtcttgtgccgccagcggcttcaccttcaccaatcacgccatgagctgggtccgacaggcccctggaaaaggactggaactggtgtctagcatcagcggcaacggcagaaccacctactacgccgatagcgtgaagggcagattcaccatcagccgggacatcagcaagaacaccctggacctccagatgaacagcctgagagccgaggataccgccgtgtactactgtgccaaggatggcggagagacactggtggatagcagaggccagggcacactggtcacagtgtcatctctcgaggacctgaagaacgtgttcccacctgaggtggccgtgttcgagcctagcgaggccgagatcagccacacccagaaagccaccctcgtgtgcctggctaccggcttctaccccgaccatgtggaactgtcttggtgggtcaacggcaaagaggtgcacagcggcgtgtgtaccgacccccagccactgaaagaacagcccgccctgaacgacagccggtactgcctgagcagcagactgagagtgtccgccaccttctggcagaacccccggaaccacttcagatgccaggtgcagttctacggcctgagcgagaacgacgagtggacccaggacagagccaagcccgtgacccagatcgtgtctgccgaagcctggggcagagccgattgcggctttaccagcgagagctaccagcagggcgtgctgagcgccaccatcctgtacgagatcctgctgggcaaggccaccctgtacgccgtgctggtgtctgccctggtgctgatggctatggtcaagcggaaggacagccggggaagggccaagcgatctggatctggagcaacaaacttctcactactcaaacaagcaggtgacgtggaggagaatcccgggcctactagtatggactggatttggcgcatccttttccttgtcggcgctgctaccggcgcgcattccttcgaagaagttcagctgcttgagtctggcggaggactggttcaacctggcggaagcctgagactgtcttgtgccgccagcggcttcatcttcagcagctacgccatgagctgggtccgacaggctcctggaaagggccaagaatgggtttccggcgttagcggcacaggcgtgaacacctactacgccgatagcgtgaagggcagattcaccatcagccgggacaacagcaagaacaccctgtacctccagatgaacagcctgagagccgaggacaccgccgtgtactattgtgcctctggcaaaggctgggacagcggctcttggtacgaggactatagaggccagggcaccctggtcacagtttcttcaacgcgtatccagaaccctgatcctgccgtgtaccagctgcgggatagcaagagcagcgacaagagcgtgtgtctgttcaccgacttcgacagccagaccaacgtgtcccagagcaaggactccgacgtgtacatcaccgataagtgcgtgctggacatgcggagcatggacttcaagagcaactccgccgtggcctggtccaacaagtccgatttcgcctgcgccaacgccttcaacaacagcattatccccgaggacacattcttcccaagccccgagagcagctgcgacgtgaagctggtggaaaagagcttcgagacagacaccaacctgaacttccagaacctgagcgtgatcggcttcagaatcctgctgctgaaagtggccggctttaacctgctgatgaccctgcggctgtggtccagccgcgccaagagaagcggatctggcgtgaagcagaccctgaatttcgacctgctgaagctggctggcgacgtggaatccaacccaggcccttctagaggcgggatccacaccatggctacctacgaggtgctgtgcgaggtggcaagaaagctgggcaccgacgacagagaagtggtgctgttcctgctgaacgtgttcatccctcagcctacactggcccagctgatcggtgcactgagagccctgaaagaggaaggccggctgacctttcctctgctggccgaatgcctgttcagagccggaagaagggatctgctgcgggacctgctgcatctggaccccagatttctggaaagacacctggccggcaccatgagctacttcagcccttaccagctgaccgtgctgcacgttgacggcgaactgtgcgccagagatattcggagcctgatcttcctgagcaaggacaccatcggcagccggtctacccctcagacatttctgcactgggtgtactgcatggaaaacctggacctgctcggccccacagatgtggatgccctgatgtccatgctgagaagcctgagcagagtggacctccagagacaggtgcagacactgatgggactgcacctgagcggacctagccacagccagcactacagacacacccct

SEQ ID NO: 7058 - DNA, 1911 bp, Artificial Sequence
  Synthetic Polynucloetide
atggccttaccagtgaccgccttgctcctgccgctggccttgctgctccacgccgccaggccgcaggtgcagctggttgaatctggcggaggactggttcagcctggcggatctctgagactgtcttgtgccgccagcggcttcaccttcaccaatcacgccatgagctgggtccgacaggcccctggaaaaggactggaactggtgtctagcatcagcggcaacggcagaaccacctactacgccgatagcgtgaagggcagattcaccatcagccgggacatcagcaagaacaccctggacctccagatgaacagcctgagagccgaggataccgccgtgtactactgtgccaaggatggcggagagacactggtggatagcagaggccagggcacactggtcacagtgtcatctctcgagatccagaaccctgatcctgccgtgtaccagctgcgggatagcaagagcagcgacaagagcgtgtgtctgttcaccgacttcgacagccagaccaacgtgtcccagagcaaggactccgacgtgtacatcaccgataagtgcgtgctggacatgcggagcatggacttcaagagcaactccgccgtggcctggtccaacaagtccgatttcgcctgcgccaacgccttcaacaacagcattatccccgaggacacattcttcccaagccccgagagcagctgcgacgtgaagctggtggaaaagagcttcgagacagacaccaacctgaacttccagaacctgagcgtgatcggcttcagaatcctgctgctgaaagtggccggctttaacctgctgatgaccctgcggctgtggtccagccgcgccaagagaagcggatctggcgtgaagcagaccctgaatttcgacctgctgaagctggctggcgacgtggaatccaacccaggccctactagtatggactggatttggcgcatccttttccttgtcggcgctgctaccggcgcgcattccttcgaagaagttcagctgcttgagtctggcggaggactggttcaacctggcggaagcctgagactgtcttgtgccgccagcggcttcatcttcagcagctacgccatgagctgggtccgacaggctcctggaaagggccaagaatgggtttccggcgttagcggcacaggcgtgaacacctactacgccgatagcgtgaagggcagattcaccatcagccgggacaacagcaagaacaccctgtacctccagatgaacagcctgagagccgaggacaccgccgtgtactattgtgcctctggcaaaggctgggacagcggctcttggtacgaggactatagaggccagggcaccctggtcacagtttcttcaacgcgtgaggacctgaagaacgtgttcccacctgaggtggccgtgttcgagcctagcgaggccgagatcagccacacccagaaagccaccctcgtgtgcctggctaccggcttctaccccgaccatgtggaactgtcttggtgggtcaacggcaaagaggtgcacagcggcgtgtgtaccgacccccagccactgaaagaacagcccgccctgaacgacagccggtactgcctgagcagcagactgagagtgtccgccaccttctggcagaacccccggaaccacttcagatgccaggtgcagttctacggcctgagcgagaacgacgagtggacccaggacagagccaagcccgtgacccagatcgtgtctgccgaagcctggggcagagccgattgcggctttaccagcgagagctaccagcagggcgtgctgagcgccaccatcctgtacgagatcctgctgggcaaggccaccctgtacgccgtgctggtgtctgccctggtgctgatggctatggtcaagcggaaggacagccgggga

SEQ ID NO: 7059 - DNA, 2577 bp, Artificial Sequence
  Synthetic Polynucloetide
atggccttaccagtgaccgccttgctcctgccgctggccttgctgctccacgccgccaggccgcaggtgcagctggttgaatctggcggaggactggttcagcctggcggatctctgagactgtcttgtgccgccagcggcttcaccttcaccaatcacgccatgagctgggtccgacaggcccctggaaaaggactggaactggtgtctagcatcagcggcaacggcagaaccacctactacgccgatagcgtgaagggcagattcaccatcagccgggacatcagcaagaacaccctggacctccagatgaacagcctgagagccgaggataccgccgtgtactactgtgccaaggatggcggagagacactggtggatagcagaggccagggcacactggtcacagtgtcatctctcgagatccagaaccctgatcctgccgtgtaccagctgcgggatagcaagagcagcgacaagagcgtgtgtctgttcaccgacttcgacagccagaccaacgtgtcccagagcaaggactccgacgtgtacatcaccgataagtgcgtgctggacatgcggagcatggacttcaagagcaactccgccgtggcctggtccaacaagtccgatttcgcctgcgccaacgccttcaacaacagcattatccccgaggacacattcttcccaagccccgagagcagctgcgacgtgaagctggtggaaaagagcttcgagacagacaccaacctgaacttccagaacctgagcgtgatcggcttcagaatcctgctgctgaaagtggccggctttaacctgctgatgaccctgcggctgtggtccagccgcgccaagagaagcggatctggcgtgaagcagaccctgaatttcgacctgctgaagctggctggcgacgtggaatccaacccaggccctactagtatggactggatttggcgcatccttttccttgtcggcgctgctaccggcgcgcattccttcgaagaagttcagctgcttgagtctggcggaggactggttcaacctggcggaagcctgagactgtcttgtgccgccagcggcttcatcttcagcagctacgccatgagctgggtccgacaggctcctggaaagggccaagaatgggtttccggcgttagcggcacaggcgtgaacacctactacgccgatagcgtgaagggcagattcaccatcagccgggacaacagcaagaacaccctgtacctccagatgaacagcctgagagccgaggacaccgccgtgtactattgtgcctctggcaaaggctgggacagcggctcttggtacgaggactatagaggccagggcaccctggtcacagtttcttcaacgcgtgaggacctgaagaacgtgttcccacctgaggtggccgtgttcgagcctagcgaggccgagatcagccacacccagaaagccaccctcgtgtgcctggctaccggcttctaccccgaccatgtggaactgtcttggtgggtcaacggcaaagaggtgcacagcggcgtgtgtaccgacccccagccactgaaagaacagcccgccctgaacgacagccggtactgcctgagcagcagactgagagtgtccgccaccttctggcagaacccccggaaccacttcagatgccaggtgcagttctacggcctgagcgagaacgacgagtggacccaggacagagccaagcccgtgacccagatcgtgtctgccgaagcctggggcagagccgattgcggctttaccagcgagagctaccagcagggcgtgctgagcgccaccatcctgtacgagatcctgctgggcaaggccaccctgtacgccgtgctggtgtctgccctggtgctgatggctatggtcaagcggaaggacagccggggaagggccaagcgatctggatctggagcaacaaacttctcactactcaaacaagcaggtgacgtggaggagaatcccgggccttctagaggcgggatccacaccatggctacctacgaggtgctgtgcgaggtggcaagaaagctgggcaccgacgacagagaagtggtgctgttcctgctgaacgtgttcatccctcagcctacactggcccagctgatcggtgcactgagagccctgaaagaggaaggccggctgacctttcctctgctggccgaatgcctgttcagagccggaagaagggatctgctgcgggacctgctgcatctggaccccagatttctggaaagacacctggccggcaccatgagctacttcagcccttaccagctgaccgtgctgcacgttgacggcgaactgtgcgccagagatattcggagcctgatcttcctgagcaaggacaccatcggcagccggtctacccctcagacatttctgcactgggtgtactgcatggaaaacctggacctgctcggccccacagatgtggatgccctgatgtccatgctgagaagcctgagcagagtggacctccagagacaggtgcagacactgatgggactgcacctgagcggacctagccacagccagcactacagacacacccct

SEQ ID NO: 7060 - DNA, 2721 bp, Artificial Sequence
  Synthetic Polynucloetide
atggccttaccagtgaccgccttgctcctgccgctggccttgctgctccacgccgccaggccgctcgaggggaaaccaattcccaaccctcttctgggactggattcaaccggcagcggcgaggacctgaagaacgtgttcccacctgaggtggccgtgttcgagcctagcaaggccgagatcgcccacacccagaaagccaccctcgtgtgcctggctaccggcttctaccccgaccatgtggaactgtcttggtgggtcaacggcaaagaggtgcacagcggcgtgtgtaccgacccccagccactgaaagaacagcccgccctgaacgacagccggtactgcctgagcagcagactgagagtgtccgccaccttctggcagaacccccggaaccacttcagatgccaggtgcagttctacggcctgagcgagaacgacgagtggacccaggacagagccaagcccgtgacccagatcgtgtctgccgaagcctggggcagagccgattgcggcatcaccagcgccagctaccaccagggcgtgctgagcgccaccatcctgtacgagatcctgctgggcaaggccaccctgtacgccgtgctggtgtctgccctggtgctgatggctatggtcaagcggaaggacagccggggaagggccaagcgatctggatctggagcaacaaacttctcactactcaaacaagcaggtgacgtggaggagaatcccgggcctactagcatggccttaccagtgaccgccttgctcctgccgctggccttgctgctccacgccgccaggccgcaggtgcagctggttgaatctggcggaggactggttcagcctggcggatctctgagactgtcttgtgccgccagcggcttcaccttcaccaatcacgccatgagctgggtccgacaggcccctggaaaaggactggaactggtgtctagcatcagcggcaacggcagaaccacctactacgccgatagcgtgaagggcagattcaccatcagccgggacatcagcaagaacaccctggacctccagatgaacagcctgagagccgaggataccgccgtgtactactgtgccaaggatggcggagagacactggtggatagcagaggccagggcacactggtcacagtgtcatctctcgagagcggcggaggcggatctttcgaagaagttcagctgcttgagtctggcggaggactggttcaacctggcggaagcctgagactgtcttgtgccgccagcggcttcatcttcagcagctacgccatgagctgggtccgacaggctcctggaaagggccaagaatgggtttccggcgttagcggcacaggcgtgaacacctactacgccgatagcgtgaagggcagattcaccatcagccgggacaacagcaagaacaccctgtacctccagatgaacagcctgagagccgaggacaccgccgtgtactattgtgcctctggcaaaggctgggacagcggctcttggtacgaggactatagaggccagggcaccctggtcacagtttcttcaacgcgtgagcagaaactgatctcggaagaggatgggagcggcatccagaaccctgatcctgccgtgtaccagctgcgggatagcaagagcagcgacaagagcgtgtgtctgttcaccgacttcgacagccagaccaacgtgtcccagagcaaggactccgacgtgtacatcaccgataagtgcgtgctggacatgcggagcatggacttcaagagcaactccgccgtggcctggtccaacaagtccgatttcgcctgcgccaacgccttcaacaacagcattatccccgaggacacattcttcccaagcagcgacgtgccctgcgacgtgaagctggtggaaaagagcttcgagacagacaccaacctgaacttccagaacctgagcgtgatcggcttcagaatcctgctgctgaaagtggccggctttaacctgctgatgaccctgcggctgtggtccagccgcgccaagagaagcggatctggcgtgaagcagaccctgaatttcgacctgctgaagctggctggcgacgtggaatccaacccaggcccttctagaggccatatgaccgagtacaagcccacggtgcgcctcgccacccgcgacgacgtccccagggccgtacgcaccctcgccgccgcgttcgccgactaccccgccacgcgccacaccgtcgatccggaccgccacatcgagcgggtcaccgagctgcaagaactcttcctcacgcgcgtcgggctcgacatcggcaaggtgtgggtcgcggacgacggcgccgcggtggcggtctggaccacgccggagagcgtcgaagcgggggcggtgttcgccgagatcggcccgcgcatggccgagttgagcggttcccggctggccgcgcagcaacagatggaaggcctcctggcgccgcaccggcccaaggagcccgcgtggttcctggccaccgtcggcgtctcgcccgaccaccagggcaagggtctgggcagcgccgtcgtgctccccggagtggaggcggccgagcgcgccggggtgcccgccttcctggagacctccgcgccccgcaacctccccttctacgagcggctcggcttcaccgtcaccgccgacgtcgaggtgcccgaaggaccgcgcacctggtgcatgacccgcaagcccggtgcctga

SEQ ID NO: 7061 - DNA, 2724 bp, Artificial Sequence
  Synthetic Polynucloetide
atggccttaccagtgaccgccttgctcctgccgctggccttgctgctccacgccgccaggccgctcgagcagaaactgatctcggaagaggatctgggctccggcgatcgccctgatcctgccgtgtaccagctgcgggatagcaagagcagcgacaagagcgtgtgtctgttcaccgacttcgacagccagaccaacgtgtcccagagcaaggactccgacgtgtacatcaccgataagtgcgtgctggacatgcggagcatggacttcaagagcaactccgccgtggcctggtccaacaagtccgatttcgcctgcgccaacgccttcaacaacagcattatccccgaggacacattcttcccaagccccgagagcagctgcgacgtgaagctggtggaaaagagcttcgagacagacaccaacctgaacttccagaacctgagcgtgatcggcttcagaatcctgctgctgaaagtggccggctttaacctgctgatgaccctgcggctgtggtccagctctagtcgcgccaagagaagcggatctggcgtgaagcagaccctgaatttcgacctgctgaagctggctggcgacgtggaatccaacccaggccccactagcatggccttaccagtgaccgccttgctcctgccgctggccttgctgctccacgccgccaggccgcaggtgcagctggttgaatctggcggaggactggttcagcctggcggatctctgagactgtcttgtgccgccagcggcttcaccttcaccaatcacgccatgagctgggtccgacaggcccctggaaaaggactggaactggtgtctagcatcagcggcaacggcagaaccacctactacgccgatagcgtgaagggcagattcaccatcagccgggacatcagcaagaacaccctggacctccagatgaacagcctgagagccgaggataccgccgtgtactactgtgccaaggatggcggagagacactggtggatagcagaggccagggcacactggtcacagtgtcatctctcgagagcggcggaggcggatctttcgaagaagttcagctgcttgagtctggcggaggactggttcaacctggcggaagcctgagactgtcttgtgccgccagcggcttcatcttcagcagctacgccatgagctgggtccgacaggctcctggaaagggccaagaatgggtttccggcgttagcggcacaggcgtgaacacctactacgccgatagcgtgaagggcagattcaccatcagccgggacaacagcaagaacaccctgtacctccagatgaacagcctgagagccgaggacaccgccgtgtactattgtgcctctggcaaaggctgggacagcggctcttggtacgaggactatagaggccagggcaccctggtcacagtttcttcaacgcgtgggaaaccaattcccaaccctcttctgggactggattcaaccggcagcggcgaggacctgaagaacgtgttcccacctgaggtggccgtgttcgagcctagcgaggccgagatcagccacacccagaaagccaccctcgtgtgcctggctaccggcttctaccccgaccatgtggaactgtcttggtgggtcaacggcaaagaggtgcacagcggcgtgtgtaccgacccccagccactgaaagaacagcccgccctgaacgacagccggtactgcctgagcagcagactgagagtgtccgccaccttctggcagaacccccggaaccacttcagatgccaggtgcagttctacggcctgagcgagaacgacgagtggacccaggacagagccaagcccgtgacccagatcgtgtctgccgaagcctggggcagagccgattgcggctttaccagcgagagctaccagcagggcgtgctgagcgccaccatcctgtacgagatcctgctgggcaaggccaccctgtacgccgtgctggtgtctgccctggtgctgatggctatggtcaagcggaaggacagccggggaagggccaagcgatctggatctggagcaacaaacttctcactactcaaacaagcaggtgacgtggaggagaatcccgggccttctagaggccatatgaccgagtacaagcccacggtgcgcctcgccacccgcgacgacgtccccagggccgtacgcaccctcgccgccgcgttcgccgactaccccgccacgcgccacaccgtcgatccggaccgccacatcgagcgggtcaccgagctgcaagaactcttcctcacgcgcgtcgggctcgacatcggcaaggtgtgggtcgcggacgacggcgccgcggtggcggtctggaccacgccggagagcgtcgaagcgggggcggtgttcgccgagatcggcccgcgcatggccgagttgagcggttcccggctggccgcgcagcaacagatggaaggcctcctggcgccgcaccggcccaaggagcccgcgtggttcctggccaccgtcggcgtctcgcccgaccaccagggcaagggtctgggcagcgccgtcgtgctccccggagtggaggcggccgagcgcgccggggtgcccgccttcctggagacctccgcgccccgcaacctccccttctacgagcggctcggcttcaccgtcaccgccgacgtcgaggtgcccgaaggaccgcgcacctggtgcatgacccgcaagcccggtgcctga

SEQ ID NO: 7062 - DNA, 2601 bp, Artificial Sequence
  Synthetic Polynucloetide
atggccttaccagtgaccgccttgctcctgccgctggccttgctgctccacgccgccaggccgcaggtgcagctggttgaatctggcggaggactggttcagcctggcggatctctgagactgtcttgtgccgccagcggcttcaccttcaccaatcacgccatgagctgggtccgacaggcccctggaaaaggactggaactggtgtctagcatcagcggcaacggcagaaccacctactacgccgatagcgtgaagggcagattcaccatcagccgggacatcagcaagaacaccctggacctccagatgaacagcctgagagccgaggataccgccgtgtactactgtgccaaggatggcggagagacactggtggatagcagaggccagggcacactggtcacagtgtcatctctcgaggacctgaagaacgtgttcccacctgaggtggccgtgttcgagcctagcgaggccgagatcagccacacccagaaagccaccctcgtgtgcctggctaccggcttctaccccgaccatgtggaactgtcttggtgggtcaacggcaaagaggtgcacagcggcgtgtctaccgacccccagccactgaaagaacagcccgccctgaacgacagccggtactgcctgagcagcagactgagagtgtccgccaccttctggcagaacccccggaaccacttcagatgccaggtgcagttctacggcctgagcgagaacgacgagtggacccaggacagagccaagcccgtgacccagatcgtgtctgccgaagcctggggcagagccgattgcggctttaccagcgagagctaccagcagggcgtgctgagcgccaccatcctgtacgagatcctgctgggcaaggccaccctgtacgccgtgctggtgtctgccctggtgctgatggctatggtcaagcggaaggacagccggggaagggccaagcgatctggatctggagcaacaaacttctcactactcaaacaagcaggtgacgtggaggagaatcccgggcctactagtatggactggatttggcgcatccttttccttgtcggcgctgctaccggcgcgcattccttcgaagaagttcagctgcttgagtctggcggaggactggttcaacctggcggaagcctgagactgtcttgtgccgccagcggcttcatcttcagcagctacgccatgagctgggtccgacaggctcctggaaagggccaagaatgggtttccggcgttagcggcacaggcgtgaacacctactacgccgatagcgtgaagggcagattcaccatcagccgggacaacagcaagaacaccctgtacctccagatgaacagcctgagagccgaggacaccgccgtgtactattgtgcctctggcaaaggctgggacagcggctcttggtacgaggactatagaggccagggcaccctggtcacagtttcttcaacgcgtatccagaaccctgatcctgccgtgtaccagctgcgggatagcaagagcagcgacaagagcgtgtgtctgttcaccgacttcgacagccagaccaacgtgtcccagagcaaggactccgacgtgtacatcaccgataagaccgtgctggacatgcggagcatggacttcaagagcaactccgccgtggcctggtccaacaagtccgatttcgcctgcgccaacgccttcaacaacagcattatccccgaggacacattcttcccaagccccgagagcagctgcgacgtgaagctggtggaaaagagcttcgagacagacaccaacctgaacttccagaacctgagcgtgatcggcttcagaatcctgctgctgaaagtggccggctttaacctgctgatgaccctgcggctgtggtccagccgcgccaagagaagcggatctggcgtgaagcagaccctgaatttcgacctgctgaagctggctggcgacgtggaatccaacccaggcccttctagaggccatatgaccgagtacaagcccacggtgcgcctcgccacccgcgacgacgtccccagggccgtacgcaccctcgccgccgcgttcgccgactaccccgccacgcgccacaccgtcgatccggaccgccacatcgagcgggtcaccgagctgcaagaactcttcctcacgcgcgtcgggctcgacatcggcaaggtgtgggtcgcggacgacggcgccgcggtggcggtctggaccacgccggagagcgtcgaagcgggggcggtgttcgccgagatcggcccgcgcatggccgagttgagcggttcccggctggccgcgcagcaacagatggaaggcctcctggcgccgcaccggcccaaggagcccgcgtggttcctggccaccgtcggcgtctcgcccgaccaccagggcaagggtctgggcagcgccgtcgtgctccccggagtggaggcggccgagcgcgccggggtgcccgccttcctggagacctccgcgccccgcaacctccccttctacgagcggctcggcttcaccgtcaccgccgacgtcgaggtgcccgaaggaccgcgcacctggtgcatgacccgcaagcccggtgcctga

SEQ ID NO: 7063 - DNA, 2847 bp, Artificial Sequence
  Synthetic Polynucloetide
atggccttaccagtgaccgccttgctcctgccgctggccttgctgctccacgccgccaggccgcaggtgcagctggttgaatctggcggaggactggttcagcctggcggatctctgagactgtcttgtgccgccagcggcttcaccttcaccaatcacgccatgagctgggtccgacaggcccctggaaaaggactggaactggtgtctagcatcagcggcaacggcagaaccacctactacgccgatagcgtgaagggcagattcaccatcagccgggacatcagcaagaacaccctggacctccagatgaacagcctgagagccgaggataccgccgtgtactactgtgccaaggatggcggagagacactggtggatagcagaggccagggcacactggtcacagtgtcatctctcgaggacctgaagaacgtgttcccacctgaggtggccgtgttcgagcctagcgaggccgagatcagccacacccagaaagccaccctcgtgtgcctggctaccggcttctaccccgaccatgtggaactgtcttggtgggtcaacggcaaagaggtgcacagcggcgtgtctaccgacccccagccactgaaagaacagcccgccctgaacgacagccggtactgcctgagcagcagactgagagtgtccgccaccttctggcagaacccccggaaccacttcagatgccaggtgcagttctacggcctgagcgagaacgacgagtggacccaggacagagccaagcccgtgacccagatcgtgtctgccgaagcctggggcagagccgattgcggctttaccagcgagagctaccagcagggcgtgctgagcgccaccatcctgtacgagatcctgctgggcaaggccaccctgtacgccgtgctggtgtctgccctggtgctgatggctatggtcaagcggaaggacagccggggaagggccaagcgatctggatctggagcaacaaacttctcactactcaaacaagcaggtgacgtggaggagaatcccgggcctactagtatggactggatttggcgcatccttttccttgtcggcgctgctaccggcgcgcattccttcgaagaagttcagctgcttgagtctggcggaggactggttcaacctggcggaagcctgagactgtcttgtgccgccagcggcttcatcttcagcagctacgccatgagctgggtccgacaggctcctggaaagggccaagaatgggtttccggcgttagcggcacaggcgtgaacacctactacgccgatagcgtgaagggcagattcaccatcagccgggacaacagcaagaacaccctgtacctccagatgaacagcctgagagccgaggacaccgccgtgtactattgtgcctctggcaaaggctgggacagcggctcttggtacgaggactatagaggccagggcaccctggtcacagtttcttcaacgcgtgagcagaaactgatctcggaagaggatgggagcggcaccccattcccttctctggcccctcccatcatgctgctggtggacggcaagcagcagatggtggtcgtgtgcctggtgctggatgtggccccacctggactggacagccccatctggtttagcgccggcaatggctctgccctggacgcctttacctacggcccaagccctgccaccgatggcacctggacaaatctggcccacctgagcctgcccagcgaggaactggcttcttgggagcctctcgtgtgccacacaggacctggcgctgagggacacagcagatccacccagcctatgcacctgtctggcgaggccagcaccgccagaacctgtcctcaggaacctctgagaggcacccctggcggagcactgtggctgggagtgctgagactgctgctgttcaagctgctgctgtttgacctgctgctgacctgctcctgtctgtgcgatcctgccggccctctgccttctcctgccaccaccacaagactgagagccctgggcagccacagactgcaccctgccacagagacaggcggcagagaggccacaagcagccctagaccccagcccagagacagaagatggggcgataccccccctggcagaaagcctggatctccagtccgcgccaagagaagcggatctggcgtgaagcagaccctgaatttcgacctgctgaagctggctggcgacgtggaatccaacccaggcccttctagaggccatatgaccgagtacaagcccacggtgcgcctcgccacccgcgacgacgtccccagggccgtacgcaccctcgccgccgcgttcgccgactaccccgccacgcgccacaccgtcgatccggaccgccacatcgagcgggtcaccgagctgcaagaactcttcctcacgcgcgtcgggctcgacatcggcaaggtgtgggtcgcggacgacggcgccgcggtggcggtctggaccacgccggagagcgtcgaagcgggggcggtgttcgccgagatcggcccgcgcatggccgagttgagcggttcccggctggccgcgcagcaacagatggaaggcctcctggcgccgcaccggcccaaggagcccgcgtggttcctggccaccgtcggcgtctcgcccgaccaccagggcaagggtctgggcagcgccgtcgtgctccccggagtggaggcggccgagcgcgccggggtgcccgccttcctggagacctccgcgccccgcaacctccccttctacgagcggctcggcttcaccgtcaccgccgacgtcgaggtgcccgaaggaccgcgcacctggtgcatgacccgcaagcccggtgcctga

SEQ ID NO: 7064 - DNA, 2886 bp, Artificial Sequence
  Synthetic Polynucloetide
atggccttaccagtgaccgccttgctcctgccgctggccttgctgctccacgccgccaggccgctcgaggacctgaagaacgtgttcccacctgaggtggccgtgttcgagcctagcgaggccgagatcagccacacccagaaagccaccctcgtgtgcctggctaccggcttctaccccgaccatgtggaactgtcttggtgggtcaacggcaaagaggtgcacagcggcgtgtctaccgacccccagccactgaaagaacagcccgccctgaacgacagccggtactgcctgagcagcagactgagagtgtccgccaccttctggcagaacccccggaaccacttcagatgccaggtgcagttctacggcctgagcgagaacgacgagtggacccaggacagagccaagcccgtgacccagatcgtgtctgccgaagcctggggcagagccgattgcggctttaccagcgagagctaccagcagggcgtgctgagcgccaccatcctgtacgagatcctgctgggcaaggccaccctgtacgccgtgctggtgtctgccctggtgctgatggctatggtcaagcggaaggacagccggggaagggccaagcgatctggatctggagcaacaaacttctcactactcaaacaagcaggtgacgtggaggagaatcccgggcctactagcatggccttaccagtgaccgccttgctcctgccgctggccttgctgctccacgccgccaggccgcaggtgcagctggttgaatctggcggaggactggttcagcctggcggatctctgagactgtcttgtgccgccagcggcttcaccttcaccaatcacgccatgagctgggtccgacaggcccctggaaaaggactggaactggtgtctagcatcagcggcaacggcagaaccacctactacgccgatagcgtgaagggcagattcaccatcagccgggacatcagcaagaacaccctggacctccagatgaacagcctgagagccgaggataccgccgtgtactactgtgccaaggatggcggagagacactggtggatagcagaggccagggcacactggtcacagtgtcatctctcgagagcggcggaggcggatctttcgaagaagttcagctgcttgagtctggcggaggactggttcaacctggcggaagcctgagactgtcttgtgccgccagcggcttcatcttcagcagctacgccatgagctgggtccgacaggctcctggaaagggccaagaatgggtttccggcgttagcggcacaggcgtgaacacctactacgccgatagcgtgaagggcagattcaccatcagccgggacaacagcaagaacaccctgtacctccagatgaacagcctgagagccgaggacaccgccgtgtactattgtgcctctggcaaaggctgggacagcggctcttggtacgaggactatagaggccagggcaccctggtcacagtttcttcaacgcgtgagcagaaactgatctcggaagaggatctggggagcggcaccccattcccttctctggcccctcccatcatgctgctggtggacggcaagcagcagatggtggtcgtgtgcctggtgctggatgtggccccacctggactggacagccccatctggtttagcgccggcaatggctctgccctggacgcctttacctacggcccaagccctgccaccgatggcacctggacaaatctggcccacctgagcctgcccagcgaggaactggcttcttgggagcctctcgtgtgccacacaggacctggcgctgagggacacagcagatccacccagcctatgcacctgtctggcgaggccagcaccgccagaacctgtcctcaggaacctctgagaggcacccctggcggagcactgtggctgggagtgctgagactgctgctgttcaagctgctgctgtttgacctgctgctgacctgctcctgtctgtgcgatcctgccggccctctgccttctcctgccaccaccacaagactgagagccctgggcagccacagactgcaccctgccacagagacaggcggcagagaggccacaagcagccctagaccccagcccagagacagaagatggggcgataccccccctggcagaaagcctggatctccagtccgcgccaagagaagcggatctggcgtgaagcagaccctgaatttcgacctgctgaagctggctggcgacgtggaatccaacccaggcccttctagatctagaggccatatgaccgagtacaagcccacggtgcgcctcgccacccgcgacgacgtccccagggccgtacgcaccctcgccgccgcgttcgccgactaccccgccacgcgccacaccgtcgatccggaccgccacatcgagcgggtcaccgagctgcaagaactcttcctcacgcgcgtcgggctcgacatcggcaaggtgtgggtcgcggacgacggcgccgcggtggcggtctggaccacgccggagagcgtcgaagcgggggcggtgttcgccgagatcggcccgcgcatggccgagttgagcggttcccggctggccgcgcagcaacagatggaaggcctcctggcgccgcaccggcccaaggagcccgcgtggttcctggccaccgtcggcgtctcgcccgaccaccagggcaagggtctgggcagcgccgtcgtgctccccggagtggaggcggccgagcgcgccggggtgcccgccttcctggagacctccgcgccccgcaacctccccttctacgagcggctcggcttcaccgtcaccgccgacgtcgaggtgcccgaaggaccgcgcacctggtgcatgacccgcaagcccggtgcctga

SEQ ID NO: 7065 - DNA, 2712 bp, Artificial Sequence
  Synthetic Polynucloetide
atggccttaccagtgaccgccttgctcctgccgctggccttgctgctccacgccgccaggccgcaggtgcagctggttgaatctggcggaggactggttcagcctggcggatctctgagactgtcttgtgccgccagcggcttcaccttcaccaatcacgccatgagctgggtccgacaggcccctggaaaaggactggaactggtgtctagcatcagcggcaacggcagaaccacctactacgccgatagcgtgaagggcagattcaccatcagccgggacatcagcaagaacaccctggacctccagatgaacagcctgagagccgaggataccgccgtgtactactgtgccaaggatggcggagagacactggtggatagcagaggccagggcacactggtcacagtgtcatctctcgaggggaaaccaattcccaaccctcttctgggactggattcaaccggcagcggcgacaagcagctggacgccgacgtgtcccccaagcctaccatcttcctgccctctatcgccgagacaaagctccagaaggccggcacctacctgtgcctgctggaaaagttcttcccagatgtgattaagatccactggcaggaaaagaagtccaacaccatcctgggcagccaggaaggcaacaccatgaagaccaacgacacctacatgaagttcagctggctgaccgtgcccgagaagtccctggacaaagaacacagatgcatcgtgcggcacgaaaacaacaagaacggcgtggaccaggaaatcatcttcccacccatcaagaccgatgtgattacaatggaccccaaggacaactgctccaaggacgccaacgataccctgctgctccagctgaccaacaccagcgcctactacatgtacttgttgctgctgctgaagtccgtggtgtacttcgccatcatcacatgctgcctgctgcggagaaccgccttctgctgcaacggcgagaagtctagggccaagcgatctggatctggagcaacaaacttctcactactcaaacaagcaggtgacgtggaggagaatcccgggcctactagtatggactggatttggcgcatccttttccttgtcggcgctgctaccggcgcgcattccttcgaagaagttcagctgcttgagtctggcggaggactggttcaacctggcggaagcctgagactgtcttgtgccgccagcggcttcatcttcagcagctacgccatgagctgggtccgacaggctcctggaaagggccaagaatgggtttccggcgttagcggcacaggcgtgaacacctactacgccgatagcgtgaagggcagattcaccatcagccgggacaacagcaagaacaccctgtacctccagatgaacagcctgagagccgaggacaccgccgtgtactattgtgcctctggcaaaggctgggacagcggctcttggtacgaggactatagaggccagggcaccctggtcacagtttcttcaacgcgtgagcagaaactgatctcggaagaggatgggagcggcagccagcctcacaccaagcccagcgtgttcgtgatgaagaacggcaccaacgtggcctgcctcgtgaaagagttctaccccaaggacatcaggatcaacctggtgtccagcaagaagatcaccgagttcgaccccgccatcgtgatctcccccagcggcaagtacaacgccgtgaagctggggaagtacgaggacagcaacagcgtgacctgctccgtgcagcacgacaacaagaccgtgcacagcaccgactttgaagtgaaaaccgactccaccgaccacgtgaagcccaaagagacagagaacaccaagcagcccagcaagagctgccacaagcccaaggccatcgtgcacaccgagaaagtgaacatgatgagcctgaccgtgctgggcctgcggatgctgttcgccaaaaccgtggccgtgaacttcctgctgaccgccaagctgttcttcctccgcgccaagagaagcggatctggcgtgaagcagaccctgaatttcgacctgctgaagctggctggcgacgtggaatccaacccaggcccttctagaggccatatgaccgagtacaagcccacggtgcgcctcgccacccgcgacgacgtccccagggccgtacgcaccctcgccgccgcgttcgccgactaccccgccacgcgccacaccgtcgatccggaccgccacatcgagcgggtcaccgagctgcaagaactcttcctcacgcgcgtcgggctcgacatcggcaaggtgtgggtcgcggacgacggcgccgcggtggcggtctggaccacgccggagagcgtcgaagcgggggcggtgttcgccgagatcggcccgcgcatggccgagttgagcggttcccggctggccgcgcagcaacagatggaaggcctcctggcgccgcaccggcccaaggagcccgcgtggttcctggccaccgtcggcgtctcgcccgaccaccagggcaagggtctgggcagcgccgtcgtgctccccggagtggaggcggccgagcgcgccggggtgcccgccttcctggagacctccgcgccccgcaacctccccttctacgagcggctcggcttcaccgtcaccgccgacgtcgaggtgcccgaaggaccgcgcacctggtgcatgacccgcaagcccggtgcctga

SEQ ID NO: 7066 - DNA, 1923 bp, Artificial Sequence
  Synthetic Polynucloetide
atggccttaccagtgaccgccttgctcctgccgctggccttgctgctccacgccgccaggccgcaggtgcagctggttgaatctggcggaggactggttcagcctggcggatctctgagactgtcttgtgccgccagcggcttcaccttcaccaatcacgccatgagctgggtccgacaggcccctggaaaaggactggaactggtgtctagcatcagcggcaacggcagaaccacctactacgccgatagcgtgaagggcagattcaccatcagccgggacatcagcaagaacaccctggacctccagatgaacagcctgagagccgaggataccgccgtgtactactgtgccaaggatggcggagagacactggtggatagcagaggccagggcacactggtcacagtgtcatctctcgagagccagcctcacaccaagcccagcgtgttcgtgatgaagaacggcaccaacgtggcctgcctcgtgaaagagttctaccccaaggacatcaggatcaacctggtgtccagcaagaagatcaccgagttcgaccccgccatcgtgatctcccccagcggcaagtacaacgccgtgaagctggggaagtacgaggacagcaacagcgtgacctgctccgtgcagcacgacaacaagaccgtgcacagcaccgactttgaagtgaaaaccgactccaccgaccacgtgaagcccaaagagacagagaacaccaagcagcccagcaagagctgccacaagcccaaggccatcgtgcacaccgagaaagtgaacatgatgagcctgaccgtgctgggcctgcggatgctgttcgccaaaaccgtggccgtgaacttcctgctgaccgccaagctgttcttcctcagggccaagcgatctggatctggagcaacaaacttctcactactcaaacaagcaggtgacgtggaggagaatcccgggcctactagtatggactggatttggcgcatccttttccttgtcggcgctgctaccggcgcgcattccttcgaagaagttcagctgcttgagtctggcggaggactggttcaacctggcggaagcctgagactgtcttgtgccgccagcggcttcatcttcagcagctacgccatgagctgggtccgacaggctcctggaaagggccaagaatgggtttccggcgttagcggcacaggcgtgaacacctactacgccgatagcgtgaagggcagattcaccatcagccgggacaacagcaagaacaccctgtacctccagatgaacagcctgagagccgaggacaccgccgtgtactattgtgcctctggcaaaggctgggacagcggctcttggtacgaggactatagaggccagggcaccctggtcacagtttcttcaacgcgtgacaagcagctggacgccgacgtgtcccccaagcctaccatcttcctgccctctatcgccgagacaaagctccagaaggccggcacctacctgtgcctgctggaaaagttcttcccagatgtgattaagatccactggcaggaaaagaagtccaacaccatcctgggcagccaggaaggcaacaccatgaagaccaacgacacctacatgaagttcagctggctgaccgtgcccgagaagtccctggacaaagaacacagatgcatcgtgcggcacgaaaacaacaagaacggcgtggaccaggaaatcatcttcccacccatcaagaccgatgtgattacaatggaccccaaggacaactgctccaaggacgccaacgataccctgctgctccagctgaccaacaccagcgcctactacatgtacttgttgctgctgctgaagtccgtggtgtacttcgccatcatcacatgctgcctgctgcggagaaccgccttctgctgcaacggcgagaagtct

SEQ ID NO: 7067 - DNA, 2742 bp, Artificial Sequence
  Synthetic Polynucloetide
atggccttaccagtgaccgccttgctcctgccgctggccttgctgctccacgccgccaggccgctcgaggggaaaccaattcccaaccctcttctgggactggattcaaccggcagcggcgacaagcagctggacgccgacgtgtcccccaagcctaccatcttcctgccctctatcgccgagacaaagctccagaaggccggcacctacctgtgcctgctggaaaagttcttcccagatgtgattaagatccactggcaggaaaagaagtccaacaccatcctgggcagccaggaaggcaacaccatgaagaccaacgacacctacatgaagttcagctggctgaccgtgcccgagaagtccctggacaaagaacacagatgcatcgtgcggcacgaaaacaacaagaacggcgtggaccaggaaatcatcttcccacccatcaagaccgatgtgattacaatggaccccaaggacaactgctccaaggacgccaacgataccctgctgctccagctgaccaacaccagcgcctactacatgtacttgttgctgctgctgaagtccgtggtgtacttcgccatcatcacatgctgcctgctgcggagaaccgccttctgctgcaacggcgagaagtctagggccaagcgatctggatctggagcaacaaacttctcactactcaaacaagcaggtgacgtggaggagaatcccgggcctactagcatggccttaccagtgaccgccttgctcctgccgctggccttgctgctccacgccgccaggccgcaggtgcagctggttgaatctggcggaggactggttcagcctggcggatctctgagactgtcttgtgccgccagcggcttcaccttcaccaatcacgccatgagctgggtccgacaggcccctggaaaaggactggaactggtgtctagcatcagcggcaacggcagaaccacctactacgccgatagcgtgaagggcagattcaccatcagccgggacatcagcaagaacaccctggacctccagatgaacagcctgagagccgaggataccgccgtgtactactgtgccaaggatggcggagagacactggtggatagcagaggccagggcacactggtcacagtgtcatctctcgagagcggcggaggcggatctttcgaagaagttcagctgcttgagtctggcggaggactggttcaacctggcggaagcctgagactgtcttgtgccgccagcggcttcatcttcagcagctacgccatgagctgggtccgacaggctcctggaaagggccaagaatgggtttccggcgttagcggcacaggcgtgaacacctactacgccgatagcgtgaagggcagattcaccatcagccgggacaacagcaagaacaccctgtacctccagatgaacagcctgagagccgaggacaccgccgtgtactattgtgcctctggcaaaggctgggacagcggctcttggtacgaggactatagaggccagggcaccctggtcacagtttcttcaacgcgtgagcagaaactgatctcggaagaggatgggagcggcagccagcctcacaccaagcccagcgtgttcgtgatgaagaacggcaccaacgtggcctgcctcgtgaaagagttctaccccaaggacatcaggatcaacctggtgtccagcaagaagatcaccgagttcgaccccgccatcgtgatctcccccagcggcaagtacaacgccgtgaagctggggaagtacgaggacagcaacagcgtgacctgctccgtgcagcacgacaacaagaccgtgcacagcaccgactttgaagtgaaaaccgactccaccgaccacgtgaagcccaaagagacagagaacaccaagcagcccagcaagagctgccacaagcccaaggccatcgtgcacaccgagaaagtgaacatgatgagcctgaccgtgctgggcctgcggatgctgttcgccaaaaccgtggccgtgaacttcctgctgaccgccaagctgttcttcctccgcgccaagagaagcggatctggcgtgaagcagaccctgaatttcgacctgctgaagctggctggcgacgtggaatccaacccaggcccttctagaggccatatgaccgagtacaagcccacggtgcgcctcgccacccgcgacgacgtccccagggccgtacgcaccctcgccgccgcgttcgccgactaccccgccacgcgccacaccgtcgatccggaccgccacatcgagcgggtcaccgagctgcaagaactcttcctcacgcgcgtcgggctcgacatcggcaaggtgtgggtcgcggacgacggcgccgcggtggcggtctggaccacgccggagagcgtcgaagcgggggcggtgttcgccgagatcggcccgcgcatggccgagttgagcggttcccggctggccgcgcagcaacagatggaaggcctcctggcgccgcaccggcccaaggagcccgcgtggttcctggccaccgtcggcgtctcgcccgaccaccagggcaagggtctgggcagcgccgtcgtgctccccggagtggaggcggccgagcgcgccggggtgcccgccttcctggagacctccgcgccccgcaacctccccttctacgagcggctcggcttcaccgtcaccgccgacgtcgaggtgcccgaaggaccgcgcacctggtgcatgacccgcaagcccggtgcctga

SEQ ID NO: 7068 - DNA, 3132 bp, Artificial Sequence
  Synthetic Polynucloetide
atggccttaccagtgaccgccttgctcctgccgctggccttgctgctccacgccgccaggccgcaggtgcagctggttgaatctggcggaggactggttcagcctggcggatctctgagactgtcttgtgccgccagcggcttcaccttcaccaatcacgccatgagctgggtccgacaggcccctggaaaaggactggaactggtgtctagcatcagcggcaacggcagaaccacctactacgccgatagcgtgaagggcagattcaccatcagccgggacatcagcaagaacaccctggacctccagatgaacagcctgagagccgaggataccgccgtgtactactgtgccaaggatggcggagagacactggtggatagcagaggccagggcacactggtcacagtgtcatctggacagcctaaggccaatcctaccgtgacactgttccctccaagcagcgaagaactccaggccaacaaggccacacttgtgtgcctgatctccgacttctaccctggggctgtgacagtggcttggaaggccgatggatctcctgtgaaagccggcgtggaaaccaccaagccatccaagcagagcaacaacaaatacgccgccagctcctacctgagcctgacacctgagcagtggaagtcccacagatcctacagctgccaagtgacccacgaaggcagcaccgtggaaaagacagtggcccctacagagtgcagcggatcccagagcttcggcctgctggaccccaagctgtgctacctgctggatggcatcctgttcatctacggcgtgatcctgaccgccctgttcctgagagtgaagttcagcagaagcgccgacgcccctgcctaccagcagggacagaaccaactgtacaacgagctgaacctgggcagacgggaagagtacgacgtgctggacaagcggagaggcagggaccctgagatgggcggaaagccccagcggagaaagaacccccaggaaggactgtataacgaactccagaaagacaagatggccgaagcctacagcgagatcggcatgaagggcgagcggagaagaggcaagggccacgatggcctgtaccagggcctgagcaccgccaccaaggacacctatgacgccctgcacatgcaggccctgcctccaagaagggccaagcgatctggatctggagcaacaaacttctcactactcaaacaagcaggtgacgtggaggagaatcccgggcctactagtatggactggatttggcgcatccttttccttgtcggcgctgctaccggcgcgcattccttcgaagaagttcagctgcttgagtctggcggaggactggttcaacctggcggaagcctgagactgtcttgtgccgccagcggcttcatcttcagcagctacgccatgagctgggtccgacaggctcctggaaagggccaagaatgggtttccggcgttagcggcacaggcgtgaacacctactacgccgatagcgtgaagggcagattcaccatcagccgggacaacagcaagaacaccctgtacctccagatgaacagcctgagagccgaggacaccgccgtgtactattgtgcctctggcaaaggctgggacagcggctcttggtacgaggactatagaggccagggcaccctggtcacagtttcttcagcctctacaaagggaccctccgtgtttcctctggctcccagcagcaagtctacaagcggaggaacagccgctctgggctgcctggtcaaggattactttcccgagcctgtgaccgtgtcctggaatagcggagcactgacaagcggcgtgcacacctttccagccgtgctgcaaagcagcggcctgtactctctgagcagcgtggtcacagtgcctagctctagcctgggcacccagacctacatctgcaatgtgaaccacaagcctagcaacaccaaggtggacaagagagtggaacccaagagctgtggtacccagagttttgggttgttggaccctaaattgtgctatctgttggacggaatcctgttcatttacggagtgatcctgaccgcattgttcctgcgggttaagttttccagatccgcagacgcacccgcttaccaacaagggcagaaccaactctacaatgaacttaatttggggcggagggaagagtacgacgttctggacaaaaggaggggacgagatcccgagatgggcggaaagcctcagcgaaggaagaatccgcaagaggggctttataacgaactccagaaagataaaatggcagaagcctatagtgagattgggatgaagggagaaaggaggaggggtaaaggtcacgatgggttgtaccaaggattgagcacagccactaaagatacctatgatgcgctccacatgcaggccctgccgccaagacgcgccaagagaagcggatctggcgtgaagcagaccctgaatttcgacctgctgaagctggctggcgacgtggaatccaacccaggcccttctagaggccatatgaccgagtacaagcccacggtgcgcctcgccacccgcgacgacgtccccagggccgtacgcaccctcgccgccgcgttcgccgactaccccgccacgcgccacaccgtcgatccggaccgccacatcgagcgggtcaccgagctgcaagaactcttcctcacgcgcgtcgggctcgacatcggcaaggtgtgggtcgcggacgacggcgccgcggtggcggtctggaccacgccggagagcgtcgaagcgggggcggtgttcgccgagatcggcccgcgcatggccgagttgagcggttcccggctggccgcgcagcaacagatggaaggcctcctggcgccgcaccggcccaaggagcccgcgtggttcctggccaccgtcggcgtctcgcccgaccaccagggcaagggtctgggcagcgccgtcgtgctccccggagtggaggcggccgagcgcgccggggtgcccgccttcctggagacctccgcgccccgcaacctccccttctacgagcggctcggcttcaccgtcaccgccgacgtcgaggtgcccgaaggaccgcgcacctggtgcatgacccgcaagcccggtgcctga

SEQ ID NO: 7069 - DNA, 2487 bp, Artificial Sequence
  Synthetic Polynucloetide
atggccttaccagtgaccgccttgctcctgccgctggccttgctgctccacgccgccaggccgcaggtgcagctggttgaatctggcggaggactggttcagcctggcggatctctgagactgtcttgtgccgccagcggcttcaccttcaccaatcacgccatgagctgggtccgacaggcccctggaaaaggactggaactggtgtctagcatcagcggcaacggcagaaccacctactacgccgatagcgtgaagggcagattcaccatcagccgggacatcagcaagaacaccctggacctccagatgaacagcctgagagccgaggataccgccgtgtactactgtgccaaggatggcggagagacactggtggatagcagaggccagggcacactggtcacagtgtcatctctcgaggacctgaagaacgtgttcccacctgaggtggccgtgttcgagcctagcgaggccgagatcagccacacccagaaagccaccctcgtgtgcctggctaccggcttctaccccgaccatgtggaactgtcttggtgggtcaacggcaaagaggtgcacagcggcgtgtctaccgacccccagccactgaaagaacagcccgccctgaacgacagccggtactgcctgagcagcagactgagagtgtccgccaccttctggcagaacccccggaaccacttcagatgccaggtgcagttctacggcctgagcgagaacgacgagtggacccaggacagagccaagcccgtgacccagatcgtgtctgccgaagcctggggcagagccgattgcggatcccagagcttcggcctgctggaccccaagctgtgctacctgctggatggcatcctgttcatctacggcgtgatcctgaccgccctgttcctgagagtgaagttcagcagaagcgccgacgcccctgcctaccagcagggacagaaccaactgtacaacgagctgaacctgggcagacgggaagagtacgacgtgctggacaagcggagaggcagggaccctgagatgggcggaaagccccagcggagaaagaacccccaggaaggactgtataacgaactccagaaagacaagatggccgaagcctacagcgagatcggcatgaagggcgagcggagaagaggcaagggccacgatggcctgtaccagggcctgagcaccgccaccaaggacacctatgacgccctgcacatgcaggccctgcctccaagaagggccaagcgatctggatctggagcaacaaacttctcactactcaaacaagcaggtgacgtggaggagaatcccgggcctactagtatggactggatttggcgcatccttttccttgtcggcgctgctaccggcgcgcattccttcgaagaagttcagctgcttgagtctggcggaggactggttcaacctggcggaagcctgagactgtcttgtgccgccagcggcttcatcttcagcagctacgccatgagctgggtccgacaggctcctggaaagggccaagaatgggtttccggcgttagcggcacaggcgtgaacacctactacgccgatagcgtgaagggcagattcaccatcagccgggacaacagcaagaacaccctgtacctccagatgaacagcctgagagccgaggacaccgccgtgtactattgtgcctctggcaaaggctgggacagcggctcttggtacgaggactatagaggccagggcaccctggtcacagtttcttcaacgcgtatccagaaccctgatcctgccgtgtaccagctgcgggatagcaagagcagcgacaagagcgtgtgtctgttcaccgacttcgacagccagaccaacgtgtcccagagcaaggactccgacgtgtacatcaccgataagaccgtgctggacatgcggagcatggacttcaagagcaactccgccgtggcctggtccaacaagtccgatttcgcctgcgccaacgccttcaacaacagcattatccccgaggacacattcttcccaagccccgagagcagctgcggtacccagagttttgggttgttggaccctaaattgtgctatctgttggacggaatcctgttcatttacggagtgatcctgaccgcattgttcctgcgggttaagttttccagatccgcagacgcacccgcttaccaacaagggcagaaccaactctacaatgaacttaatttggggcggagggaagagtacgacgttctggacaaaaggaggggacgagatcccgagatgggcggaaagcctcagcgaaggaagaatccgcaagaggggctttataacgaactccagaaagataaaatggcagaagcctatagtgagattgggatgaagggagaaaggaggaggggtaaaggtcacgatgggttgtaccaaggattgagcacagccactaaagatacctatgatgcgctccacatgcaggccctgccgccaaga

SEQ ID NO: 7070 - DNA, 2487 bp, Artificial Sequence
  Synthetic Polynucloetide
atggccttaccagtgaccgccttgctcctgccgctggccttgctgctccacgccgccaggccgcaggtgcagctggttgaatctggcggaggactggttcagcctggcggatctctgagactgtcttgtgccgccagcggcttcaccttcaccaatcacgccatgagctgggtccgacaggcccctggaaaaggactggaactggtgtctagcatcagcggcaacggcagaaccacctactacgccgatagcgtgaagggcagattcaccatcagccgggacatcagcaagaacaccctggacctccagatgaacagcctgagagccgaggataccgccgtgtactactgtgccaaggatggcggagagacactggtggatagcagaggccagggcacactggtcacagtgtcatctctcgaggacctgaagaacgtgttcccacctgaggtggccgtgttcgagcctagcaaggccgagatcgcccacacccagaaagccaccctcgtgtgcctggctaccggcttctaccccgaccatgtggaactgtcttggtgggtcaacggcaaagaggtgcacagcggcgtgtgtaccgacccccagccactgaaagaacagcccgccctgaacgacagccggtactgcctgagcagcagactgagagtgtccgccaccttctggcagaacccccggaaccacttcagatgccaggtgcagttctacggcctgagcgagaacgacgagtggacccaggacagagccaagcccgtgacccagatcgtgtctgccgaagcctggggcagagccgattgcggatcccagagcttcggcctgctggaccccaagctgtgctacctgctggatggcatcctgttcatctacggcgtgatcctgaccgccctgttcctgagagtgaagttcagcagaagcgccgacgcccctgcctaccagcagggacagaaccaactgtacaacgagctgaacctgggcagacgggaagagtacgacgtgctggacaagcggagaggcagggaccctgagatgggcggaaagccccagcggagaaagaacccccaggaaggactgtataacgaactccagaaagacaagatggccgaagcctacagcgagatcggcatgaagggcgagcggagaagaggcaagggccacgatggcctgtaccagggcctgagcaccgccaccaaggacacctatgacgccctgcacatgcaggccctgcctccaagaagggccaagcgatctggatctggagcaacaaacttctcactactcaaacaagcaggtgacgtggaggagaatcccgggcctactagtatggactggatttggcgcatccttttccttgtcggcgctgctaccggcgcgcattccttcgaagaagttcagctgcttgagtctggcggaggactggttcaacctggcggaagcctgagactgtcttgtgccgccagcggcttcatcttcagcagctacgccatgagctgggtccgacaggctcctggaaagggccaagaatgggtttccggcgttagcggcacaggcgtgaacacctactacgccgatagcgtgaagggcagattcaccatcagccgggacaacagcaagaacaccctgtacctccagatgaacagcctgagagccgaggacaccgccgtgtactattgtgcctctggcaaaggctgggacagcggctcttggtacgaggactatagaggccagggcaccctggtcacagtttcttcaacgcgtatccagaaccctgatcctgccgtgtaccagctgcgggatagcaagagcagcgacaagagcgtgtgtctgttcaccgacttcgacagccagaccaacgtgtcccagagcaaggactccgacgtgtacatcaccgataagtgcgtgctggacatgcggagcatggacttcaagagcaactccgccgtggcctggtccaacaagtccgatttcgcctgcgccaacgccttcaacaacagcattatccccgaggacacattcttcccaagcagcgacgtgccctgcggtacccagagttttgggttgttggaccctaaattgtgctatctgttggacggaatcctgttcatttacggagtgatcctgaccgcattgttcctgcgggttaagttttccagatccgcagacgcacccgcttaccaacaagggcagaaccaactctacaatgaacttaatttggggcggagggaagagtacgacgttctggacaaaaggaggggacgagatcccgagatgggcggaaagcctcagcgaaggaagaatccgcaagaggggctttataacgaactccagaaagataaaatggcagaagcctatagtgagattgggatgaagggagaaaggaggaggggtaaaggtcacgatgggttgtaccaaggattgagcacagccactaaagatacctatgatgcgctccacatgcaggccctgccgccaaga

SEQ ID NO: 7071 - DNA, 2700 bp, Artificial Sequence
  Synthetic Polynucloetide
atggccttaccagtgaccgccttgctcctgccgctggccttgctgctccacgccgccaggccgcaggtgcagctggttgaatctggcggaggactggttcagcctggcggatctctgagactgtcttgtgccgccagcggcttcaccttcaccaatcacgccatgagctgggtccgacaggcccctggaaaaggactggaactggtgtctagcatcagcggcaacggcagaaccacctactacgccgatagcgtgaagggcagattcaccatcagccgggacatcagcaagaacaccctggacctccagatgaacagcctgagagccgaggataccgccgtgtactactgtgccaaggatggcggagagacactggtggatagcagaggccagggcacactggtcacagtgtcatctctcgaggggaaaccaattcccaaccctcttctgggactggattcaaccggcagcggcgaggacctgaagaacgtgttcccacctgaggtggccgtgttcgagcctagcgaggccgagatcagccacacccagaaagccaccctcgtgtgcctggctaccggcttctaccccgaccatgtggaactgtcttggtgggtcaacggcaaagaggtgcacagcggcgtgtctaccgacccccagccactgaaagaacagcccgccctgaacgacagccggtactgcctgagcagcagactgagagtgtccgccaccttctggcagaacccccggaaccacttcagatgccaggtgcagttctacggcctgagcgagaacgacgagtggacccaggacagagccaagcccgtgacccagatcgtgtctgccgaagcctggggcagagccgattgcggatcccagagcttcggcctgctggaccccaagctgtgctacctgctggatggcatcctgttcatctacggcgtgatcctgaccgccctgttcctgagagtgaagttcagcagaagcgccgacgcccctgcctaccagcagggacagaaccaactgtacaacgagctgaacctgggcagacgggaagagtacgacgtgctggacaagcggagaggcagggaccctgagatgggcggaaagccccagcggagaaagaacccccaggaaggactgtataacgaactccagaaagacaagatggccgaagcctacagcgagatcggcatgaagggcgagcggagaagaggcaagggccacgatggcctgtaccagggcctgagcaccgccaccaaggacacctatgacgccctgcacatgcaggccctgcctccaagaagggccaagcgatctggatctggagcaacaaacttctcactactcaaacaagcaggtgacgtggaggagaatcccgggcctactagtatggactggatttggcgcatccttttccttgtcggcgctgctaccggcgcgcattccttcgaagaagttcagctgcttgagtctggcggaggactggttcaacctggcggaagcctgagactgtcttgtgccgccagcggcttcatcttcagcagctacgccatgagctgggtccgacaggctcctggaaagggccaagaatgggtttccggcgttagcggcacaggcgtgaacacctactacgccgatagcgtgaagggcagattcaccatcagccgggacaacagcaagaacaccctgtacctccagatgaacagcctgagagccgaggacaccgccgtgtactattgtgcctctggcaaaggctgggacagcggctcttggtacgaggactatagaggccagggcaccctggtcacagtttcttcaacgcgtgagcagaaactgatctcggaagaggatgggagcggcatccagaaccctgatcctgccgtgtaccagctgcgggatagcaagagcagcgacaagagcgtgtgtctgttcaccgacttcgacagccagaccaacgtgtcccagagcaaggactccgacgtgtacatcaccgataagaccgtgctggacatgcggagcatggacttcaagagcaactccgccgtggcctggtccaacaagtccgatttcgcctgcgccaacgccttcaacaacagcattatccccgaggacacattcttcccaagccccgagagcagctgcggtacccagagttttgggttgttggaccctaaattgtgctatctgttggacggaatcctgttcatttacggagtgatcctgaccgcattgttcctgaggagcaagcggtcacggctgctccacagcgattacatgaatatgacaccacgaagaccgggtcctactcgcaaacactaccaaccctacgcacctccccgcgactttgcagcgtaccgatctcgggttaagttttccagatccgcagacgcacccgcttaccaacaagggcagaaccaactctacaatgaacttaatttggggcggagggaagagtacgacgttctggacaaaaggaggggacgagatcccgagatgggcggaaagcctcagcgaaggaagaatccgcaagaggggctttataacgaactccagaaagataaaatggcagaagcctatagtgagattgggatgaagggagaaaggaggaggggtaaaggtcacgatgggttgtaccaaggattgagcacagccactaaagatacctatgatgcgctccacatgcaggccctgccgccaaga

SEQ ID NO: 7072 - DNA, 2823 bp, Artificial Sequence
  Synthetic Polynucloetide
atggccttaccagtgaccgccttgctcctgccgctggccttgctgctccacgccgccaggccgcaggtgcagctggttgaatctggcggaggactggttcagcctggcggatctctgagactgtcttgtgccgccagcggcttcaccttcaccaatcacgccatgagctgggtccgacaggcccctggaaaaggactggaactggtgtctagcatcagcggcaacggcagaaccacctactacgccgatagcgtgaagggcagattcaccatcagccgggacatcagcaagaacaccctggacctccagatgaacagcctgagagccgaggataccgccgtgtactactgtgccaaggatggcggagagacactggtggatagcagaggccagggcacactggtcacagtgtcatctctcgaggggaaaccaattcccaaccctcttctgggactggattcaaccggcagcggcgaggacctgaagaacgtgttcccacctgaggtggccgtgttcgagcctagcgaggccgagatcagccacacccagaaagccaccctcgtgtgcctggctaccggcttctaccccgaccatgtggaactgtcttggtgggtcaacggcaaagaggtgcacagcggcgtgtctaccgacccccagccactgaaagaacagcccgccctgaacgacagccggtactgcctgagcagcagactgagagtgtccgccaccttctggcagaacccccggaaccacttcagatgccaggtgcagttctacggcctgagcgagaacgacgagtggacccaggacagagccaagcccgtgacccagatcgtgtctgccgaagcctggggcagagccgattgcggatcccagagcttcggcctgctggaccccaagctgtgctacctgctggatggcatcctgttcatctacggcgtgatcctgaccgccctgttcctgaggagtaagaggagcaggctcctgcacagtgactacatgaacatgactccacgccgccccggacccacccgcaagcattaccagccctatgccccaccacgcgacttcgcagcctatcgctccagagtgaagttcagcagaagcgccgacgcccctgcctaccagcagggacagaaccaactgtacaacgagctgaacctgggcagacgggaagagtacgacgtgctggacaagcggagaggcagggaccctgagatgggcggaaagccccagcggagaaagaacccccaggaaggactgtataacgaactccagaaagacaagatggccgaagcctacagcgagatcggcatgaagggcgagcggagaagaggcaagggccacgatggcctgtaccagggcctgagcaccgccaccaaggacacctatgacgccctgcacatgcaggccctgcctccaagaagggccaagcgatctggatctggagcaacaaacttctcactactcaaacaagcaggtgacgtggaggagaatcccgggcctactagtatggactggatttggcgcatccttttccttgtcggcgctgctaccggcgcgcattccttcgaagaagttcagctgcttgagtctggcggaggactggttcaacctggcggaagcctgagactgtcttgtgccgccagcggcttcatcttcagcagctacgccatgagctgggtccgacaggctcctggaaagggccaagaatgggtttccggcgttagcggcacaggcgtgaacacctactacgccgatagcgtgaagggcagattcaccatcagccgggacaacagcaagaacaccctgtacctccagatgaacagcctgagagccgaggacaccgccgtgtactattgtgcctctggcaaaggctgggacagcggctcttggtacgaggactatagaggccagggcaccctggtcacagtttcttcaacgcgtgagcagaaactgatctcggaagaggatgggagcggcatccagaaccctgatcctgccgtgtaccagctgcgggatagcaagagcagcgacaagagcgtgtgtctgttcaccgacttcgacagccagaccaacgtgtcccagagcaaggactccgacgtgtacatcaccgataagaccgtgctggacatgcggagcatggacttcaagagcaactccgccgtggcctggtccaacaagtccgatttcgcctgcgccaacgccttcaacaacagcattatccccgaggacacattcttcccaagccccgagagcagctgcggtacccagagttttgggttgttggaccctaaattgtgctatctgttggacggaatcctgttcatttacggagtgatcctgaccgcattgttcctgaggagcaagcggtcacggctgctccacagcgattacatgaatatgacaccacgaagaccgggtcctactcgcaaacactaccaaccctacgcacctccccgcgactttgcagcgtaccgatctcgggttaagttttccagatccgcagacgcacccgcttaccaacaagggcagaaccaactctacaatgaacttaatttggggcggagggaagagtacgacgttctggacaaaaggaggggacgagatcccgagatgggcggaaagcctcagcgaaggaagaatccgcaagaggggctttataacgaactccagaaagataaaatggcagaagcctatagtgagattgggatgaagggagaaaggaggaggggtaaaggtcacgatgggttgtaccaaggattgagcacagccactaaagatacctatgatgcgctccacatgcaggccctgccgccaaga

SEQ ID NO: 7073 - DNA, 2706 bp, Artificial Sequence
  Synthetic Polynucloetide
atggccttaccagtgaccgccttgctcctgccgctggccttgctgctccacgccgccaggccgcaggtgcagctggttgaatctggcggaggactggttcagcctggcggatctctgagactgtcttgtgccgccagcggcttcaccttcaccaatcacgccatgagctgggtccgacaggcccctggaaaaggactggaactggtgtctagcatcagcggcaacggcagaaccacctactacgccgatagcgtgaagggcagattcaccatcagccgggacatcagcaagaacaccctggacctccagatgaacagcctgagagccgaggataccgccgtgtactactgtgccaaggatggcggagagacactggtggatagcagaggccagggcacactggtcacagtgtcatctctcgaggggaaaccaattcccaaccctcttctgggactggattcaaccggcagcggcgaggacctgaagaacgtgttcccacctgaggtggccgtgttcgagcctagcgaggccgagatcagccacacccagaaagccaccctcgtgtgcctggctaccggcttctaccccgaccatgtggaactgtcttggtgggtcaacggcaaagaggtgcacagcggcgtgtctaccgacccccagccactgaaagaacagcccgccctgaacgacagccggtactgcctgagcagcagactgagagtgtccgccaccttctggcagaacccccggaaccacttcagatgccaggtgcagttctacggcctgagcgagaacgacgagtggacccaggacagagccaagcccgtgacccagatcgtgtctgccgaagcctggggcagagccgattgcggatcccagagcttcggcctgctggaccccaagctgtgctacctgctggatggcatcctgttcatctacggcgtgatcctgaccgccctgttcctgagagtgaagttcagcagaagcgccgacgcccctgcctaccagcagggacagaaccaactgtacaacgagctgaacctgggcagacgggaagagtacgacgtgctggacaagcggagaggcagggaccctgagatgggcggaaagccccagcggagaaagaacccccaggaaggactgtataacgaactccagaaagacaagatggccgaagcctacagcgagatcggcatgaagggcgagcggagaagaggcaagggccacgatggcctgtaccagggcctgagcaccgccaccaaggacacctatgacgccctgcacatgcaggccctgcctccaagaagggccaagcgatctggatctggagcaacaaacttctcactactcaaacaagcaggtgacgtggaggagaatcccgggcctactagtatggactggatttggcgcatccttttccttgtcggcgctgctaccggcgcgcattccttcgaagaagttcagctgcttgagtctggcggaggactggttcaacctggcggaagcctgagactgtcttgtgccgccagcggcttcatcttcagcagctacgccatgagctgggtccgacaggctcctggaaagggccaagaatgggtttccggcgttagcggcacaggcgtgaacacctactacgccgatagcgtgaagggcagattcaccatcagccgggacaacagcaagaacaccctgtacctccagatgaacagcctgagagccgaggacaccgccgtgtactattgtgcctctggcaaaggctgggacagcggctcttggtacgaggactatagaggccagggcaccctggtcacagtttcttcaacgcgtgagcagaaactgatctcggaagaggatctggggagcggcatccagaaccctgatcctgccgtgtaccagctgcgggatagcaagagcagcgacaagagcgtgtgtctgttcaccgacttcgacagccagaccaacgtgtcccagagcaaggactccgacgtgtacatcaccgataagaccgtgctggacatgcggagcatggacttcaagagcaactccgccgtggcctggtccaacaagtccgatttcgcctgcgccaacgccttcaacaacagcattatccccgaggacacattcttcccaagccccgagagcagctgcggtacccagagttttgggttgttggaccctaaattgtgctatctgttggacggaatcctgttcatttacggagtgatcctgaccgcattgttcctgaagagaggccggaagaagctgctgtacatcttcaagcagcctttcatgcggcccgtgcagaccacccaggaagaggacggctgctcctgccggttccccgaggaagaagaaggcggctgcgagctgcgggttaagttttccagatccgcagacgcacccgcttaccaacaagggcagaaccaactctacaatgaacttaatttggggcggagggaagagtacgacgttctggacaaaaggaggggacgagatcccgagatgggcggaaagcctcagcgaaggaagaatccgcaagaggggctttataacgaactccagaaagataaaatggcagaagcctatagtgagattgggatgaagggagaaaggaggaggggtaaaggtcacgatgggttgtaccaaggattgagcacagccactaaagatacctatgatgcgctccacatgcaggccctgccgccaaga

SEQ ID NO: 7074 - DNA, 2832 bp, Artificial Sequence
  Synthetic Polynucloetide
atggccttaccagtgaccgccttgctcctgccgctggccttgctgctccacgccgccaggccgcaggtgcagctggttgaatctggcggaggactggttcagcctggcggatctctgagactgtcttgtgccgccagcggcttcaccttcaccaatcacgccatgagctgggtccgacaggcccctggaaaaggactggaactggtgtctagcatcagcggcaacggcagaaccacctactacgccgatagcgtgaagggcagattcaccatcagccgggacatcagcaagaacaccctggacctccagatgaacagcctgagagccgaggataccgccgtgtactactgtgccaaggatggcggagagacactggtggatagcagaggccagggcacactggtcacagtgtcatctctcgaggggaaaccaattcccaaccctcttctgggactggattcaaccggcagcggcgaggacctgaagaacgtgttcccacctgaggtggccgtgttcgagcctagcgaggccgagatcagccacacccagaaagccaccctcgtgtgcctggctaccggcttctaccccgaccatgtggaactgtcttggtgggtcaacggcaaagaggtgcacagcggcgtgtctaccgacccccagccactgaaagaacagcccgccctgaacgacagccggtactgcctgagcagcagactgagagtgtccgccaccttctggcagaacccccggaaccacttcagatgccaggtgcagttctacggcctgagcgagaacgacgagtggacccaggacagagccaagcccgtgacccagatcgtgtctgccgaagcctggggcagagccgattgcggatcccagagcttcggcctgctggaccccaagctgtgctacctgctggatggcatcctgttcatctacggcgtgatcctgaccgccctgttcctgaaacggggcagaaagaaactcctgtatatattcaaacaaccatttatgagaccagtacaaactactcaagaggaagatggctgtagctgccgatttccagaagaagaagaaggaggatgtgaactgagagtgaagttcagcagaagcgccgacgcccctgcctaccagcagggacagaaccaactgtacaacgagctgaacctgggcagacgggaagagtacgacgtgctggacaagcggagaggcagggaccctgagatgggcggaaagccccagcggagaaagaacccccaggaaggactgtataacgaactccagaaagacaagatggccgaagcctacagcgagatcggcatgaagggcgagcggagaagaggcaagggccacgatggcctgtaccagggcctgagcaccgccaccaaggacacctatgacgccctgcacatgcaggccctgcctccaagaagggccaagcgatctggatctggagcaacaaacttctcactactcaaacaagcaggtgacgtggaggagaatcccgggcctactagtatggactggatttggcgcatccttttccttgtcggcgctgctaccggcgcgcattccttcgaagaagttcagctgcttgagtctggcggaggactggttcaacctggcggaagcctgagactgtcttgtgccgccagcggcttcatcttcagcagctacgccatgagctgggtccgacaggctcctggaaagggccaagaatgggtttccggcgttagcggcacaggcgtgaacacctactacgccgatagcgtgaagggcagattcaccatcagccgggacaacagcaagaacaccctgtacctccagatgaacagcctgagagccgaggacaccgccgtgtactattgtgcctctggcaaaggctgggacagcggctcttggtacgaggactatagaggccagggcaccctggtcacagtttcttcaacgcgtgagcagaaactgatctcggaagaggatctggggagcggcatccagaaccctgatcctgccgtgtaccagctgcgggatagcaagagcagcgacaagagcgtgtgtctgttcaccgacttcgacagccagaccaacgtgtcccagagcaaggactccgacgtgtacatcaccgataagaccgtgctggacatgcggagcatggacttcaagagcaactccgccgtggcctggtccaacaagtccgatttcgcctgcgccaacgccttcaacaacagcattatccccgaggacacattcttcccaagccccgagagcagctgcggtacccagagttttgggttgttggaccctaaattgtgctatctgttggacggaatcctgttcatttacggagtgatcctgaccgcattgttcctgaagagaggccggaagaagctgctgtacatcttcaagcagcctttcatgcggcccgtgcagaccacccaggaagaggacggctgctcctgccggttccccgaggaagaagaaggcggctgcgagctgcgggttaagttttccagatccgcagacgcacccgcttaccaacaagggcagaaccaactctacaatgaacttaatttggggcggagggaagagtacgacgttctggacaaaaggaggggacgagatcccgagatgggcggaaagcctcagcgaaggaagaatccgcaagaggggctttataacgaactccagaaagataaaatggcagaagcctatagtgagattgggatgaagggagaaaggaggaggggtaaaggtcacgatgggttgtaccaaggattgagcacagccactaaagatacctatgatgcgctccacatgcaggccctgccgccaaga

SEQ ID NO: 7075 - DNA, 2505 bp, Artificial Sequence
  Synthetic Polynucloetide
atggccttaccagtgaccgccttgctcctgccgctggccttgctgctccacgccgccaggccgcaggtgcagctggttgaatctggcggaggactggttcagcctggcggatctctgagactgtcttgtgccgccagcggcttcaccttcaccaatcacgccatgagctgggtccgacaggcccctggaaaaggactggaactggtgtctagcatcagcggcaacggcagaaccacctactacgccgatagcgtgaagggcagattcaccatcagccgggacatcagcaagaacaccctggacctccagatgaacagcctgagagccgaggataccgccgtgtactactgtgccaaggatggcggagagacactggtggatagcagaggccagggcacactggtcacagtgtcatctctcgagcagagcttcggcctgctggaccccaagctgtgctacctgctggatggcatcctgttcatctacggcgtgatcctgaccgccctgttcctgagagtgaagttcagcagaagcgccgacgcccctgcctaccagcagggacagaaccaactgtacaacgagctgaacctgggcagacgggaagagtacgacgtgctggacaagcggagaggcagggaccctgagatgggcggaaagccccagcggagaaagaacccccaggaaggactgtataacgaactccagaaagacaagatggccgaagcctacagcgagatcggcatgaagggcgagcggagaagaggcaagggccacgatggcctgtaccagggcctgagcaccgccaccaaggacacctatgacgccctgcacatgcaggccctgcctccaagaagggccaagcgatctggatctggagcaacaaacttctcactactcaaacaagcaggtgacgtggaggagaatcccgggcctactagtatggactggatttggcgcatccttttccttgtcggcgctgctaccggcgcgcattccttcgaagaagttcagctgcttgagtctggcggaggactggttcaacctggcggaagcctgagactgtcttgtgccgccagcggcttcatcttcagcagctacgccatgagctgggtccgacaggctcctggaaagggccaagaatgggtttccggcgttagcggcacaggcgtgaacacctactacgccgatagcgtgaagggcagattcaccatcagccgggacaacagcaagaacaccctgtacctccagatgaacagcctgagagccgaggacaccgccgtgtactattgtgcctctggcaaaggctgggacagcggctcttggtacgaggactatagaggccagggcaccctggtcacagtttcttcaacgcgtcagagttttgggttgttggaccctaaattgtgctatctgttggacggaatcctgttcatttacggagtgatcctgaccgcattgttcctgcgggttaagttttccagatccgcagacgcacccgcttaccaacaagggcagaaccaactctacaatgaacttaatttggggcggagggaagagtacgacgttctggacaaaaggaggggacgagatcccgagatgggcggaaagcctcagcgaaggaagaatccgcaagaggggctttataacgaactccagaaagataaaatggcagaagcctatagtgagattgggatgaagggagaaaggaggaggggtaaaggtcacgatgggttgtaccaaggattgagcacagccactaaagatacctatgatgcgctccacatgcaggccctgccgccaagacgcgccaagagaagcggatctggcgtgaagcagaccctgaatttcgacctgctgaagctggctggcgacgtggaatccaacccaggcccttctagaggccatatgaccgagtacaagcccacggtgcgcctcgccacccgcgacgacgtccccagggccgtacgcaccctcgccgccgcgttcgccgactaccccgccacgcgccacaccgtcgatccggaccgccacatcgagcgggtcaccgagctgcaagaactcttcctcacgcgcgtcgggctcgacatcggcaaggtgtgggtcgcggacgacggcgccgcggtggcggtctggaccacgccggagagcgtcgaagcgggggcggtgttcgccgagatcggcccgcgcatggccgagttgagcggttcccggctggccgcgcagcaacagatggaaggcctcctggcgccgcaccggcccaaggagcccgcgtggttcctggccaccgtcggcgtctcgcccgaccaccagggcaagggtctgggcagcgccgtcgtgctccccggagtggaggcggccgagcgcgccggggtgcccgccttcctggagacctccgcgccccgcaacctccccttctacgagcggctcggcttcaccgtcaccgccgacgtcgaggtgcccgaaggaccgcgcacctggtgcatgacccgcaagcccggtgcctga

SEQ ID NO: 7076 - DNA, 1977 bp, Artificial Sequence
  Synthetic Polynucloetide
atggccttaccagtgaccgccttgctcctgccgctggccttgctgctccacgccgccaggccgcaggtgcagctggttgaatctggcggaggactggttcagcctggcggatctctgagactgtcttgtgccgccagcggcttcaccttcaccaatcacgccatgagctgggtccgacaggcccctggaaaaggactggaactggtgtctagcatcagcggcaacggcagaaccacctactacgccgatagcgtgaagggcagattcaccatcagccgggacatcagcaagaacaccctggacctccagatgaacagcctgagagccgaggataccgccgtgtactactgtgccaaggatggcggagagacactggtggatagcagaggccagggcacactggtcacagtgtcatctctcgagggacagcctaaggccaatcctaccgtgacactgttccctccaagcagcgaagaactccaggccaacaaggccacacttgtgtgcctgatctccgacttctaccctggggctgtgacagtggcttggaaggccgatggatctcctgtgaaagccggcgtggaaaccaccaagccatccaagcagagcaacaacaaatacgccgccagctcctacctgagcctgacacctgagcagtggaagtcccacagatcctacagctgccaagtgacccacgaaggcagcaccgtggaaaagacagtggcccctacagagtgcagccccatcaagaccgatgtgattacaatggaccccaaggacaactgctccaaggacgccaacgataccctgctgctccagctgaccaacaccagcgcctactacatgtacttgttgctgctgctgaagtccgtggtgtacttcgccatcatcacatgctgcctgctgcggagaaccgccttctgctgcaacggcgagaagtctagggccaagcgatctggatctggagcaacaaacttctcactactcaaacaagcaggtgacgtggaggagaatcccgggcctactagtatggactggatttggcgcatccttttccttgtcggcgctgctaccggcgcgcattccttcgaagaagttcagctgcttgagtctggcggaggactggttcaacctggcggaagcctgagactgtcttgtgccgccagcggcttcatcttcagcagctacgccatgagctgggtccgacaggctcctggaaagggccaagaatgggtttccggcgttagcggcacaggcgtgaacacctactacgccgatagcgtgaagggcagattcaccatcagccgggacaacagcaagaacaccctgtacctccagatgaacagcctgagagccgaggacaccgccgtgtactattgtgcctctggcaaaggctgggacagcggctcttggtacgaggactatagaggccagggcaccctggtcacagtttcttcaacgcgtgcctctacaaagggaccctccgtgtttcctctggctcccagcagcaagtctacaagcggaggaacagccgctctgggctgcctggtcaaggattactttcccgagcctgtgaccgtgtcctggaatagcggagcactgacaagcggcgtgcacacctttccagccgtgctgcaaagcagcggcctgtactctctgagcagcgtggtcacagtgcctagctctagcctgggcacccagacctacatctgcaatgtgaaccacaagcctagcaacaccaaggtggacaagagagtggaacccaagagctgtgaagtgaaaaccgactccaccgaccacgtgaagcccaaagagacagagaacaccaagcagcccagcaagagctgccacaagcccaaggccatcgtgcacaccgagaaagtgaacatgatgagcctgaccgtgctgggcctgcggatgctgttcgccaaaaccgtggccgtgaacttcctgctgaccgccaagctgttcttcctc

SEQ ID NO: 7077 - DNA, 1911 bp, Artificial Sequence
  Synthetic Polynucloetide
atggccttaccagtgaccgccttgctcctgccgctggccttgctgctccacgccgccaggccgcaggtgcagctggttgaatctggcggaggactggttcagcctggcggatctctgagactgtcttgtgccgccagcggcttcaccttcaccaatcacgccatgagctgggtccgacaggcccctggaaaaggactggaactggtgtctagcatcagcggcaacggcagaaccacctactacgccgatagcgtgaagggcagattcaccatcagccgggacatcagcaagaacaccctggacctccagatgaacagcctgagagccgaggataccgccgtgtactactgtgccaaggatggcggagagacactggtggatagcagaggccagggcacactggtcacagtgtcatctctcgagggacagcctaaggccaatcctaccgtgacactgttccctccaagcagcgaagaactccaggccaacaaggccacacttgtgtgcctgatctccgacttctaccctggggctgtgacagtggcttggaaggccgatggatctcctgtgaaagccggcgtggaaaccaccaagccatccaagcagagcaacaacaaatacgccgccagctcctacctgagcctgacacctgagcagtggaagtcccacagatcctacagctgccaagtgacccacgaaggcagcaccgtggaaaagacagtggcccctacagagtgcagcggcagagccgattgcggcatcaccagcgccagctaccaccagggcgtgctgagcgccaccatcctgtacgagatcctgctgggcaaggccaccctgtacgccgtgctggtgtctgccctggtgctgatggctatggtcaagcggaaggacagccggggaagggccaagcgatctggatctggagcaacaaacttctcactactcaaacaagcaggtgacgtggaggagaatcccgggcctactagtatggactggatttggcgcatccttttccttgtcggcgctgctaccggcgcgcattccttcgaagaagttcagctgcttgagtctggcggaggactggttcaacctggcggaagcctgagactgtcttgtgccgccagcggcttcatcttcagcagctacgccatgagctgggtccgacaggctcctggaaagggccaagaatgggtttccggcgttagcggcacaggcgtgaacacctactacgccgatagcgtgaagggcagattcaccatcagccgggacaacagcaagaacaccctgtacctccagatgaacagcctgagagccgaggacaccgccgtgtactattgtgcctctggcaaaggctgggacagcggctcttggtacgaggactatagaggccagggcaccctggtcacagtttcttcaacgcgtgcctctacaaagggaccctccgtgtttcctctggctcccagcagcaagtctacaagcggaggaacagccgctctgggctgcctggtcaaggattactttcccgagcctgtgaccgtgtcctggaatagcggagcactgacaagcggcgtgcacacctttccagccgtgctgcaaagcagcggcctgtactctctgagcagcgtggtcacagtgcctagctctagcctgggcacccagacctacatctgcaatgtgaaccacaagcctagcaacaccaaggtggacaagagagtggaacccaagagctgtatccccgaggacacattcttcccaagcagcgacgtgccctgcgacgtgaagctggtggaaaagagcttcgagacagacaccaacctgaacttccagaacctgagcgtgatcggcttcagaatcctgctgctgaaagtggccggctttaacctgctgatgaccctgcggctgtggtccagc

SEQ ID NO: 7078 - DNA, 1911 bp, Artificial Sequence
  Synthetic Polynucloetide
atggccttaccagtgaccgccttgctcctgccgctggccttgctgctccacgccgccaggccgcaggtgcagctggttgaatctggcggaggactggttcagcctggcggatctctgagactgtcttgtgccgccagcggcttcaccttcaccaatcacgccatgagctgggtccgacaggcccctggaaaaggactggaactggtgtctagcatcagcggcaacggcagaaccacctactacgccgatagcgtgaagggcagattcaccatcagccgggacatcagcaagaacaccctggacctccagatgaacagcctgagagccgaggataccgccgtgtactactgtgccaaggatggcggagagacactggtggatagcagaggccagggcacactggtcacagtgtcatctctcgagggacagcctaaggccaatcctaccgtgacactgttccctccaagcagcgaagaactccaggccaacaaggccacacttgtgtgcctgatctccgacttctaccctggggctgtgacagtggcttggaaggccgatggatctcctgtgaaagccggcgtggaaaccaccaagccatccaagcagagcaacaacaaatacgccgccagctcctacctgagcctgacacctgagcagtggaagtcccacagatcctacagctgccaagtgacccacgaaggcagcaccgtggaaaagacagtggcccctacagagtgcagcggcagagccgattgcggctttaccagcgagagctaccagcagggcgtgctgagcgccaccatcctgtacgagatcctgctgggcaaggccaccctgtacgccgtgctggtgtctgccctggtgctgatggctatggtcaagcggaaggacagccggggaagggccaagcgatctggatctggagcaacaaacttctcactactcaaacaagcaggtgacgtggaggagaatcccgggcctactagtatggactggatttggcgcatccttttccttgtcggcgctgctaccggcgcgcattccttcgaagaagttcagctgcttgagtctggcggaggactggttcaacctggcggaagcctgagactgtcttgtgccgccagcggcttcatcttcagcagctacgccatgagctgggtccgacaggctcctggaaagggccaagaatgggtttccggcgttagcggcacaggcgtgaacacctactacgccgatagcgtgaagggcagattcaccatcagccgggacaacagcaagaacaccctgtacctccagatgaacagcctgagagccgaggacaccgccgtgtactattgtgcctctggcaaaggctgggacagcggctcttggtacgaggactatagaggccagggcaccctggtcacagtttcttcaacgcgtgcctctacaaagggaccctccgtgtttcctctggctcccagcagcaagtctacaagcggaggaacagccgctctgggctgcctggtcaaggattactttcccgagcctgtgaccgtgtcctggaatagcggagcactgacaagcggcgtgcacacctttccagccgtgctgcaaagcagcggcctgtactctctgagcagcgtggtcacagtgcctagctctagcctgggcacccagacctacatctgcaatgtgaaccacaagcctagcaacaccaaggtggacaagagagtggaacccaagagctgtatccccgaggacacattcttcccaagccccgagagcagctgcgacgtgaagctggtggaaaagagcttcgagacagacaccaacctgaacttccagaacctgagcgtgatcggcttcagaatcctgctgctgaaagtggccggctttaacctgctgatgaccctgcggctgtggtccagc

SEQ ID NO: 7079 - DNA, 1374 bp, Artificial Sequence
  Synthetic Polynucloetide
atggccttaccagtgaccgccttgctcctgccgctggccttgctgctccacgccgccaggccgcaggtgcagctggttgaatctggcggaggactggttcagcctggcggatctctgagactgtcttgtgccgccagcggcttcaccttcaccaatcacgccatgagctgggtccgacaggcccctggaaaaggactggaactggtgtctagcatcagcggcaacggcagaaccacctactacgccgatagcgtgaagggcagattcaccatcagccgggacatcagcaagaacaccctggacctccagatgaacagcctgagagccgaggataccgccgtgtactactgtgccaaggatggcggagagacactggtggatagcagaggccagggcacactggtcacagtgtcatctctcgagagcggcggaggcggatctttcgaagaagttcagctgcttgagtctggcggaggactggttcaacctggcggaagcctgagactgtcttgtgccgccagcggcttcatcttcagcagctacgccatgagctgggtccgacaggctcctggaaagggccaagaatgggtttccggcgttagcggcacaggcgtgaacacctactacgccgatagcgtgaagggcagattcaccatcagccgggacaacagcaagaacaccctgtacctccagatgaacagcctgagagccgaggacaccgccgtgtactattgtgcctctggcaaaggctgggacagcggctcttggtacgaggactatagaggccagggcaccctggtcacagtttcttcaacgcgtgacggtaacgaggagatgggaggaatcactcaaaccccttacaaagtctcaatttcaggaacaactgttatccttacatgtccccagtatcctggcagcgagatcctttggcagcataacgacaagaatatagggggagatgaagacgataagaatatcggatctgacgaggatcacttgagcctgaaagagttctccgagcttgaacaaagcggatattatgtgtgctatccgcgcgggtcaaagccggaagacgctaacttttacctttatctccgagccagagtgtgcgaaaattgcatggaaatggacgttatgtccgttgctacaatagttatcgtagatatatgcatcacgggtggactgcttctgctggtttattattggtccaagaatagaaaggccaaagctaaacccgtgaccagaggcgctggcgcaggcggaaggcaaaggggacaaaacaaagaacggccaccaccagtgccaaatccagattatgagcctattcggaaaggacagagggacctgtactctggcctgaatcagagaagaatc

SEQ ID NO: 7080 - DNA, 1269 bp, Artificial Sequence
  Synthetic Polynucloetide
atggccttaccagtgaccgccttgctcctgccgctggccttgctgctccacgccgccaggccgcaggtgcagctggttgaatctggcggaggactggttcagcctggcggatctctgagactgtcttgtgccgccagcggcttcaccttcaccaatcacgccatgagctgggtccgacaggcccctggaaaaggactggaactggtgtctagcatcagcggcaacggcagaaccacctactacgccgatagcgtgaagggcagattcaccatcagccgggacatcagcaagaacaccctggacctccagatgaacagcctgagagccgaggataccgccgtgtactactgtgccaaggatggcggagagacactggtggatagcagaggccagggcacactggtcacagtgtcatctctcgagagcggcggaggcggatctttcgaagaagttcagctgcttgagtctggcggaggactggttcaacctggcggaagcctgagactgtcttgtgccgccagcggcttcatcttcagcagctacgccatgagctgggtccgacaggctcctggaaagggccaagaatgggtttccggcgttagcggcacaggcgtgaacacctactacgccgatagcgtgaagggcagattcaccatcagccgggacaacagcaagaacaccctgtacctccagatgaacagcctgagagccgaggacaccgccgtgtactattgtgcctctggcaaaggctgggacagcggctcttggtacgaggactatagaggccagggcaccctggtcacagtttcttcaacgcgtttcaagatccccatcgaggaactggaagatcgggtgttcgtgaactgcaacacctctatcacctgggtggaaggcaccgtgggaacactgctgagcgacatcaccagactggacctcggcaagcggattctggaccctcggggcatctacagatgcaacggcaccgacatctacaaggacaaagaaagcaccgtgcaggtccactacagaatgtgccagtcctgcgtggaactggaccctgctacagtggccggcatcatcgtgaccgatgtgatcgctactctgctgctggctctgggagtgttctgcttcgccggacacgaaacaggcagactgtctggcgctgccgatacacaggccctgctgagaaacgaccaagtgtatcagcccctgcgcgacagagatgatgcccagtattctcacctcggcggcaactgggctagaaacaag

SEQ ID NO: 7081 - DNA, 1299 bp, Artificial Sequence
  Synthetic Polynucloetide
atggccttaccagtgaccgccttgctcctgccgctggccttgctgctccacgccgccaggccgcaggtgcagctggttgaatctggcggaggactggttcagcctggcggatctctgagactgtcttgtgccgccagcggcttcaccttcaccaatcacgccatgagctgggtccgacaggcccctggaaaaggactggaactggtgtctagcatcagcggcaacggcagaaccacctactacgccgatagcgtgaagggcagattcaccatcagccgggacatcagcaagaacaccctggacctccagatgaacagcctgagagccgaggataccgccgtgtactactgtgccaaggatggcggagagacactggtggatagcagaggccagggcacactggtcacagtgtcatctctcgagagcggcggaggcggatctttcgaagaagttcagctgcttgagtctggcggaggactggttcaacctggcggaagcctgagactgtcttgtgccgccagcggcttcatcttcagcagctacgccatgagctgggtccgacaggctcctggaaagggccaagaatgggtttccggcgttagcggcacaggcgtgaacacctactacgccgatagcgtgaagggcagattcaccatcagccgggacaacagcaagaacaccctgtacctccagatgaacagcctgagagccgaggacaccgccgtgtactattgtgcctctggcaaaggctgggacagcggctcttggtacgaggactatagaggccagggcaccctggtcacagtttcttcaacgcgtcagagcatcaagggcaaccacctggtcaaggtgtacgactaccaagaggacggcagcgtgctgctgacatgtgatgccgaggccaagaacatcacctggtttaaggacggcaagatgatcggcttcctgaccgaggacaagaagaagtggaacctgggcagcaacgctaaggaccccagaggcatgtatcagtgcaagggcagccagaacaagagcaagcccctccaggtgtactaccggatgtgccagaactgcatcgagctgaacgccgctaccatcagcggctttctgttcgccgagatcgtgtccatcttcgtgctggccgtgggcgtgtactttatcgctggacaggatggcgtgcggcagagcagagcttccgataagcaaaccctgctgcctaacgaccagctgtaccagcctctgaaggacagagaggacgaccagtacagccacctccagggcaatcagctgagaagaaac

SEQ ID NO: 7082 - DNA, 1248 bp, Artificial Sequence
  Synthetic Polynucloetide
atggccttaccagtgaccgccttgctcctgccgctggccttgctgctccacgccgccaggccgcaggtgcagctggttgaatctggcggaggactggttcagcctggcggatctctgagactgtcttgtgccgccagcggcttcaccttcaccaatcacgccatgagctgggtccgacaggcccctggaaaaggactggaactggtgtctagcatcagcggcaacggcagaaccacctactacgccgatagcgtgaagggcagattcaccatcagccgggacatcagcaagaacaccctggacctccagatgaacagcctgagagccgaggataccgccgtgtactactgtgccaaggatggcggagagacactggtggatagcagaggccagggcacactggtcacagtgtcatctctcgagagcggcggaggcggatctttcgaagaagttcagctgcttgagtctggcggaggactggttcaacctggcggaagcctgagactgtcttgtgccgccagcggcttcatcttcagcagctacgccatgagctgggtccgacaggctcctggaaagggccaagaatgggtttccggcgttagcggcacaggcgtgaacacctactacgccgatagcgtgaagggcagattcaccatcagccgggacaacagcaagaacaccctgtacctccagatgaacagcctgagagccgaggacaccgccgtgtactattgtgcctctggcaaaggctgggacagcggctcttggtacgaggactatagaggccagggcaccctggtcacagtttcttcaacgcgtcagagttttgggttgttggaccctaaattgtgctatctgttggacggaatcctgttcatttacggagtgatcctgaccgcattgttcctgcgggttaagttttccagatccgcagacgcacccgcttaccaacaagggcagaaccaactctacaatgaacttaatttggggcggagggaagagtacgacgttctggacaaaaggaggggacgagatcccgagatgggcggaaagcctcagcgaaggaagaatccgcaagaggggctttataacgaactccagaaagataaaatggcagaagcctatagtgagattgggatgaagggagaaaggaggaggggtaaaggtcacgatgggttgtaccaaggattgagcacagccactaaagatacctatgatgcgctccacatgcaggccctgccgccaaga

SEQ ID NO: 7083 - DNA, 1377 bp, Artificial Sequence
  Synthetic Polynucloetide
atggccttaccagtgaccgccttgctcctgccgctggccttgctgctccacgccgccaggccggaagaagttcagctgcttgagtctggcggaggactggttcaacctggcggaagcctgagactgtcttgtgccgccagcggcttcatcttcagcagctacgccatgagctgggtccgacaggctcctggaaagggccaagaatgggtttccggcgttagcggcacaggcgtgaacacctactacgccgatagcgtgaagggcagattcaccatcagccgggacaacagcaagaacaccctgtacctccagatgaacagcctgagagccgaggacaccgccgtgtactattgtgcctctggcaaaggctgggacagcggctcttggtacgaggactatagaggccagggcaccctggtcacagtttcttcactcgagagcggcggaggcggatctttcgaacaggtgcagctggttgaatctggcggaggactggttcagcctggcggatctctgagactgtcttgtgccgccagcggcttcaccttcaccaatcacgccatgagctgggtccgacaggcccctggaaaaggactggaactggtgtctagcatcagcggcaacggcagaaccacctactacgccgatagcgtgaagggcagattcaccatcagccgggacatcagcaagaacaccctggacctccagatgaacagcctgagagccgaggataccgccgtgtactactgtgccaaggatggcggagagacactggtggatagcagaggccagggcacactggtcacagtgtcatctacgcgtgacggtaacgaggagatgggaggaatcactcaaaccccttacaaagtctcaatttcaggaacaactgttatccttacatgtccccagtatcctggcagcgagatcctttggcagcataacgacaagaatatagggggagatgaagacgataagaatatcggatctgacgaggatcacttgagcctgaaagagttctccgagcttgaacaaagcggatattatgtgtgctatccgcgcgggtcaaagccggaagacgctaacttttacctttatctccgagccagagtgtgcgaaaattgcatggaaatggacgttatgtccgttgctacaatagttatcgtagatatatgcatcacgggtggactgcttctgctggtttattattggtccaagaatagaaaggccaaagctaaacccgtgaccagaggcgctggcgcaggcggaaggcaaaggggacaaaacaaagaacggccaccaccagtgccaaatccagattatgagcctattcggaaaggacagagggacctgtactctggcctgaatcagagaagaatc

SEQ ID NO: 7084 - DNA, 1272 bp, Artificial Sequence
  Synthetic Polynucloetide
atggccttaccagtgaccgccttgctcctgccgctggccttgctgctccacgccgccaggccggaagaagttcagctgcttgagtctggcggaggactggttcaacctggcggaagcctgagactgtcttgtgccgccagcggcttcatcttcagcagctacgccatgagctgggtccgacaggctcctggaaagggccaagaatgggtttccggcgttagcggcacaggcgtgaacacctactacgccgatagcgtgaagggcagattcaccatcagccgggacaacagcaagaacaccctgtacctccagatgaacagcctgagagccgaggacaccgccgtgtactattgtgcctctggcaaaggctgggacagcggctcttggtacgaggactatagaggccagggcaccctggtcacagtttcttcactcgagagcggcggaggcggatctttcgaacaggtgcagctggttgaatctggcggaggactggttcagcctggcggatctctgagactgtcttgtgccgccagcggcttcaccttcaccaatcacgccatgagctgggtccgacaggcccctggaaaaggactggaactggtgtctagcatcagcggcaacggcagaaccacctactacgccgatagcgtgaagggcagattcaccatcagccgggacatcagcaagaacaccctggacctccagatgaacagcctgagagccgaggataccgccgtgtactactgtgccaaggatggcggagagacactggtggatagcagaggccagggcacactggtcacagtgtcatctacgcgtttcaagatccccatcgaggaactggaagatcgggtgttcgtgaactgcaacacctctatcacctgggtggaaggcaccgtgggaacactgctgagcgacatcaccagactggacctcggcaagcggattctggaccctcggggcatctacagatgcaacggcaccgacatctacaaggacaaagaaagcaccgtgcaggtccactacagaatgtgccagtcctgcgtggaactggaccctgctacagtggccggcatcatcgtgaccgatgtgatcgctactctgctgctggctctgggagtgttctgcttcgccggacacgaaacaggcagactgtctggcgctgccgatacacaggccctgctgagaaacgaccaagtgtatcagcccctgcgcgacagagatgatgcccagtattctcacctcggcggcaactgggctagaaacaag

SEQ ID NO: 7085 - DNA, 1302 bp, Artificial Sequence
  Synthetic Polynucloetide
atggccttaccagtgaccgccttgctcctgccgctggccttgctgctccacgccgccaggccggaagaagttcagctgcttgagtctggcggaggactggttcaacctggcggaagcctgagactgtcttgtgccgccagcggcttcatcttcagcagctacgccatgagctgggtccgacaggctcctggaaagggccaagaatgggtttccggcgttagcggcacaggcgtgaacacctactacgccgatagcgtgaagggcagattcaccatcagccgggacaacagcaagaacaccctgtacctccagatgaacagcctgagagccgaggacaccgccgtgtactattgtgcctctggcaaaggctgggacagcggctcttggtacgaggactatagaggccagggcaccctggtcacagtttcttcactcgagagcggcggaggcggatctttcgaacaggtgcagctggttgaatctggcggaggactggttcagcctggcggatctctgagactgtcttgtgccgccagcggcttcaccttcaccaatcacgccatgagctgggtccgacaggcccctggaaaaggactggaactggtgtctagcatcagcggcaacggcagaaccacctactacgccgatagcgtgaagggcagattcaccatcagccgggacatcagcaagaacaccctggacctccagatgaacagcctgagagccgaggataccgccgtgtactactgtgccaaggatggcggagagacactggtggatagcagaggccagggcacactggtcacagtgtcatctacgcgtcagagcatcaagggcaaccacctggtcaaggtgtacgactaccaagaggacggcagcgtgctgctgacatgtgatgccgaggccaagaacatcacctggtttaaggacggcaagatgatcggcttcctgaccgaggacaagaagaagtggaacctgggcagcaacgctaaggaccccagaggcatgtatcagtgcaagggcagccagaacaagagcaagcccctccaggtgtactaccggatgtgccagaactgcatcgagctgaacgccgctaccatcagcggctttctgttcgccgagatcgtgtccatcttcgtgctggccgtgggcgtgtactttatcgctggacaggatggcgtgcggcagagcagagcttccgataagcaaaccctgctgcctaacgaccagctgtaccagcctctgaaggacagagaggacgaccagtacagccacctccagggcaatcagctgagaagaaac

SEQ ID NO: 7086 - DNA, 1251 bp, Artificial Sequence
  Synthetic Polynucloetide
atggccttaccagtgaccgccttgctcctgccgctggccttgctgctccacgccgccaggccggaagaagttcagctgcttgagtctggcggaggactggttcaacctggcggaagcctgagactgtcttgtgccgccagcggcttcatcttcagcagctacgccatgagctgggtccgacaggctcctggaaagggccaagaatgggtttccggcgttagcggcacaggcgtgaacacctactacgccgatagcgtgaagggcagattcaccatcagccgggacaacagcaagaacaccctgtacctccagatgaacagcctgagagccgaggacaccgccgtgtactattgtgcctctggcaaaggctgggacagcggctcttggtacgaggactatagaggccagggcaccctggtcacagtttcttcactcgagagcggcggaggcggatctttcgaacaggtgcagctggttgaatctggcggaggactggttcagcctggcggatctctgagactgtcttgtgccgccagcggcttcaccttcaccaatcacgccatgagctgggtccgacaggcccctggaaaaggactggaactggtgtctagcatcagcggcaacggcagaaccacctactacgccgatagcgtgaagggcagattcaccatcagccgggacatcagcaagaacaccctggacctccagatgaacagcctgagagccgaggataccgccgtgtactactgtgccaaggatggcggagagacactggtggatagcagaggccagggcacactggtcacagtgtcatctacgcgtcagagttttgggttgttggaccctaaattgtgctatctgttggacggaatcctgttcatttacggagtgatcctgaccgcattgttcctgcgggttaagttttccagatccgcagacgcacccgcttaccaacaagggcagaaccaactctacaatgaacttaatttggggcggagggaagagtacgacgttctggacaaaaggaggggacgagatcccgagatgggcggaaagcctcagcgaaggaagaatccgcaagaggggctttataacgaactccagaaagataaaatggcagaagcctatagtgagattgggatgaagggagaaaggaggaggggtaaaggtcacgatgggttgtaccaaggattgagcacagccactaaagatacctatgatgcgctccacatgcaggccctgccgccaaga

SEQ ID NO: 7087 - DNA, 1950 bp, Artificial Sequence
  Synthetic Polynucloetide
atggccttaccagtgaccgccttgctcctgccgctggccttgctgctccacgccgccaggccgcaggtgcagctggttgaatctggcggaggactggttcagcctggcggatctctgagactgtcttgtgccgccagcggcttcaccttcaccaatcacgccatgagctgggtccgacaggcccctggaaaaggactggaactggtgtctagcatcagcggcaacggcagaaccacctactacgccgatagcgtgaagggcagattcaccatcagccgggacatcagcaagaacaccctggacctccagatgaacagcctgagagccgaggataccgccgtgtactactgtgccaaggatggcggagagacactggtggatagcagaggccagggcacactggtcacagtgtcatctctcgagagcggcggaggcggatctttcgaagaagttcagctgcttgagtctggcggaggactggttcaacctggcggaagcctgagactgtcttgtgccgccagcggcttcatcttcagcagctacgccatgagctgggtccgacaggctcctggaaagggccaagaatgggtttccggcgttagcggcacaggcgtgaacacctactacgccgatagcgtgaagggcagattcaccatcagccgggacaacagcaagaacaccctgtacctccagatgaacagcctgagagccgaggacaccgccgtgtactattgtgcctctggcaaaggctgggacagcggctcttggtacgaggactatagaggccagggcaccctggtcacagtttcttcaacgcgtgggagcggcatccagaaccctgatcctgccgtgtaccagctgcgggatagcaagagcagcgacaagagcgtgtgtctgttcaccgacttcgacagccagaccaacgtgtcccagagcaaggactccgacgtgtacatcaccgataagaccgtgctggacatgcggagcatggacttcaagagcaactccgccgtggcctggtccaacaagtccgatttcgcctgcgccaacgccttcaacaacagcattatccccgaggacacattcttcccaagccccgagagcagctgcgacgtgaagctggtggaaaagagcttcgagacagacaccaacctgaacttccagaacctgagcgtgatcggcttcagaatcctgctgctgaaagtggccggctttaacctgctgatgaccctgcggctgtggtccagccgcgccaagagaagcggatctggcgtgaagcagaccctgaatttcgacctgctgaagctggctggcgacgtggaatccaacccaggcccttctagaggccatatgaccgagtacaagcccacggtgcgcctcgccacccgcgacgacgtccccagggccgtacgcaccctcgccgccgcgttcgccgactaccccgccacgcgccacaccgtcgatccggaccgccacatcgagcgggtcaccgagctgcaagaactcttcctcacgcgcgtcgggctcgacatcggcaaggtgtgggtcgcggacgacggcgccgcggtggcggtctggaccacgccggagagcgtcgaagcgggggcggtgttcgccgagatcggcccgcgcatggccgagttgagcggttcccggctggccgcgcagcaacagatggaaggcctcctggcgccgcaccggcccaaggagcccgcgtggttcctggccaccgtcggcgtctcgcccgaccaccagggcaagggtctgggcagcgccgtcgtgctccccggagtggaggcggccgagcgcgccggggtgcccgccttcctggagacctccgcgccccgcaacctccccttctacgagcggctcggcttcaccgtcaccgccgacgtcgaggtgcccgaaggaccgcgcacctggtgcatgacccgcaagcccggtgcctga

SEQ ID NO: 7088 - DNA, 2046 bp, Artificial Sequence
  Synthetic Polynucloetide
atggccttaccagtgaccgccttgctcctgccgctggccttgctgctccacgccgccaggccgcaggtgcagctggttgaatctggcggaggactggttcagcctggcggatctctgagactgtcttgtgccgccagcggcttcaccttcaccaatcacgccatgagctgggtccgacaggcccctggaaaaggactggaactggtgtctagcatcagcggcaacggcagaaccacctactacgccgatagcgtgaagggcagattcaccatcagccgggacatcagcaagaacaccctggacctccagatgaacagcctgagagccgaggataccgccgtgtactactgtgccaaggatggcggagagacactggtggatagcagaggccagggcacactggtcacagtgtcatctctcgagagcggcggaggcggatctttcgaagaagttcagctgcttgagtctggcggaggactggttcaacctggcggaagcctgagactgtcttgtgccgccagcggcttcatcttcagcagctacgccatgagctgggtccgacaggctcctggaaagggccaagaatgggtttccggcgttagcggcacaggcgtgaacacctactacgccgatagcgtgaagggcagattcaccatcagccgggacaacagcaagaacaccctgtacctccagatgaacagcctgagagccgaggacaccgccgtgtactattgtgcctctggcaaaggctgggacagcggctcttggtacgaggactatagaggccagggcaccctggtcacagtttcttcactcgaggacctgaagaacgtgttcccacctgaggtggccgtgttcgagcctagcgaggccgagatcagccacacccagaaagccaccctcgtgtgcctggctaccggcttctaccccgaccatgtggaactgtcttggtgggtcaacggcaaagaggtgcacagcggcgtgtctaccgacccccagccactgaaagaacagcccgccctgaacgacagccggtactgcctgagcagcagactgagagtgtccgccaccttctggcagaacccccggaaccacttcagatgccaggtgcagttctacggcctgagcgagaacgacgagtggacccaggacagagccaagcccgtgacccagatcgtgtctgccgaagcctggggcagagccgattgcggctttaccagcgagagctaccagcagggcgtgctgagcgccaccatcctgtacgagatcctgctgggcaaggccaccctgtacgccgtgctggtgtctgccctggtgctgatggctatggtcaagcggaaggacagccggggaagggccaagcgatctggatctggagcaacaaacttctcactactcaaacaagcaggtgacgtggaggagaatcccgggcctactagaggccatatgaccgagtacaagcccacggtgcgcctcgccacccgcgacgacgtccccagggccgtacgcaccctcgccgccgcgttcgccgactaccccgccacgcgccacaccgtcgatccggaccgccacatcgagcgggtcaccgagctgcaagaactcttcctcacgcgcgtcgggctcgacatcggcaaggtgtgggtcgcggacgacggcgccgcggtggcggtctggaccacgccggagagcgtcgaagcgggggcggtgttcgccgagatcggcccgcgcatggccgagttgagcggttcccggctggccgcgcagcaacagatggaaggcctcctggcgccgcaccggcccaaggagcccgcgtggttcctggccaccgtcggcgtctcgcccgaccaccagggcaagggtctgggcagcgccgtcgtgctccccggagtggaggcggccgagcgcgccggggtgcccgccttcctggagacctccgcgccccgcaacctccccttctacgagcggctcggcttcaccgtcaccgccgacgtcgaggtgcccgaaggaccgcgcacctggtgcatgacccgcaagcccggtgcctga

SEQ ID NO: 7089 - DNA, 2196 bp, Artificial Sequence
  Synthetic Polynucloetide
atggccttaccagtgaccgccttgctcctgccgctggccttgctgctccacgccgccaggccgcaggtgcagctggttgaatctggcggaggactggttcagcctggcggatctctgagactgtcttgtgccgccagcggcttcaccttcaccaatcacgccatgagctgggtccgacaggcccctggaaaaggactggaactggtgtctagcatcagcggcaacggcagaaccacctactacgccgatagcgtgaagggcagattcaccatcagccgggacatcagcaagaacaccctggacctccagatgaacagcctgagagccgaggataccgccgtgtactactgtgccaaggatggcggagagacactggtggatagcagaggccagggcacactggtcacagtgtcatctctcgagagcggcggaggcggatctttcgaagaagttcagctgcttgagtctggcggaggactggttcaacctggcggaagcctgagactgtcttgtgccgccagcggcttcatcttcagcagctacgccatgagctgggtccgacaggctcctggaaagggccaagaatgggtttccggcgttagcggcacaggcgtgaacacctactacgccgatagcgtgaagggcagattcaccatcagccgggacaacagcaagaacaccctgtacctccagatgaacagcctgagagccgaggacaccgccgtgtactattgtgcctctggcaaaggctgggacagcggctcttggtacgaggactatagaggccagggcaccctggtcacagtttcttcaacgcgtgagcagaaactgatctcggaagaggatctggggagcggcaccccattcccttctctggcccctcccatcatgctgctggtggacggcaagcagcagatggtggtcgtgtgcctggtgctggatgtggccccacctggactggacagccccatctggtttagcgccggcaatggctctgccctggacgcctttacctacggcccaagccctgccaccgatggcacctggacaaatctggcccacctgagcctgcccagcgaggaactggcttcttgggagcctctcgtgtgccacacaggacctggcgctgagggacacagcagatccacccagcctatgcacctgtctggcgaggccagcaccgccagaacctgtcctcaggaacctctgagaggcacccctggcggagcactgtggctgggagtgctgagactgctgctgttcaagctgctgctgtttgacctgctgctgacctgctcctgtctgtgcgatcctgccggccctctgccttctcctgccaccaccacaagactgagagccctgggcagccacagactgcaccctgccacagagacaggcggcagagaggccacaagcagccctagaccccagcccagagacagaagatggggcgataccccccctggcagaaagcctggatctccagtccgcgccaagagaagcggatctggcgtgaagcagaccctgaatttcgacctgctgaagctggctggcgacgtggaatccaacccaggcccttctagatctagaggccatatgaccgagtacaagcccacggtgcgcctcgccacccgcgacgacgtccccagggccgtacgcaccctcgccgccgcgttcgccgactaccccgccacgcgccacaccgtcgatccggaccgccacatcgagcgggtcaccgagctgcaagaactcttcctcacgcgcgtcgggctcgacatcggcaaggtgtgggtcgcggacgacggcgccgcggtggcggtctggaccacgccggagagcgtcgaagcgggggcggtgttcgccgagatcggcccgcgcatggccgagttgagcggttcccggctggccgcgcagcaacagatggaaggcctcctggcgccgcaccggcccaaggagcccgcgtggttcctggccaccgtcggcgtctcgcccgaccaccagggcaagggtctgggcagcgccgtcgtgctccccggagtggaggcggccgagcgcgccggggtgcccgccttcctggagacctccgcgccccgcaacctccccttctacgagcggctcggcttcaccgtcaccgccgacgtcgaggtgcccgaaggaccgcgcacctggtgcatgacccgcaagcccggtgcctga

SEQ ID NO: 7090 - DNA, 1650 bp, Artificial Sequence
  Synthetic Polynucloetide
atggccttaccagtgaccgccttgctcctgccgctggccttgctgctccacgccgccaggccgcaggtgcagctggttgaatctggcggaggactggttcagcctggcggatctctgagactgtcttgtgccgccagcggcttcaccttcaccaatcacgccatgagctgggtccgacaggcccctggaaaaggactggaactggtgtctagcatcagcggcaacggcagaaccacctactacgccgatagcgtgaagggcagattcaccatcagccgggacatcagcaagaacaccctggacctccagatgaacagcctgagagccgaggataccgccgtgtactactgtgccaaggatggcggagagacactggtggatagcagaggccagggcacactggtcacagtgtcatctctcgaggacctgaagaacgtgttcccacctgaggtggccgtgttcgagcctagcgaggccgagatcagccacacccagaaagccaccctcgtgtgcctggctaccggcttctaccccgaccatgtggaactgtcttggtgggtcaacggcaaagaggtgcacagcggcgtgtctaccgacccccagccactgaaagaacagcccgccctgaacgacagccggtactgcctgagcagcagactgagagtgtccgccaccttctggcagaacccccggaaccacttcagatgccaggtgcagttctacggcctgagcgagaacgacgagtggacccaggacagagccaagcccgtgacccagatcgtgtctgccgaagcctggggcagagccgattgcggctttaccagcgagagctaccagcagggcgtgctgagcgccaccatcctgtacgagatcctgctgggcaaggccaccctgtacgccgtgctggtgtctgccctggtgctgatggctatggtcaagcggaaggacagccggggaagggccaagcgatctggatctggagcaacaaacttctcactactcaaacaagcaggtgacgtggaggagaatcccgggcctactagaggccatatgaccgagtacaagcccacggtgcgcctcgccacccgcgacgacgtccccagggccgtacgcaccctcgccgccgcgttcgccgactaccccgccacgcgccacaccgtcgatccggaccgccacatcgagcgggtcaccgagctgcaagaactcttcctcacgcgcgtcgggctcgacatcggcaaggtgtgggtcgcggacgacggcgccgcggtggcggtctggaccacgccggagagcgtcgaagcgggggcggtgttcgccgagatcggcccgcgcatggccgagttgagcggttcccggctggccgcgcagcaacagatggaaggcctcctggcgccgcaccggcccaaggagcccgcgtggttcctggccaccgtcggcgtctcgcccgaccaccagggcaagggtctgggcagcgccgtcgtgctccccggagtggaggcggccgagcgcgccggggtgcccgccttcctggagacctccgcgccccgcaacctccccttctacgagcggctcggcttcaccgtcaccgccgacgtcgaggtgcccgaaggaccgcgcacctggtgcatgacccgcaagcccggtgcctga

SEQ ID NO: 7091 - DNA, 957 bp, Artificial Sequence
  Synthetic Polynucloetide
atggccttaccagtgaccgccttgctcctgccgctggccttgctgctccacgccgccaggccgcaggtgcagctggttgaatctggcggaggactggttcagcctggcggatctctgagactgtcttgtgccgccagcggcttcaccttcaccaatcacgccatgagctgggtccgacaggcccctggaaaaggactggaactggtgtctagcatcagcggcaacggcagaaccacctactacgccgatagcgtgaagggcagattcaccatcagccgggacatcagcaagaacaccctggacctccagatgaacagcctgagagccgaggataccgccgtgtactactgtgccaaggatggcggagagacactggtggatagcagaggccagggcacactggtcacagtgtcatctctcgaggacctgaagaacgtgttcccacctgaggtggccgtgttcgagcctagcgaggccgagatcagccacacccagaaagccaccctcgtgtgcctggctaccggcttctaccccgaccatgtggaactgtcttggtgggtcaacggcaaagaggtgcacagcggcgtgtctaccgacccccagccactgaaagaacagcccgccctgaacgacagccggtactgcctgagcagcagactgagagtgtccgccaccttctggcagaacccccggaaccacttcagatgccaggtgcagttctacggcctgagcgagaacgacgagtggacccaggacagagccaagcccgtgacccagatcgtgtctgccgaagcctggggcagagccgattgcggctttaccagcgagagctaccagcagggcgtgctgagcgccaccatcctgtacgagatcctgctgggcaaggccaccctgtacgccgtgctggtgtctgccctggtgctgatggctatggtcaagcggaaggacagccgggga

SEQ ID NO: 7092 - DNA, 1356 bp, Artificial Sequence
  Synthetic Polynucloetide
atggactggatttggcgcatccttttccttgtcggcgctgctaccggcgcgcattccttcgaagaagttcagctgcttgagtctggcggaggactggttcaacctggcggaagcctgagactgtcttgtgccgccagcggcttcatcttcagcagctacgccatgagctgggtccgacaggctcctggaaagggccaagaatgggtttccggcgttagcggcacaggcgtgaacacctactacgccgatagcgtgaagggcagattcaccatcagccgggacaacagcaagaacaccctgtacctccagatgaacagcctgagagccgaggacaccgccgtgtactattgtgcctctggcaaaggctgggacagcggctcttggtacgaggactatagaggccagggcaccctggtcacagtttcttcaacgcgtatccagaaccctgatcctgccgtgtaccagctgcgggatagcaagagcagcgacaagagcgtgtgtctgttcaccgacttcgacagccagaccaacgtgtcccagagcaaggactccgacgtgtacatcaccgataagaccgtgctggacatgcggagcatggacttcaagagcaactccgccgtggcctggtccaacaagtccgatttcgcctgcgccaacgccttcaacaacagcattatccccgaggacacattcttcccaagccccgagagcagctgcgacgtgaagctggtggaaaagagcttcgagacagacaccaacctgaacttccagaacctgagcgtgatcggcttcagaatcctgctgctgaaagtggccggctttaacctgctgatgaccctgcggctgtggtccagccgcgccaagagaagcggatctggcgtgaagcagaccctgaatttcgacctgctgaagctggctggcgacgtggaatccaacccaggcccttctagaggccatatggccaagcctttgtctcaagaagaatccaccctcattgaaagagcaacggctacaatcaacagcatccccatctctgaagactacagcgtcgccagcgcagctctctctagcgacggccgcatcttcactggtgtcaatgtatatcattttactgggggaccttgtgcagaactcgtggtgctgggcactgctgctgctgcggcagctggcaacctgacttgtatcgtcgcgatcggaaatgagaacaggggcatcttgagcccctgcggacggtgccgacaggtgcttctcgatctgcatcctgggatcaaagccatagtgaaggacagtgatggacagccgacggcagttgggattcgtgaattgctgccctctggttatgtgtgggagggctga

SEQ ID NO: 7093 - DNA, 855 bp, Artificial Sequence
  Synthetic Polynucloetide
atggactggatttggcgcatccttttccttgtcggcgctgctaccggcgcgcattccttcgaagaagttcagctgcttgagtctggcggaggactggttcaacctggcggaagcctgagactgtcttgtgccgccagcggcttcatcttcagcagctacgccatgagctgggtccgacaggctcctggaaagggccaagaatgggtttccggcgttagcggcacaggcgtgaacacctactacgccgatagcgtgaagggcagattcaccatcagccgggacaacagcaagaacaccctgtacctccagatgaacagcctgagagccgaggacaccgccgtgtactattgtgcctctggcaaaggctgggacagcggctcttggtacgaggactatagaggccagggcaccctggtcacagtttcttcaacgcgtatccagaaccctgatcctgccgtgtaccagctgcgggatagcaagagcagcgacaagagcgtgtgtctgttcaccgacttcgacagccagaccaacgtgtcccagagcaaggactccgacgtgtacatcaccgataagaccgtgctggacatgcggagcatggacttcaagagcaactccgccgtggcctggtccaacaagtccgatttcgcctgcgccaacgccttcaacaacagcattatccccgaggacacattcttcccaagccccgagagcagctgcgacgtgaagctggtggaaaagagcttcgagacagacaccaacctgaacttccagaacctgagcgtgatcggcttcagaatcctgctgctgaaagtggccggctttaacctgctgatgaccctgcggctgtggtccagc

SEQ ID NO: 7094 - DNA, 1704 bp, Artificial Sequence
  Synthetic Polynucloetide
atggccttaccagtgaccgccttgctcctgccgctggccttgctgctccacgccgccaggccgcaggtgcagctggttgaatctggcggaggactggttcagcctggcggatctctgagactgtcttgtgccgccagcggcttcaccttcaccaatcacgccatgagctgggtccgacaggcccctggaaaaggactggaactggtgtctagcatcagcggcaacggcagaaccacctactacgccgatagcgtgaagggcagattcaccatcagccgggacatcagcaagaacaccctggacctccagatgaacagcctgagagccgaggataccgccgtgtactactgtgccaaggatggcggagagacactggtggatagcagaggccagggcacactggtcacagtgtcatctctcgaggggaaaccaattcccaaccctcttctgggactggattcaaccggcagcggcgaggacctgaagaacgtgttcccacctgaggtggccgtgttcgagcctagcgaggccgagatcagccacacccagaaagccaccctcgtgtgcctggctaccggcttctaccccgaccatgtggaactgtcttggtgggtcaacggcaaagaggtgcacagcggcgtgtgtaccgacccccagccactgaaagaacagcccgccctgaacgacagccggtactgcctgagcagcagactgagagtgtccgccaccttctggcagaacccccggaaccacttcagatgccaggtgcagttctacggcctgagcgagaacgacgagtggacccaggacagagccaagcccgtgacccagatcgtgtctgccgaagcctggggcagagccgattgcggctttaccagcgagagctaccagcagggcgtgctgagcgccaccatcctgtacgagatcctgctgggcaaggccaccctgtacgccgtgctggtgtctgccctggtgctgatggctatggtcaagcggaaggacagccggggaagggccaagcgatctggatctggagcaacaaacttctcactactcaaacaagcaggtgacgtggaggagaatcccgggcctactagaggccatatgaccgagtacaagcccacggtgcgcctcgccacccgcgacgacgtccccagggccgtacgcaccctcgccgccgcgttcgccgactaccccgccacgcgccacaccgtcgatccggaccgccacatcgagcgggtcaccgagctgcaagaactcttcctcacgcgcgtcgggctcgacatcggcaaggtgtgggtcgcggacgacggcgccgcggtggcggtctggaccacgccggagagcgtcgaagcgggggcggtgttcgccgagatcggcccgcgcatggccgagttgagcggttcccggctggccgcgcagcaacagatggaaggcctcctggcgccgcaccggcccaaggagcccgcgtggttcctggccaccgtcggcgtctcgcccgaccaccagggcaagggtctgggcagcgccgtcgtgctccccggagtggaggcggccgagcgcgccggggtgcccgccttcctggagacctccgcgccccgcaacctccccttctacgagcggctcggcttcaccgtcaccgccgacgtcgaggtgcccgaaggaccgcgcacctggtgcatgacccgcaagcccggtgcctga

SEQ ID NO: 7095 - DNA, 1014 bp, Artificial Sequence
  Synthetic Polynucloetide
atggccttaccagtgaccgccttgctcctgccgctggccttgctgctccacgccgccaggccgcaggtgcagctggttgaatctggcggaggactggttcagcctggcggatctctgagactgtcttgtgccgccagcggcttcaccttcaccaatcacgccatgagctgggtccgacaggcccctggaaaaggactggaactggtgtctagcatcagcggcaacggcagaaccacctactacgccgatagcgtgaagggcagattcaccatcagccgggacatcagcaagaacaccctggacctccagatgaacagcctgagagccgaggataccgccgtgtactactgtgccaaggatggcggagagacactggtggatagcagaggccagggcacactggtcacagtgtcatctctcgaggggaaaccaattcccaaccctcttctgggactggattcaaccggcagcggcgaggacctgaagaacgtgttcccacctgaggtggccgtgttcgagcctagcgaggccgagatcagccacacccagaaagccaccctcgtgtgcctggctaccggcttctaccccgaccatgtggaactgtcttggtgggtcaacggcaaagaggtgcacagcggcgtgtgtaccgacccccagccactgaaagaacagcccgccctgaacgacagccggtactgcctgagcagcagactgagagtgtccgccaccttctggcagaacccccggaaccacttcagatgccaggtgcagttctacggcctgagcgagaacgacgagtggacccaggacagagccaagcccgtgacccagatcgtgtctgccgaagcctggggcagagccgattgcggctttaccagcgagagctaccagcagggcgtgctgagcgccaccatcctgtacgagatcctgctgggcaaggccaccctgtacgccgtgctggtgtctgccctggtgctgatggctatggtcaagcggaaggacagccggggatga

SEQ ID NO: 7096 - DNA, 1392 bp, Artificial Sequence
  Synthetic Polynucloetide
atggactggatttggcgcatccttttccttgtcggcgctgctaccggcgcgcattccttcgaagaagttcagctgcttgagtctggcggaggactggttcaacctggcggaagcctgagactgtcttgtgccgccagcggcttcatcttcagcagctacgccatgagctgggtccgacaggctcctggaaagggccaagaatgggtttccggcgttagcggcacaggcgtgaacacctactacgccgatagcgtgaagggcagattcaccatcagccgggacaacagcaagaacaccctgtacctccagatgaacagcctgagagccgaggacaccgccgtgtactattgtgcctctggcaaaggctgggacagcggctcttggtacgaggactatagaggccagggcaccctggtcacagtttcttcaacgcgtgagcagaaactgatctcggaagaggatgggagcggcatccagaaccctgatcctgccgtgtaccagctgcgggatagcaagagcagcgacaagagcgtgtgtctgttcaccgacttcgacagccagaccaacgtgtcccagagcaaggactccgacgtgtacatcaccgataagtgcgtgctggacatgcggagcatggacttcaagagcaactccgccgtggcctggtccaacaagtccgatttcgcctgcgccaacgccttcaacaacagcattatccccgaggacacattcttcccaagccccgagagcagctgcgacgtgaagctggtggaaaagagcttcgagacagacaccaacctgaacttccagaacctgagcgtgatcggcttcagaatcctgctgctgaaagtggccggctttaacctgctgatgaccctgcggctgtggtccagccgcgccaagagaagcggatctggcgtgaagcagaccctgaatttcgacctgctgaagctggctggcgacgtggaatccaacccaggcccttctagaggccatatggccaagcctttgtctcaagaagaatccaccctcattgaaagagcaacggctacaatcaacagcatccccatctctgaagactacagcgtcgccagcgcagctctctctagcgacggccgcatcttcactggtgtcaatgtatatcattttactgggggaccttgtgcagaactcgtggtgctgggcactgctgctgctgcggcagctggcaacctgacttgtatcgtcgcgatcggaaatgagaacaggggcatcttgagcccctgcggacggtgccgacaggtgcttctcgatctgcatcctgggatcaaagccatagtgaaggacagtgatggacagccgacggcagttgggattcgtgaattgctgccctctggttatgtgtgggagggctga

SEQ ID NO: 7097 - DNA, 894 bp, Artificial Sequence
  Synthetic Polynucloetide
atggactggatttggcgcatccttttccttgtcggcgctgctaccggcgcgcattccttcgaagaagttcagctgcttgagtctggcggaggactggttcaacctggcggaagcctgagactgtcttgtgccgccagcggcttcatcttcagcagctacgccatgagctgggtccgacaggctcctggaaagggccaagaatgggtttccggcgttagcggcacaggcgtgaacacctactacgccgatagcgtgaagggcagattcaccatcagccgggacaacagcaagaacaccctgtacctccagatgaacagcctgagagccgaggacaccgccgtgtactattgtgcctctggcaaaggctgggacagcggctcttggtacgaggactatagaggccagggcaccctggtcacagtttcttcaacgcgtgagcagaaactgatctcggaagaggatgggagcggcatccagaaccctgatcctgccgtgtaccagctgcgggatagcaagagcagcgacaagagcgtgtgtctgttcaccgacttcgacagccagaccaacgtgtcccagagcaaggactccgacgtgtacatcaccgataagtgcgtgctggacatgcggagcatggacttcaagagcaactccgccgtggcctggtccaacaagtccgatttcgcctgcgccaacgccttcaacaacagcattatccccgaggacacattcttcccaagccccgagagcagctgcgacgtgaagctggtggaaaagagcttcgagacagacaccaacctgaacttccagaacctgagcgtgatcggcttcagaatcctgctgctgaaagtggccggctttaacctgctgatgaccctgcggctgtggtccagctga

SEQ ID NO: 7098 - DNA, 1950 bp, Artificial Sequence
  Synthetic Polynucloetide
atggccttaccagtgaccgccttgctcctgccgctggccttgctgctccacgccgccaggccgcaggtgcagctggttgaatctggcggaggactggttcagcctggcggatctctgagactgtcttgtgccgccagcggcttcaccttcaccaatcacgccatgagctgggtccgacaggcccctggaaaaggactggaactggtgtctagcatcagcggcaacggcagaaccacctactacgccgatagcgtgaagggcagattcaccatcagccgggacatcagcaagaacaccctggacctccagatgaacagcctgagagccgaggataccgccgtgtactactgtgccaaggatggcggagagacactggtggatagcagaggccagggcacactggtcacagtgtcatctctcgagagcggcggaggcggatctttcgaagaagttcagctgcttgagtctggcggaggactggttcaacctggcggaagcctgagactgtcttgtgccgccagcggcttcatcttcagcagctacgccatgagctgggtccgacaggctcctggaaagggccaagaatgggtttccggcgttagcggcacaggcgtgaacacctactacgccgatagcgtgaagggcagattcaccatcagccgggacaacagcaagaacaccctgtacctccagatgaacagcctgagagccgaggacaccgccgtgtactattgtgcctctggcaaaggctgggacagcggctcttggtacgaggactatagaggccagggcaccctggtcacagtttcttcaacgcgtgggagcggcatccagaaccctgatcctgccgtgtaccagctgcgggatagcaagagcagcgacaagagcgtgtgtctgttcaccgacttcgacagccagaccaacgtgtcccagagcaaggactccgacgtgtacatcaccgataagaccgtgctggacatgcggagcatggacttcaagagcaactccgccgtggcctggtccaacaagtccgatttcgcctgcgccaacgccttcaacaacagcattatccccgaggacacattcttcccaagcagcgacgtgccctgcgacgtgaagctggtggaaaagagcttcgagacagacaccaacctgaacttccagaacctgagcgtgatcggcttcagaatcctgctgctgaaagtggccggctttaacctgctgatgaccctgcggctgtggtccagccgcgccaagagaagcggatctggcgtgaagcagaccctgaatttcgacctgctgaagctggctggcgacgtggaatccaacccaggcccttctagaggccatatgaccgagtacaagcccacggtgcgcctcgccacccgcgacgacgtccccagggccgtacgcaccctcgccgccgcgttcgccgactaccccgccacgcgccacaccgtcgatccggaccgccacatcgagcgggtcaccgagctgcaagaactcttcctcacgcgcgtcgggctcgacatcggcaaggtgtgggtcgcggacgacggcgccgcggtggcggtctggaccacgccggagagcgtcgaagcgggggcggtgttcgccgagatcggcccgcgcatggccgagttgagcggttcccggctggccgcgcagcaacagatggaaggcctcctggcgccgcaccggcccaaggagcccgcgtggttcctggccaccgtcggcgtctcgcccgaccaccagggcaagggtctgggcagcgccgtcgtgctccccggagtggaggcggccgagcgcgccggggtgcccgccttcctggagacctccgcgccccgcaacctccccttctacgagcggctcggcttcaccgtcaccgccgacgtcgaggtgcccgaaggaccgcgcacctggtgcatgacccgcaagcccggtgcctga

SEQ ID NO: 7099 - DNA, 2046 bp, Artificial Sequence
  Synthetic Polynucloetide
atggccttaccagtgaccgccttgctcctgccgctggccttgctgctccacgccgccaggccgcaggtgcagctggttgaatctggcggaggactggttcagcctggcggatctctgagactgtcttgtgccgccagcggcttcaccttcaccaatcacgccatgagctgggtccgacaggcccctggaaaaggactggaactggtgtctagcatcagcggcaacggcagaaccacctactacgccgatagcgtgaagggcagattcaccatcagccgggacatcagcaagaacaccctggacctccagatgaacagcctgagagccgaggataccgccgtgtactactgtgccaaggatggcggagagacactggtggatagcagaggccagggcacactggtcacagtgtcatctctcgagagcggcggaggcggatctttcgaagaagttcagctgcttgagtctggcggaggactggttcaacctggcggaagcctgagactgtcttgtgccgccagcggcttcatcttcagcagctacgccatgagctgggtccgacaggctcctggaaagggccaagaatgggtttccggcgttagcggcacaggcgtgaacacctactacgccgatagcgtgaagggcagattcaccatcagccgggacaacagcaagaacaccctgtacctccagatgaacagcctgagagccgaggacaccgccgtgtactattgtgcctctggcaaaggctgggacagcggctcttggtacgaggactatagaggccagggcaccctggtcacagtttcttcactcgaggacctgaagaacgtgttcccacctgaggtggccgtgttcgagcctagcaaggccgagatcgcccacacccagaaagccaccctcgtgtgcctggctaccggcttctaccccgaccatgtggaactgtcttggtgggtcaacggcaaagaggtgcacagcggcgtgtctaccgacccccagccactgaaagaacagcccgccctgaacgacagccggtactgcctgagcagcagactgagagtgtccgccaccttctggcagaacccccggaaccacttcagatgccaggtgcagttctacggcctgagcgagaacgacgagtggacccaggacagagccaagcccgtgacccagatcgtgtctgccgaagcctggggcagagccgattgcggcatcaccagcgccagctaccaccagggcgtgctgagcgccaccatcctgtacgagatcctgctgggcaaggccaccctgtacgccgtgctggtgtctgccctggtgctgatggctatggtcaagcggaaggacagccggggaagggccaagcgatctggatctggagcaacaaacttctcactactcaaacaagcaggtgacgtggaggagaatcccgggcctactagaggccatatgaccgagtacaagcccacggtgcgcctcgccacccgcgacgacgtccccagggccgtacgcaccctcgccgccgcgttcgccgactaccccgccacgcgccacaccgtcgatccggaccgccacatcgagcgggtcaccgagctgcaagaactcttcctcacgcgcgtcgggctcgacatcggcaaggtgtgggtcgcggacgacggcgccgcggtggcggtctggaccacgccggagagcgtcgaagcgggggcggtgttcgccgagatcggcccgcgcatggccgagttgagcggttcccggctggccgcgcagcaacagatggaaggcctcctggcgccgcaccggcccaaggagcccgcgtggttcctggccaccgtcggcgtctcgcccgaccaccagggcaagggtctgggcagcgccgtcgtgctccccggagtggaggcggccgagcgcgccggggtgcccgccttcctggagacctccgcgccccgcaacctccccttctacgagcggctcggcttcaccgtcaccgccgacgtcgaggtgcccgaaggaccgcgcacctggtgcatgacccgcaagcccggtgcctga

SEQ ID NO: 7100 - DNA, 2115 bp, Artificial Sequence
  Synthetic Polynucloetide
atggccttaccagtgaccgccttgctcctgccgctggccttgctgctccacgccgccaggccgcaggtgcagctggttgaatctggcggaggactggttcagcctggcggatctctgagactgtcttgtgccgccagcggcttcaccttcaccaatcacgccatgagctgggtccgacaggcccctggaaaaggactggaactggtgtctagcatcagcggcaacggcagaaccacctactacgccgatagcgtgaagggcagattcaccatcagccgggacatcagcaagaacaccctggacctccagatgaacagcctgagagccgaggataccgccgtgtactactgtgccaaggatggcggagagacactggtggatagcagaggccagggcacactggtcacagtgtcatctctcgagagcggcggaggcggatctttcgaagaagttcagctgcttgagtctggcggaggactggttcaacctggcggaagcctgagactgtcttgtgccgccagcggcttcatcttcagcagctacgccatgagctgggtccgacaggctcctggaaagggccaagaatgggtttccggcgttagcggcacaggcgtgaacacctactacgccgatagcgtgaagggcagattcaccatcagccgggacaacagcaagaacaccctgtacctccagatgaacagcctgagagccgaggacaccgccgtgtactattgtgcctctggcaaaggctgggacagcggctcttggtacgaggactatagaggccagggcaccctggtcacagtttcttcaacgcgtgggtctggaggcggaggcagcggcggaggcgggagcggcgacggtaacgaggagatgggaggaatcactcaaaccccttacaaagtctcaatttcaggaacaactgttatccttacatgtccccagtatcctggcagcgagatcctttggcagcataacgacaagaatatagggggagatgaagacgataagaatatcggatctgacgaggatcacttgagcctgaaagagttctccgagcttgaacaaagcggatattatgtgtgctatccgcgcgggtcaaagccggaagacgctaacttttacctttatctccgagccagagtgtgcgaaaattgcatggaaatggacgttatgtccgttgctacaatagttatcgtagatatatgcatcacgggtggactgcttctgctggtttattattggtccaagaatagaaaggccaaagctaaacccgtgaccagaggcgctggcgcaggcggaaggcaaaggggacaaaacaaagaacggccaccaccagtgccaaatccagattatgagcctattcggaaaggacagagggacctgtactctggcctgaatcagagaagaatccgcgccaagagaagcggatctggcgtgaagcagaccctgaatttcgacctgctgaagctggctggcgacgtggaatccaacccaggcccttctagaggccatatgaccgagtacaagcccacggtgcgcctcgccacccgcgacgacgtccccagggccgtacgcaccctcgccgccgcgttcgccgactaccccgccacgcgccacaccgtcgatccggaccgccacatcgagcgggtcaccgagctgcaagaactcttcctcacgcgcgtcgggctcgacatcggcaaggtgtgggtcgcggacgacggcgccgcggtggcggtctggaccacgccggagagcgtcgaagcgggggcggtgttcgccgagatcggcccgcgcatggccgagttgagcggttcccggctggccgcgcagcaacagatggaaggcctcctggcgccgcaccggcccaaggagcccgcgtggttcctggccaccgtcggcgtctcgcccgaccaccagggcaagggtctgggcagcgccgtcgtgctccccggagtggaggcggccgagcgcgccggggtgcccgccttcctggagacctccgcgccccgcaacctccccttctacgagcggctcggcttcaccgtcaccgccgacgtcgaggtgcccgaaggaccgcgcacctggtgcatgacccgcaagcccggtgcctga

SEQ ID NO: 7101 - DNA, 2010 bp, Artificial Sequence
  Synthetic Polynucloetide
atggccttaccagtgaccgccttgctcctgccgctggccttgctgctccacgccgccaggccgcaggtgcagctggttgaatctggcggaggactggttcagcctggcggatctctgagactgtcttgtgccgccagcggcttcaccttcaccaatcacgccatgagctgggtccgacaggcccctggaaaaggactggaactggtgtctagcatcagcggcaacggcagaaccacctactacgccgatagcgtgaagggcagattcaccatcagccgggacatcagcaagaacaccctggacctccagatgaacagcctgagagccgaggataccgccgtgtactactgtgccaaggatggcggagagacactggtggatagcagaggccagggcacactggtcacagtgtcatctctcgagagcggcggaggcggatctttcgaagaagttcagctgcttgagtctggcggaggactggttcaacctggcggaagcctgagactgtcttgtgccgccagcggcttcatcttcagcagctacgccatgagctgggtccgacaggctcctggaaagggccaagaatgggtttccggcgttagcggcacaggcgtgaacacctactacgccgatagcgtgaagggcagattcaccatcagccgggacaacagcaagaacaccctgtacctccagatgaacagcctgagagccgaggacaccgccgtgtactattgtgcctctggcaaaggctgggacagcggctcttggtacgaggactatagaggccagggcaccctggtcacagtttcttcaacgcgtgggtctggaggcggaggcagcggcggaggcgggagcggcttcaagatccccatcgaggaactggaagatcgggtgttcgtgaactgcaacacctctatcacctgggtggaaggcaccgtgggaacactgctgagcgacatcaccagactggacctcggcaagcggattctggaccctcggggcatctacagatgcaacggcaccgacatctacaaggacaaagaaagcaccgtgcaggtccactacagaatgtgccagtcctgcgtggaactggaccctgctacagtggccggcatcatcgtgaccgatgtgatcgctactctgctgctggctctgggagtgttctgcttcgccggacacgaaacaggcagactgtctggcgctgccgatacacaggccctgctgagaaacgaccaagtgtatcagcccctgcgcgacagagatgatgcccagtattctcacctcggcggcaactgggctagaaacaagcgcgccaagagaagcggatctggcgtgaagcagaccctgaatttcgacctgctgaagctggctggcgacgtggaatccaacccaggcccttctagaggccatatgaccgagtacaagcccacggtgcgcctcgccacccgcgacgacgtccccagggccgtacgcaccctcgccgccgcgttcgccgactaccccgccacgcgccacaccgtcgatccggaccgccacatcgagcgggtcaccgagctgcaagaactcttcctcacgcgcgtcgggctcgacatcggcaaggtgtgggtcgcggacgacggcgccgcggtggcggtctggaccacgccggagagcgtcgaagcgggggcggtgttcgccgagatcggcccgcgcatggccgagttgagcggttcccggctggccgcgcagcaacagatggaaggcctcctggcgccgcaccggcccaaggagcccgcgtggttcctggccaccgtcggcgtctcgcccgaccaccagggcaagggtctgggcagcgccgtcgtgctccccggagtggaggcggccgagcgcgccggggtgcccgccttcctggagacctccgcgccccgcaacctccccttctacgagcggctcggcttcaccgtcaccgccgacgtcgaggtgcccgaaggaccgcgcacctggtgcatgacccgcaagcccggtgcctga

SEQ ID NO: 7102 - DNA, 2040 bp, Artificial Sequence
  Synthetic Polynucloetide
atggccttaccagtgaccgccttgctcctgccgctggccttgctgctccacgccgccaggccgcaggtgcagctggttgaatctggcggaggactggttcagcctggcggatctctgagactgtcttgtgccgccagcggcttcaccttcaccaatcacgccatgagctgggtccgacaggcccctggaaaaggactggaactggtgtctagcatcagcggcaacggcagaaccacctactacgccgatagcgtgaagggcagattcaccatcagccgggacatcagcaagaacaccctggacctccagatgaacagcctgagagccgaggataccgccgtgtactactgtgccaaggatggcggagagacactggtggatagcagaggccagggcacactggtcacagtgtcatctctcgagagcggcggaggcggatctttcgaagaagttcagctgcttgagtctggcggaggactggttcaacctggcggaagcctgagactgtcttgtgccgccagcggcttcatcttcagcagctacgccatgagctgggtccgacaggctcctggaaagggccaagaatgggtttccggcgttagcggcacaggcgtgaacacctactacgccgatagcgtgaagggcagattcaccatcagccgggacaacagcaagaacaccctgtacctccagatgaacagcctgagagccgaggacaccgccgtgtactattgtgcctctggcaaaggctgggacagcggctcttggtacgaggactatagaggccagggcaccctggtcacagtttcttcaacgcgtgggtctggaggcggaggcagcggcggaggcgggagcggccagagcatcaagggcaaccacctggtcaaggtgtacgactaccaagaggacggcagcgtgctgctgacatgtgatgccgaggccaagaacatcacctggtttaaggacggcaagatgatcggcttcctgaccgaggacaagaagaagtggaacctgggcagcaacgctaaggaccccagaggcatgtatcagtgcaagggcagccagaacaagagcaagcccctccaggtgtactaccggatgtgccagaactgcatcgagctgaacgccgctaccatcagcggctttctgttcgccgagatcgtgtccatcttcgtgctggccgtgggcgtgtactttatcgctggacaggatggcgtgcggcagagcagagcttccgataagcaaaccctgctgcctaacgaccagctgtaccagcctctgaaggacagagaggacgaccagtacagccacctccagggcaatcagctgagaagaaaccgcgccaagagaagcggatctggcgtgaagcagaccctgaatttcgacctgctgaagctggctggcgacgtggaatccaacccaggcccttctagaggccatatgaccgagtacaagcccacggtgcgcctcgccacccgcgacgacgtccccagggccgtacgcaccctcgccgccgcgttcgccgactaccccgccacgcgccacaccgtcgatccggaccgccacatcgagcgggtcaccgagctgcaagaactcttcctcacgcgcgtcgggctcgacatcggcaaggtgtgggtcgcggacgacggcgccgcggtggcggtctggaccacgccggagagcgtcgaagcgggggcggtgttcgccgagatcggcccgcgcatggccgagttgagcggttcccggctggccgcgcagcaacagatggaaggcctcctggcgccgcaccggcccaaggagcccgcgtggttcctggccaccgtcggcgtctcgcccgaccaccagggcaagggtctgggcagcgccgtcgtgctccccggagtggaggcggccgagcgcgccggggtgcccgccttcctggagacctccgcgccccgcaacctccccttctacgagcggctcggcttcaccgtcaccgccgacgtcgaggtgcccgaaggaccgcgcacctggtgcatgacccgcaagcccggtgcctga

SEQ ID NO: 7103 - DNA, 1989 bp, Artificial Sequence
  Synthetic Polynucloetide
atggccttaccagtgaccgccttgctcctgccgctggccttgctgctccacgccgccaggccgcaggtgcagctggttgaatctggcggaggactggttcagcctggcggatctctgagactgtcttgtgccgccagcggcttcaccttcaccaatcacgccatgagctgggtccgacaggcccctggaaaaggactggaactggtgtctagcatcagcggcaacggcagaaccacctactacgccgatagcgtgaagggcagattcaccatcagccgggacatcagcaagaacaccctggacctccagatgaacagcctgagagccgaggataccgccgtgtactactgtgccaaggatggcggagagacactggtggatagcagaggccagggcacactggtcacagtgtcatctctcgagagcggcggaggcggatctttcgaagaagttcagctgcttgagtctggcggaggactggttcaacctggcggaagcctgagactgtcttgtgccgccagcggcttcatcttcagcagctacgccatgagctgggtccgacaggctcctggaaagggccaagaatgggtttccggcgttagcggcacaggcgtgaacacctactacgccgatagcgtgaagggcagattcaccatcagccgggacaacagcaagaacaccctgtacctccagatgaacagcctgagagccgaggacaccgccgtgtactattgtgcctctggcaaaggctgggacagcggctcttggtacgaggactatagaggccagggcaccctggtcacagtttcttcaacgcgtgggtctggaggcggaggcagcggcggaggcgggagcggccagagttttgggttgttggaccctaaattgtgctatctgttggacggaatcctgttcatttacggagtgatcctgaccgcattgttcctgcgggttaagttttccagatccgcagacgcacccgcttaccaacaagggcagaaccaactctacaatgaacttaatttggggcggagggaagagtacgacgttctggacaaaaggaggggacgagatcccgagatgggcggaaagcctcagcgaaggaagaatccgcaagaggggctttataacgaactccagaaagataaaatggcagaagcctatagtgagattgggatgaagggagaaaggaggaggggtaaaggtcacgatgggttgtaccaaggattgagcacagccactaaagatacctatgatgcgctccacatgcaggccctgccgccaagacgcgccaagagaagcggatctggcgtgaagcagaccctgaatttcgacctgctgaagctggctggcgacgtggaatccaacccaggcccttctagaggccatatgaccgagtacaagcccacggtgcgcctcgccacccgcgacgacgtccccagggccgtacgcaccctcgccgccgcgttcgccgactaccccgccacgcgccacaccgtcgatccggaccgccacatcgagcgggtcaccgagctgcaagaactcttcctcacgcgcgtcgggctcgacatcggcaaggtgtgggtcgcggacgacggcgccgcggtggcggtctggaccacgccggagagcgtcgaagcgggggcggtgttcgccgagatcggcccgcgcatggccgagttgagcggttcccggctggccgcgcagcaacagatggaaggcctcctggcgccgcaccggcccaaggagcccgcgtggttcctggccaccgtcggcgtctcgcccgaccaccagggcaagggtctgggcagcgccgtcgtgctccccggagtggaggcggccgagcgcgccggggtgcccgccttcctggagacctccgcgccccgcaacctccccttctacgagcggctcggcttcaccgtcaccgccgacgtcgaggtgcccgaaggaccgcgcacctggtgcatgacccgcaagcccggtgcctga

SEQ ID NO: 7104 - DNA, 2613 bp, Artificial Sequence
  Synthetic Polynucloetide
atggccttaccagtgaccgccttgctcctgccgctggccttgctgctccacgccgccaggccgcaggtgcagctggttgaatctggcggaggactggttcagcctggcggatctctgagactgtcttgtgccgccagcggcttcaccttcaccaatcacgccatgagctgggtccgacaggcccctggaaaaggactggaactggtgtctagcatcagcggcaacggcagaaccacctactacgccgatagcgtgaagggcagattcaccatcagccgggacatcagcaagaacaccctggacctccagatgaacagcctgagagccgaggataccgccgtgtactactgtgccaaggatggcggagagacactggtggatagcagaggccagggcacactggtcacagtgtcatctctcgagggacagcctaaggccaatcctaccgtgacactgttccctccaagcagcgaagaactccaggccaacaaggccacacttgtgtgcctgatctccgacttctaccctggggctgtgacagtggcttggaaggccgatggatctcctgtgaaagccggcgtggaaaccaccaagccatccaagcagagcaacaacaaatacgccgccagctcctacctgagcctgacacctgagcagtggaagtcccacagatcctacagctgccaagtgacccacgaaggcagcaccgtggaaaagacagtggcccctacagagtgcagcggcagagccgattgcggctttaccagcgagagctaccagcagggcgtgctgagcgccaccatcctgtacgagatcctgctgggcaaggccaccctgtacgccgtgctggtgtctgccctggtgctgatggctatggtcaagcggaaggacagccggggaagggccaagcgatctggatctggagcaacaaacttctcactactcaaacaagcaggtgacgtggaggagaatcccgggcctactagtatggactggatttggcgcatccttttccttgtcggcgctgctaccggcgcgcattccttcgaagaagttcagctgcttgagtctggcggaggactggttcaacctggcggaagcctgagactgtcttgtgccgccagcggcttcatcttcagcagctacgccatgagctgggtccgacaggctcctggaaagggccaagaatgggtttccggcgttagcggcacaggcgtgaacacctactacgccgatagcgtgaagggcagattcaccatcagccgggacaacagcaagaacaccctgtacctccagatgaacagcctgagagccgaggacaccgccgtgtactattgtgcctctggcaaaggctgggacagcggctcttggtacgaggactatagaggccagggcaccctggtcacagtttcttcaacgcgtgcctctacaaagggaccctccgtgtttcctctggctcccagcagcaagtctacaagcggaggaacagccgctctgggctgcctggtcaaggattactttcccgagcctgtgaccgtgtcctggaatagcggagcactgacaagcggcgtgcacacctttccagccgtgctgcaaagcagcggcctgtactctctgagcagcgtggtcacagtgcctagctctagcctgggcacccagacctacatctgcaatgtgaaccacaagcctagcaacaccaaggtggacaagagagtggaacccaagagctgtatccccgaggacacattcttcccaagccccgagagcagctgcgacgtgaagctggtggaaaagagcttcgagacagacaccaacctgaacttccagaacctgagcgtgatcggcttcagaatcctgctgctgaaagtggccggctttaacctgctgatgaccctgcggctgtggtccagccgcgccaagagaagcggatctggcgtgaagcagaccctgaatttcgacctgctgaagctggctggcgacgtggaatccaacccaggcccttctagaggccatatgaccgagtacaagcccacggtgcgcctcgccacccgcgacgacgtccccagggccgtacgcaccctcgccgccgcgttcgccgactaccccgccacgcgccacaccgtcgatccggaccgccacatcgagcgggtcaccgagctgcaagaactcttcctcacgcgcgtcgggctcgacatcggcaaggtgtgggtcgcggacgacggcgccgcggtggcggtctggaccacgccggagagcgtcgaagcgggggcggtgttcgccgagatcggcccgcgcatggccgagttgagcggttcccggctggccgcgcagcaacagatggaaggcctcctggcgccgcaccggcccaaggagcccgcgtggttcctggccaccgtcggcgtctcgcccgaccaccagggcaagggtctgggcagcgccgtcgtgctccccggagtggaggcggccgagcgcgccggggtgcccgccttcctggagacctccgcgccccgcaacctccccttctacgagcggctcggcttcaccgtcaccgccgacgtcgaggtgcccgaaggaccgcgcacctggtgcatgacccgcaagcccggtgcctga

SEQ ID NO: 7105 - DNA, 1911 bp, Artificial Sequence; identical to SEQ ID NO: 7078
  Synthetic Polynucloetide

SEQ ID NO: 7106 - DNA, 1998 bp, Artificial Sequence
  Synthetic Polynucloetide
atggccttaccagtgaccgccttgctcctgccgctggccttgctgctccacgccgccaggccgcaggtgcagctggttgaatctggcggaggactggttcagcctggcggatctctgagactgtcttgtgccgccagcggcttcaccttcaccaatcacgccatgagctgggtccgacaggcccctggaaaaggactggaactggtgtctagcatcagcggcaacggcagaaccacctactacgccgatagcgtgaagggcagattcaccatcagccgggacatcagcaagaacaccctggacctccagatgaacagcctgagagccgaggataccgccgtgtactactgtgccaaggatggcggagagacactggtggatagcagaggccagggcacactggtcacagtgtcatctctcgagggatctggcagagccgattgcggctttaccagcgagagctaccagcagggcgtgctgagcgccaccatcctgtacgagatcctgctgggcaaggccaccctgtacgccgtgctggtgtctgccctggtgctgatggctatggtcaagcggaaggacagccggggaagggccaagcgatctggatctggagcaacaaacttctcactactcaaacaagcaggtgacgtggaggagaatcccgggcctactagtatggactggatttggcgcatccttttccttgtcggcgctgctaccggcgcgcattccttcgaagaagttcagctgcttgagtctggcggaggactggttcaacctggcggaagcctgagactgtcttgtgccgccagcggcttcatcttcagcagctacgccatgagctgggtccgacaggctcctggaaagggccaagaatgggtttccggcgttagcggcacaggcgtgaacacctactacgccgatagcgtgaagggcagattcaccatcagccgggacaacagcaagaacaccctgtacctccagatgaacagcctgagagccgaggacaccgccgtgtactattgtgcctctggcaaaggctgggacagcggctcttggtacgaggactatagaggccagggcaccctggtcacagtttcttcaacgcgtggcagcatccccgaggacacattcttcccaagccccgagagcagctgcgacgtgaagctggtggaaaagagcttcgagacagacaccaacctgaacttccagaacctgagcgtgatcggcttcagaatcctgctgctgaaagtggccggctttaacctgctgatgaccctgcggctgtggtccagccgcgccaagagaagcggatctggcgtgaagcagaccctgaatttcgacctgctgaagctggctggcgacgtggaatccaacccaggcccttctagaggccatatgaccgagtacaagcccacggtgcgcctcgccacccgcgacgacgtccccagggccgtacgcaccctcgccgccgcgttcgccgactaccccgccacgcgccacaccgtcgatccggaccgccacatcgagcgggtcaccgagctgcaagaactcttcctcacgcgcgtcgggctcgacatcggcaaggtgtgggtcgcggacgacggcgccgcggtggcggtctggaccacgccggagagcgtcgaagcgggggcggtgttcgccgagatcggcccgcgcatggccgagttgagcggttcccggctggccgcgcagcaacagatggaaggcctcctggcgccgcaccggcccaaggagcccgcgtggttcctggccaccgtcggcgtctcgcccgaccaccagggcaagggtctgggcagcgccgtcgtgctccccggagtggaggcggccgagcgcgccggggtgcccgccttcctggagacctccgcgccccgcaacctccccttctacgagcggctcggcttcaccgtcaccgccgacgtcgaggtgcccgaaggaccgcgcacctggtgcatgacccgcaagcccggtgcctga

SEQ ID NO: 7107 - DNA, 1296 bp, Artificial Sequence
  Synthetic Polynucloetide
atggccttaccagtgaccgccttgctcctgccgctggccttgctgctccacgccgccaggccgcaggtgcagctggttgaatctggcggaggactggttcagcctggcggatctctgagactgtcttgtgccgccagcggcttcaccttcaccaatcacgccatgagctgggtccgacaggcccctggaaaaggactggaactggtgtctagcatcagcggcaacggcagaaccacctactacgccgatagcgtgaagggcagattcaccatcagccgggacatcagcaagaacaccctggacctccagatgaacagcctgagagccgaggataccgccgtgtactactgtgccaaggatggcggagagacactggtggatagcagaggccagggcacactggtcacagtgtcatctctcgagggatctggcagagccgattgcggctttaccagcgagagctaccagcagggcgtgctgagcgccaccatcctgtacgagatcctgctgggcaaggccaccctgtacgccgtgctggtgtctgccctggtgctgatggctatggtcaagcggaaggacagccggggaagggccaagcgatctggatctggagcaacaaacttctcactactcaaacaagcaggtgacgtggaggagaatcccgggcctactagtatggactggatttggcgcatccttttccttgtcggcgctgctaccggcgcgcattccttcgaagaagttcagctgcttgagtctggcggaggactggttcaacctggcggaagcctgagactgtcttgtgccgccagcggcttcatcttcagcagctacgccatgagctgggtccgacaggctcctggaaagggccaagaatgggtttccggcgttagcggcacaggcgtgaacacctactacgccgatagcgtgaagggcagattcaccatcagccgggacaacagcaagaacaccctgtacctccagatgaacagcctgagagccgaggacaccgccgtgtactattgtgcctctggcaaaggctgggacagcggctcttggtacgaggactatagaggccagggcaccctggtcacagtttcttcaacgcgtggcagcatccccgaggacacattcttcccaagccccgagagcagctgcgacgtgaagctggtggaaaagagcttcgagacagacaccaacctgaacttccagaacctgagcgtgatcggcttcagaatcctgctgctgaaagtggccggctttaacctgctgatgaccctgcggctgtggtccagc

SEQ ID NO: 7108 - DNA, 2025 bp, Artificial Sequence
  Synthetic Polynucloetide
atggccttaccagtgaccgccttgctcctgccgctggccttgctgctccacgccgccaggccgcaggtgcagctggttgaatctggcggaggactggttcagcctggcggatctctgagactgtcttgtgccgccagcggcttcaccttcaccaatcacgccatgagctgggtccgacaggcccctggaaaaggactggaactggtgtctagcatcagcggcaacggcagaaccacctactacgccgatagcgtgaagggcagattcaccatcagccgggacatcagcaagaacaccctggacctccagatgaacagcctgagagccgaggataccgccgtgtactactgtgccaaggatggcggagagacactggtggatagcagaggccagggcacactggtcacagtgtcatctctcgaggacaaaactcacacatgcccaccgtgcccagcaggcagagccgattgcggctttaccagcgagagctaccagcagggcgtgctgagcgccaccatcctgtacgagatcctgctgggcaaggccaccctgtacgccgtgctggtgtctgccctggtgctgatggctatggtcaagcggaaggacagccggggaagggccaagcgatctggatctggagcaacaaacttctcactactcaaacaagcaggtgacgtggaggagaatcccgggcctactagtatggactggatttggcgcatccttttccttgtcggcgctgctaccggcgcgcattccttcgaagaagttcagctgcttgagtctggcggaggactggttcaacctggcggaagcctgagactgtcttgtgccgccagcggcttcatcttcagcagctacgccatgagctgggtccgacaggctcctggaaagggccaagaatgggtttccggcgttagcggcacaggcgtgaacacctactacgccgatagcgtgaagggcagattcaccatcagccgggacaacagcaagaacaccctgtacctccagatgaacagcctgagagccgaggacaccgccgtgtactattgtgcctctggcaaaggctgggacagcggctcttggtacgaggactatagaggccagggcaccctggtcacagtttcttcaacgcgtggcagcatccccgaggacacattcttcccaagccccgagagcagctgcgacgtgaagctggtggaaaagagcttcgagacagacaccaacctgaacttccagaacctgagcgtgatcggcttcagaatcctgctgctgaaagtggccggctttaacctgctgatgaccctgcggctgtggtccagccgcgccaagagaagcggatctggcgtgaagcagaccctgaatttcgacctgctgaagctggctggcgacgtggaatccaacccaggcccttctagaggccatatgaccgagtacaagcccacggtgcgcctcgccacccgcgacgacgtccccagggccgtacgcaccctcgccgccgcgttcgccgactaccccgccacgcgccacaccgtcgatccggaccgccacatcgagcgggtcaccgagctgcaagaactcttcctcacgcgcgtcgggctcgacatcggcaaggtgtgggtcgcggacgacggcgccgcggtggcggtctggaccacgccggagagcgtcgaagcgggggcggtgttcgccgagatcggcccgcgcatggccgagttgagcggttcccggctggccgcgcagcaacagatggaaggcctcctggcgccgcaccggcccaaggagcccgcgtggttcctggccaccgtcggcgtctcgcccgaccaccagggcaagggtctgggcagcgccgtcgtgctccccggagtggaggcggccgagcgcgccggggtgcccgccttcctggagacctccgcgccccgcaacctccccttctacgagcggctcggcttcaccgtcaccgccgacgtcgaggtgcccgaaggaccgcgcacctggtgcatgacccgcaagcccggtgcctga

SEQ ID NO: 7109 - DNA, 2025 bp, Artificial Sequence
  Synthetic Polynucloetide
atggccttaccagtgaccgccttgctcctgccgctggccttgctgctccacgccgccaggccgcaggtgcagctggttgaatctggcggaggactggttcagcctggcggatctctgagactgtcttgtgccgccagcggcttcaccttcaccaatcacgccatgagctgggtccgacaggcccctggaaaaggactggaactggtgtctagcatcagcggcaacggcagaaccacctactacgccgatagcgtgaagggcagattcaccatcagccgggacatcagcaagaacaccctggacctccagatgaacagcctgagagccgaggataccgccgtgtactactgtgccaaggatggcggagagacactggtggatagcagaggccagggcacactggtcacagtgtcatctctcgagggatctggcagagccgattgcggctttaccagcgagagctaccagcagggcgtgctgagcgccaccatcctgtacgagatcctgctgggcaaggccaccctgtacgccgtgctggtgtctgccctggtgctgatggctatggtcaagcggaaggacagccggggaagggccaagcgatctggatctggagcaacaaacttctcactactcaaacaagcaggtgacgtggaggagaatcccgggcctactagtatggactggatttggcgcatccttttccttgtcggcgctgctaccggcgcgcattccttcgaagaagttcagctgcttgagtctggcggaggactggttcaacctggcggaagcctgagactgtcttgtgccgccagcggcttcatcttcagcagctacgccatgagctgggtccgacaggctcctggaaagggccaagaatgggtttccggcgttagcggcacaggcgtgaacacctactacgccgatagcgtgaagggcagattcaccatcagccgggacaacagcaagaacaccctgtacctccagatgaacagcctgagagccgaggacaccgccgtgtactattgtgcctctggcaaaggctgggacagcggctcttggtacgaggactatagaggccagggcaccctggtcacagtttcttcaacgcgtgataaaactcatacctgtccgccatgcccggcaatccccgaggacacattcttcccaagccccgagagcagctgcgacgtgaagctggtggaaaagagcttcgagacagacaccaacctgaacttccagaacctgagcgtgatcggcttcagaatcctgctgctgaaagtggccggctttaacctgctgatgaccctgcggctgtggtccagccgcgccaagagaagcggatctggcgtgaagcagaccctgaatttcgacctgctgaagctggctggcgacgtggaatccaacccaggcccttctagaggccatatgaccgagtacaagcccacggtgcgcctcgccacccgcgacgacgtccccagggccgtacgcaccctcgccgccgcgttcgccgactaccccgccacgcgccacaccgtcgatccggaccgccacatcgagcgggtcaccgagctgcaagaactcttcctcacgcgcgtcgggctcgacatcggcaaggtgtgggtcgcggacgacggcgccgcggtggcggtctggaccacgccggagagcgtcgaagcgggggcggtgttcgccgagatcggcccgcgcatggccgagttgagcggttcccggctggccgcgcagcaacagatggaaggcctcctggcgccgcaccggcccaaggagcccgcgtggttcctggccaccgtcggcgtctcgcccgaccaccagggcaagggtctgggcagcgccgtcgtgctccccggagtggaggcggccgagcgcgccggggtgcccgccttcctggagacctccgcgccccgcaacctccccttctacgagcggctcggcttcaccgtcaccgccgacgtcgaggtgcccgaaggaccgcgcacctggtgcatgacccgcaagcccggtgcctga

SEQ ID NO: 7110 - DNA, 2052 bp, Artificial Sequence
  Synthetic Polynucloetide
atggccttaccagtgaccgccttgctcctgccgctggccttgctgctccacgccgccaggccgcaggtgcagctggttgaatctggcggaggactggttcagcctggcggatctctgagactgtcttgtgccgccagcggcttcaccttcaccaatcacgccatgagctgggtccgacaggcccctggaaaaggactggaactggtgtctagcatcagcggcaacggcagaaccacctactacgccgatagcgtgaagggcagattcaccatcagccgggacatcagcaagaacaccctggacctccagatgaacagcctgagagccgaggataccgccgtgtactactgtgccaaggatggcggagagacactggtggatagcagaggccagggcacactggtcacagtgtcatctctcgaggacaaaactcacacatgcccaccgtgcccagcaggcagagccgattgcggctttaccagcgagagctaccagcagggcgtgctgagcgccaccatcctgtacgagatcctgctgggcaaggccaccctgtacgccgtgctggtgtctgccctggtgctgatggctatggtcaagcggaaggacagccggggaagggccaagcgatctggatctggagcaacaaacttctcactactcaaacaagcaggtgacgtggaggagaatcccgggcctactagtatggactggatttggcgcatccttttccttgtcggcgctgctaccggcgcgcattccttcgaagaagttcagctgcttgagtctggcggaggactggttcaacctggcggaagcctgagactgtcttgtgccgccagcggcttcatcttcagcagctacgccatgagctgggtccgacaggctcctggaaagggccaagaatgggtttccggcgttagcggcacaggcgtgaacacctactacgccgatagcgtgaagggcagattcaccatcagccgggacaacagcaagaacaccctgtacctccagatgaacagcctgagagccgaggacaccgccgtgtactattgtgcctctggcaaaggctgggacagcggctcttggtacgaggactatagaggccagggcaccctggtcacagtttcttcaacgcgtgataaaactcatacctgtccgccatgcccggcaatccccgaggacacattcttcccaagccccgagagcagctgcgacgtgaagctggtggaaaagagcttcgagacagacaccaacctgaacttccagaacctgagcgtgatcggcttcagaatcctgctgctgaaagtggccggctttaacctgctgatgaccctgcggctgtggtccagccgcgccaagagaagcggatctggcgtgaagcagaccctgaatttcgacctgctgaagctggctggcgacgtggaatccaacccaggcccttctagaggccatatgaccgagtacaagcccacggtgcgcctcgccacccgcgacgacgtccccagggccgtacgcaccctcgccgccgcgttcgccgactaccccgccacgcgccacaccgtcgatccggaccgccacatcgagcgggtcaccgagctgcaagaactcttcctcacgcgcgtcgggctcgacatcggcaaggtgtgggtcgcggacgacggcgccgcggtggcggtctggaccacgccggagagcgtcgaagcgggggcggtgttcgccgagatcggcccgcgcatggccgagttgagcggttcccggctggccgcgcagcaacagatggaaggcctcctggcgccgcaccggcccaaggagcccgcgtggttcctggccaccgtcggcgtctcgcccgaccaccagggcaagggtctgggcagcgccgtcgtgctccccggagtggaggcggccgagcgcgccggggtgcccgccttcctggagacctccgcgccccgcaacctccccttctacgagcggctcggcttcaccgtcaccgccgacgtcgaggtgcccgaaggaccgcgcacctggtgcatgacccgcaagcccggtgcctga

SEQ ID NO: 7111 - DNA, 1350 bp, Artificial Sequence
  Synthetic Polynucloetide
atggccttaccagtgaccgccttgctcctgccgctggccttgctgctccacgccgccaggccgcaggtgcagctggttgaatctggcggaggactggttcagcctggcggatctctgagactgtcttgtgccgccagcggcttcaccttcaccaatcacgccatgagctgggtccgacaggcccctggaaaaggactggaactggtgtctagcatcagcggcaacggcagaaccacctactacgccgatagcgtgaagggcagattcaccatcagccgggacatcagcaagaacaccctggacctccagatgaacagcctgagagccgaggataccgccgtgtactactgtgccaaggatggcggagagacactggtggatagcagaggccagggcacactggtcacagtgtcatctctcgaggacaaaactcacacatgcccaccgtgcccagcaggcagagccgattgcggctttaccagcgagagctaccagcagggcgtgctgagcgccaccatcctgtacgagatcctgctgggcaaggccaccctgtacgccgtgctggtgtctgccctggtgctgatggctatggtcaagcggaaggacagccggggaagggccaagcgatctggatctggagcaacaaacttctcactactcaaacaagcaggtgacgtggaggagaatcccgggcctactagtatggactggatttggcgcatccttttccttgtcggcgctgctaccggcgcgcattccttcgaagaagttcagctgcttgagtctggcggaggactggttcaacctggcggaagcctgagactgtcttgtgccgccagcggcttcatcttcagcagctacgccatgagctgggtccgacaggctcctggaaagggccaagaatgggtttccggcgttagcggcacaggcgtgaacacctactacgccgatagcgtgaagggcagattcaccatcagccgggacaacagcaagaacaccctgtacctccagatgaacagcctgagagccgaggacaccgccgtgtactattgtgcctctggcaaaggctgggacagcggctcttggtacgaggactatagaggccagggcaccctggtcacagtttcttcaacgcgtgataaaactcatacctgtccgccatgcccggcaatccccgaggacacattcttcccaagccccgagagcagctgcgacgtgaagctggtggaaaagagcttcgagacagacaccaacctgaacttccagaacctgagcgtgatcggcttcagaatcctgctgctgaaagtggccggctttaacctgctgatgaccctgcggctgtggtccagc

SEQ ID NO: 7112 - DNA, 1323 bp, Artificial Sequence
  Synthetic Polynucloetide
atggccttaccagtgaccgccttgctcctgccgctggccttgctgctccacgccgccaggccgcaggtgcagctggttgaatctggcggaggactggttcagcctggcggatctctgagactgtcttgtgccgccagcggcttcaccttcaccaatcacgccatgagctgggtccgacaggcccctggaaaaggactggaactggtgtctagcatcagcggcaacggcagaaccacctactacgccgatagcgtgaagggcagattcaccatcagccgggacatcagcaagaacaccctggacctccagatgaacagcctgagagccgaggataccgccgtgtactactgtgccaaggatggcggagagacactggtggatagcagaggccagggcacactggtcacagtgtcatctctcgagggatctggcagagccgattgcggctttaccagcgagagctaccagcagggcgtgctgagcgccaccatcctgtacgagatcctgctgggcaaggccaccctgtacgccgtgctggtgtctgccctggtgctgatggctatggtcaagcggaaggacagccggggaagggccaagcgatctggatctggagcaacaaacttctcactactcaaacaagcaggtgacgtggaggagaatcccgggcctactagtatggactggatttggcgcatccttttccttgtcggcgctgctaccggcgcgcattccttcgaagaagttcagctgcttgagtctggcggaggactggttcaacctggcggaagcctgagactgtcttgtgccgccagcggcttcatcttcagcagctacgccatgagctgggtccgacaggctcctggaaagggccaagaatgggtttccggcgttagcggcacaggcgtgaacacctactacgccgatagcgtgaagggcagattcaccatcagccgggacaacagcaagaacaccctgtacctccagatgaacagcctgagagccgaggacaccgccgtgtactattgtgcctctggcaaaggctgggacagcggctcttggtacgaggactatagaggccagggcaccctggtcacagtttcttcaacgcgtgataaaactcatacctgtccgccatgcccggcaatccccgaggacacattcttcccaagccccgagagcagctgcgacgtgaagctggtggaaaagagcttcgagacagacaccaacctgaacttccagaacctgagcgtgatcggcttcagaatcctgctgctgaaagtggccggctttaacctgctgatgaccctgcggctgtggtccagc

SEQ ID NO: 7113 - DNA, 2679 bp, Artificial Sequence
  Synthetic Polynucloetide
atggccttaccagtgaccgccttgctcctgccgctggccttgctgctccacgccgccaggccgcaggtgcagctggttgaatctggcggaggactggttcagcctggcggatctctgagactgtcttgtgccgccagcggcttcaccttcaccaatcacgccatgagctgggtccgacaggcccctggaaaaggactggaactggtgtctagcatcagcggcaacggcagaaccacctactacgccgatagcgtgaagggcagattcaccatcagccgggacatcagcaagaacaccctggacctccagatgaacagcctgagagccgaggataccgccgtgtactactgtgccaaggatggcggagagacactggtggatagcagaggccagggcacactggtcacagtgtcatctctcgagggacagcctaaggccaatcctaccgtgacactgttccctccaagcagcgaagaactccaggccaacaaggccacacttgtgtgcctgatctccgacttctaccctggggctgtgacagtggcttggaaggccgatggatctcctgtgaaagccggcgtggaaaccaccaagccatccaagcagagcaacaacaaatacgccgccagctcctacctgagcctgacacctgagcagtggaagtcccacagatcctacagctgccaagtgacccacgaaggcagcaccgtggaaaagacagtggcccctacagagtgcagccccatcaagaccgatgtgattacaatggaccccaaggacaactgctccaaggacgccaacgataccctgctgctccagctgaccaacaccagcgcctactacatgtacttgttgctgctgctgaagtccgtggtgtacttcgccatcatcacatgctgcctgctgcggagaaccgccttctgctgcaacggcgagaagtctagggccaagcgatctggatctggagcaacaaacttctcactactcaaacaagcaggtgacgtggaggagaatcccgggcctactagtatggactggatttggcgcatccttttccttgtcggcgctgctaccggcgcgcattccttcgaagaagttcagctgcttgagtctggcggaggactggttcaacctggcggaagcctgagactgtcttgtgccgccagcggcttcatcttcagcagctacgccatgagctgggtccgacaggctcctggaaagggccaagaatgggtttccggcgttagcggcacaggcgtgaacacctactacgccgatagcgtgaagggcagattcaccatcagccgggacaacagcaagaacaccctgtacctccagatgaacagcctgagagccgaggacaccgccgtgtactattgtgcctctggcaaaggctgggacagcggctcttggtacgaggactatagaggccagggcaccctggtcacagtttcttcaacgcgtgcctctacaaagggaccctccgtgtttcctctggctcccagcagcaagtctacaagcggaggaacagccgctctgggctgcctggtcaaggattactttcccgagcctgtgaccgtgtcctggaatagcggagcactgacaagcggcgtgcacacctttccagccgtgctgcaaagcagcggcctgtactctctgagcagcgtggtcacagtgcctagctctagcctgggcacccagacctacatctgcaatgtgaaccacaagcctagcaacaccaaggtggacaagagagtggaacccaagagctgtgaagtgaaaaccgactccaccgaccacgtgaagcccaaagagacagagaacaccaagcagcccagcaagagctgccacaagcccaaggccatcgtgcacaccgagaaagtgaacatgatgagcctgaccgtgctgggcctgcggatgctgttcgccaaaaccgtggccgtgaacttcctgctgaccgccaagctgttcttcctccgcgccaagagaagcggatctggcgtgaagcagaccctgaatttcgacctgctgaagctggctggcgacgtggaatccaacccaggcccttctagaggccatatgaccgagtacaagcccacggtgcgcctcgccacccgcgacgacgtccccagggccgtacgcaccctcgccgccgcgttcgccgactaccccgccacgcgccacaccgtcgatccggaccgccacatcgagcgggtcaccgagctgcaagaactcttcctcacgcgcgtcgggctcgacatcggcaaggtgtgggtcgcggacgacggcgccgcggtggcggtctggaccacgccggagagcgtcgaagcgggggcggtgttcgccgagatcggcccgcgcatggccgagttgagcggttcccggctggccgcgcagcaacagatggaaggcctcctggcgccgcaccggcccaaggagcccgcgtggttcctggccaccgtcggcgtctcgcccgaccaccagggcaagggtctgggcagcgccgtcgtgctccccggagtggaggcggccgagcgcgccggggtgcccgccttcctggagacctccgcgccccgcaacctccccttctacgagcggctcggcttcaccgtcaccgccgacgtcgaggtgcccgaaggaccgcgcacctggtgcatgacccgcaagcccggtgcctga

SEQ ID NO: 7114 - DNA, 1977 bp, Artificial Sequence; identical to SEQ ID NO: 7076
  Synthetic Polynucloetide

SEQ ID NO: 7115 - DNA, 2064 bp, Artificial Sequence
  Synthetic Polynucloetide
atggccttaccagtgaccgccttgctcctgccgctggccttgctgctccacgccgccaggccgcaggtgcagctggttgaatctggcggaggactggttcagcctggcggatctctgagactgtcttgtgccgccagcggcttcaccttcaccaatcacgccatgagctgggtccgacaggcccctggaaaaggactggaactggtgtctagcatcagcggcaacggcagaaccacctactacgccgatagcgtgaagggcagattcaccatcagccgggacatcagcaagaacaccctggacctccagatgaacagcctgagagccgaggataccgccgtgtactactgtgccaaggatggcggagagacactggtggatagcagaggccagggcacactggtcacagtgtcatctctcgagggatctcccatcaagaccgatgtgattacaatggaccccaaggacaactgctccaaggacgccaacgataccctgctgctccagctgaccaacaccagcgcctactacatgtacttgttgctgctgctgaagtccgtggtgtacttcgccatcatcacatgctgcctgctgcggagaaccgccttctgctgcaacggcgagaagtctagggccaagcgatctggatctggagcaacaaacttctcactactcaaacaagcaggtgacgtggaggagaatcccgggcctactagtatggactggatttggcgcatccttttccttgtcggcgctgctaccggcgcgcattccttcgaagaagttcagctgcttgagtctggcggaggactggttcaacctggcggaagcctgagactgtcttgtgccgccagcggcttcatcttcagcagctacgccatgagctgggtccgacaggctcctggaaagggccaagaatgggtttccggcgttagcggcacaggcgtgaacacctactacgccgatagcgtgaagggcagattcaccatcagccgggacaacagcaagaacaccctgtacctccagatgaacagcctgagagccgaggacaccgccgtgtactattgtgcctctggcaaaggctgggacagcggctcttggtacgaggactatagaggccagggcaccctggtcacagtttcttcaacgcgtggcagcgaagtgaaaaccgactccaccgaccacgtgaagcccaaagagacagagaacaccaagcagcccagcaagagctgccacaagcccaaggccatcgtgcacaccgagaaagtgaacatgatgagcctgaccgtgctgggcctgcggatgctgttcgccaaaaccgtggccgtgaacttcctgctgaccgccaagctgttcttcctccgcgccaagagaagcggatctggcgtgaagcagaccctgaatttcgacctgctgaagctggctggcgacgtggaatccaacccaggcccttctagaggccatatgaccgagtacaagcccacggtgcgcctcgccacccgcgacgacgtccccagggccgtacgcaccctcgccgccgcgttcgccgactaccccgccacgcgccacaccgtcgatccggaccgccacatcgagcgggtcaccgagctgcaagaactcttcctcacgcgcgtcgggctcgacatcggcaaggtgtgggtcgcggacgacggcgccgcggtggcggtctggaccacgccggagagcgtcgaagcgggggcggtgttcgccgagatcggcccgcgcatggccgagttgagcggttcccggctggccgcgcagcaacagatggaaggcctcctggcgccgcaccggcccaaggagcccgcgtggttcctggccaccgtcggcgtctcgcccgaccaccagggcaagggtctgggcagcgccgtcgtgctccccggagtggaggcggccgagcgcgccggggtgcccgccttcctggagacctccgcgccccgcaacctccccttctacgagcggctcggcttcaccgtcaccgccgacgtcgaggtgcccgaaggaccgcgcacctggtgcatgacccgcaagcccggtgcctga

SEQ ID NO: 7116 - DNA, 1362 bp, Artificial Sequence
  Synthetic Polynucloetide
atggccttaccagtgaccgccttgctcctgccgctggccttgctgctccacgccgccaggccgcaggtgcagctggttgaatctggcggaggactggttcagcctggcggatctctgagactgtcttgtgccgccagcggcttcaccttcaccaatcacgccatgagctgggtccgacaggcccctggaaaaggactggaactggtgtctagcatcagcggcaacggcagaaccacctactacgccgatagcgtgaagggcagattcaccatcagccgggacatcagcaagaacaccctggacctccagatgaacagcctgagagccgaggataccgccgtgtactactgtgccaaggatggcggagagacactggtggatagcagaggccagggcacactggtcacagtgtcatctctcgagggatctcccatcaagaccgatgtgattacaatggaccccaaggacaactgctccaaggacgccaacgataccctgctgctccagctgaccaacaccagcgcctactacatgtacttgttgctgctgctgaagtccgtggtgtacttcgccatcatcacatgctgcctgctgcggagaaccgccttctgctgcaacggcgagaagtctagggccaagcgatctggatctggagcaacaaacttctcactactcaaacaagcaggtgacgtggaggagaatcccgggcctactagtatggactggatttggcgcatccttttccttgtcggcgctgctaccggcgcgcattccttcgaagaagttcagctgcttgagtctggcggaggactggttcaacctggcggaagcctgagactgtcttgtgccgccagcggcttcatcttcagcagctacgccatgagctgggtccgacaggctcctggaaagggccaagaatgggtttccggcgttagcggcacaggcgtgaacacctactacgccgatagcgtgaagggcagattcaccatcagccgggacaacagcaagaacaccctgtacctccagatgaacagcctgagagccgaggacaccgccgtgtactattgtgcctctggcaaaggctgggacagcggctcttggtacgaggactatagaggccagggcaccctggtcacagtttcttcaacgcgtggcagcgaagtgaaaaccgactccaccgaccacgtgaagcccaaagagacagagaacaccaagcagcccagcaagagctgccacaagcccaaggccatcgtgcacaccgagaaagtgaacatgatgagcctgaccgtgctgggcctgcggatgctgttcgccaaaaccgtggccgtgaacttcctgctgaccgccaagctgttcttcctc

SEQ ID NO: 7117 - DNA, 2091 bp, Artificial Sequence
  Synthetic Polynucloetide
atggccttaccagtgaccgccttgctcctgccgctggccttgctgctccacgccgccaggccgcaggtgcagctggttgaatctggcggaggactggttcagcctggcggatctctgagactgtcttgtgccgccagcggcttcaccttcaccaatcacgccatgagctgggtccgacaggcccctggaaaaggactggaactggtgtctagcatcagcggcaacggcagaaccacctactacgccgatagcgtgaagggcagattcaccatcagccgggacatcagcaagaacaccctggacctccagatgaacagcctgagagccgaggataccgccgtgtactactgtgccaaggatggcggagagacactggtggatagcagaggccagggcacactggtcacagtgtcatctctcgaggacaaaactcacacatgcccaccgtgcccagcacccatcaagaccgatgtgattacaatggaccccaaggacaactgctccaaggacgccaacgataccctgctgctccagctgaccaacaccagcgcctactacatgtacttgttgctgctgctgaagtccgtggtgtacttcgccatcatcacatgctgcctgctgcggagaaccgccttctgctgcaacggcgagaagtctagggccaagcgatctggatctggagcaacaaacttctcactactcaaacaagcaggtgacgtggaggagaatcccgggcctactagtatggactggatttggcgcatccttttccttgtcggcgctgctaccggcgcgcattccttcgaagaagttcagctgcttgagtctggcggaggactggttcaacctggcggaagcctgagactgtcttgtgccgccagcggcttcatcttcagcagctacgccatgagctgggtccgacaggctcctggaaagggccaagaatgggtttccggcgttagcggcacaggcgtgaacacctactacgccgatagcgtgaagggcagattcaccatcagccgggacaacagcaagaacaccctgtacctccagatgaacagcctgagagccgaggacaccgccgtgtactattgtgcctctggcaaaggctgggacagcggctcttggtacgaggactatagaggccagggcaccctggtcacagtttcttcaacgcgtggcagcgaagtgaaaaccgactccaccgaccacgtgaagcccaaagagacagagaacaccaagcagcccagcaagagctgccacaagcccaaggccatcgtgcacaccgagaaagtgaacatgatgagcctgaccgtgctgggcctgcggatgctgttcgccaaaaccgtggccgtgaacttcctgctgaccgccaagctgttcttcctccgcgccaagagaagcggatctggcgtgaagcagaccctgaatttcgacctgctgaagctggctggcgacgtggaatccaacccaggcccttctagaggccatatgaccgagtacaagcccacggtgcgcctcgccacccgcgacgacgtccccagggccgtacgcaccctcgccgccgcgttcgccgactaccccgccacgcgccacaccgtcgatccggaccgccacatcgagcgggtcaccgagctgcaagaactcttcctcacgcgcgtcgggctcgacatcggcaaggtgtgggtcgcggacgacggcgccgcggtggcggtctggaccacgccggagagcgtcgaagcgggggcggtgttcgccgagatcggcccgcgcatggccgagttgagcggttcccggctggccgcgcagcaacagatggaaggcctcctggcgccgcaccggcccaaggagcccgcgtggttcctggccaccgtcggcgtctcgcccgaccaccagggcaagggtctgggcagcgccgtcgtgctccccggagtggaggcggccgagcgcgccggggtgcccgccttcctggagacctccgcgccccgcaacctccccttctacgagcggctcggcttcaccgtcaccgccgacgtcgaggtgcccgaaggaccgcgcacctggtgcatgacccgcaagcccggtgcctga

SEQ ID NO: 7118 - DNA, 2091 bp, Artificial Sequence
  Synthetic Polynucloetide
atggccttaccagtgaccgccttgctcctgccgctggccttgctgctccacgccgccaggccgcaggtgcagctggttgaatctggcggaggactggttcagcctggcggatctctgagactgtcttgtgccgccagcggcttcaccttcaccaatcacgccatgagctgggtccgacaggcccctggaaaaggactggaactggtgtctagcatcagcggcaacggcagaaccacctactacgccgatagcgtgaagggcagattcaccatcagccgggacatcagcaagaacaccctggacctccagatgaacagcctgagagccgaggataccgccgtgtactactgtgccaaggatggcggagagacactggtggatagcagaggccagggcacactggtcacagtgtcatctctcgagggatctcccatcaagaccgatgtgattacaatggaccccaaggacaactgctccaaggacgccaacgataccctgctgctccagctgaccaacaccagcgcctactacatgtacttgttgctgctgctgaagtccgtggtgtacttcgccatcatcacatgctgcctgctgcggagaaccgccttctgctgcaacggcgagaagtctagggccaagcgatctggatctggagcaacaaacttctcactactcaaacaagcaggtgacgtggaggagaatcccgggcctactagtatggactggatttggcgcatccttttccttgtcggcgctgctaccggcgcgcattccttcgaagaagttcagctgcttgagtctggcggaggactggttcaacctggcggaagcctgagactgtcttgtgccgccagcggcttcatcttcagcagctacgccatgagctgggtccgacaggctcctggaaagggccaagaatgggtttccggcgttagcggcacaggcgtgaacacctactacgccgatagcgtgaagggcagattcaccatcagccgggacaacagcaagaacaccctgtacctccagatgaacagcctgagagccgaggacaccgccgtgtactattgtgcctctggcaaaggctgggacagcggctcttggtacgaggactatagaggccagggcaccctggtcacagtttcttcaacgcgtgataaaactcatacctgtccgccatgcccggcagaagtgaaaaccgactccaccgaccacgtgaagcccaaagagacagagaacaccaagcagcccagcaagagctgccacaagcccaaggccatcgtgcacaccgagaaagtgaacatgatgagcctgaccgtgctgggcctgcggatgctgttcgccaaaaccgtggccgtgaacttcctgctgaccgccaagctgttcttcctccgcgccaagagaagcggatctggcgtgaagcagaccctgaatttcgacctgctgaagctggctggcgacgtggaatccaacccaggcccttctagaggccatatgaccgagtacaagcccacggtgcgcctcgccacccgcgacgacgtccccagggccgtacgcaccctcgccgccgcgttcgccgactaccccgccacgcgccacaccgtcgatccggaccgccacatcgagcgggtcaccgagctgcaagaactcttcctcacgcgcgtcgggctcgacatcggcaaggtgtgggtcgcggacgacggcgccgcggtggcggtctggaccacgccggagagcgtcgaagcgggggcggtgttcgccgagatcggcccgcgcatggccgagttgagcggttcccggctggccgcgcagcaacagatggaaggcctcctggcgccgcaccggcccaaggagcccgcgtggttcctggccaccgtcggcgtctcgcccgaccaccagggcaagggtctgggcagcgccgtcgtgctccccggagtggaggcggccgagcgcgccggggtgcccgccttcctggagacctccgcgccccgcaacctccccttctacgagcggctcggcttcaccgtcaccgccgacgtcgaggtgcccgaaggaccgcgcacctggtgcatgacccgcaagcccggtgcctga

SEQ ID NO: 7119 - DNA, 2118 bp, Artificial Sequence
  Synthetic Polynucloetide
atggccttaccagtgaccgccttgctcctgccgctggccttgctgctccacgccgccaggccgcaggtgcagctggttgaatctggcggaggactggttcagcctggcggatctctgagactgtcttgtgccgccagcggcttcaccttcaccaatcacgccatgagctgggtccgacaggcccctggaaaaggactggaactggtgtctagcatcagcggcaacggcagaaccacctactacgccgatagcgtgaagggcagattcaccatcagccgggacatcagcaagaacaccctggacctccagatgaacagcctgagagccgaggataccgccgtgtactactgtgccaaggatggcggagagacactggtggatagcagaggccagggcacactggtcacagtgtcatctctcgaggacaaaactcacacatgcccaccgtgcccagcacccatcaagaccgatgtgattacaatggaccccaaggacaactgctccaaggacgccaacgataccctgctgctccagctgaccaacaccagcgcctactacatgtacttgttgctgctgctgaagtccgtggtgtacttcgccatcatcacatgctgcctgctgcggagaaccgccttctgctgcaacggcgagaagtctagggccaagcgatctggatctggagcaacaaacttctcactactcaaacaagcaggtgacgtggaggagaatcccgggcctactagtatggactggatttggcgcatccttttccttgtcggcgctgctaccggcgcgcattccttcgaagaagttcagctgcttgagtctggcggaggactggttcaacctggcggaagcctgagactgtcttgtgccgccagcggcttcatcttcagcagctacgccatgagctgggtccgacaggctcctggaaagggccaagaatgggtttccggcgttagcggcacaggcgtgaacacctactacgccgatagcgtgaagggcagattcaccatcagccgggacaacagcaagaacaccctgtacctccagatgaacagcctgagagccgaggacaccgccgtgtactattgtgcctctggcaaaggctgggacagcggctcttggtacgaggactatagaggccagggcaccctggtcacagtttcttcaacgcgtgataaaactcatacctgtccgccatgcccggcagaagtgaaaaccgactccaccgaccacgtgaagcccaaagagacagagaacaccaagcagcccagcaagagctgccacaagcccaaggccatcgtgcacaccgagaaagtgaacatgatgagcctgaccgtgctgggcctgcggatgctgttcgccaaaaccgtggccgtgaacttcctgctgaccgccaagctgttcttcctccgcgccaagagaagcggatctggcgtgaagcagaccctgaatttcgacctgctgaagctggctggcgacgtggaatccaacccaggcccttctagaggccatatgaccgagtacaagcccacggtgcgcctcgccacccgcgacgacgtccccagggccgtacgcaccctcgccgccgcgttcgccgactaccccgccacgcgccacaccgtcgatccggaccgccacatcgagcgggtcaccgagctgcaagaactcttcctcacgcgcgtcgggctcgacatcggcaaggtgtgggtcgcggacgacggcgccgcggtggcggtctggaccacgccggagagcgtcgaagcgggggcggtgttcgccgagatcggcccgcgcatggccgagttgagcggttcccggctggccgcgcagcaacagatggaaggcctcctggcgccgcaccggcccaaggagcccgcgtggttcctggccaccgtcggcgtctcgcccgaccaccagggcaagggtctgggcagcgccgtcgtgctccccggagtggaggcggccgagcgcgccggggtgcccgccttcctggagacctccgcgccccgcaacctccccttctacgagcggctcggcttcaccgtcaccgccgacgtcgaggtgcccgaaggaccgcgcacctggtgcatgacccgcaagcccggtgcctga

SEQ ID NO: 7120 - DNA, 1416 bp, Artificial Sequence
  Synthetic Polynucloetide
atggccttaccagtgaccgccttgctcctgccgctggccttgctgctccacgccgccaggccgcaggtgcagctggttgaatctggcggaggactggttcagcctggcggatctctgagactgtcttgtgccgccagcggcttcaccttcaccaatcacgccatgagctgggtccgacaggcccctggaaaaggactggaactggtgtctagcatcagcggcaacggcagaaccacctactacgccgatagcgtgaagggcagattcaccatcagccgggacatcagcaagaacaccctggacctccagatgaacagcctgagagccgaggataccgccgtgtactactgtgccaaggatggcggagagacactggtggatagcagaggccagggcacactggtcacagtgtcatctctcgaggacaaaactcacacatgcccaccgtgcccagcacccatcaagaccgatgtgattacaatggaccccaaggacaactgctccaaggacgccaacgataccctgctgctccagctgaccaacaccagcgcctactacatgtacttgttgctgctgctgaagtccgtggtgtacttcgccatcatcacatgctgcctgctgcggagaaccgccttctgctgcaacggcgagaagtctagggccaagcgatctggatctggagcaacaaacttctcactactcaaacaagcaggtgacgtggaggagaatcccgggcctactagtatggactggatttggcgcatccttttccttgtcggcgctgctaccggcgcgcattccttcgaagaagttcagctgcttgagtctggcggaggactggttcaacctggcggaagcctgagactgtcttgtgccgccagcggcttcatcttcagcagctacgccatgagctgggtccgacaggctcctggaaagggccaagaatgggtttccggcgttagcggcacaggcgtgaacacctactacgccgatagcgtgaagggcagattcaccatcagccgggacaacagcaagaacaccctgtacctccagatgaacagcctgagagccgaggacaccgccgtgtactattgtgcctctggcaaaggctgggacagcggctcttggtacgaggactatagaggccagggcaccctggtcacagtttcttcaacgcgtgataaaactcatacctgtccgccatgcccggcagaagtgaaaaccgactccaccgaccacgtgaagcccaaagagacagagaacaccaagcagcccagcaagagctgccacaagcccaaggccatcgtgcacaccgagaaagtgaacatgatgagcctgaccgtgctgggcctgcggatgctgttcgccaaaaccgtggccgtgaacttcctgctgaccgccaagctgttcttcctc

SEQ ID NO: 7121 - DNA, 2187 bp, Artificial Sequence
  Synthetic Polynucloetide
atggccttaccagtgaccgccttgctcctgccgctggccttgctgctccacgccgccaggccggaagtgcagctggttgaatctggcggaggactggttcaggctggcggatctctgagactgtcttgtgccgccagcggcagaacctttagcatgggctggtttagacaggcccctggcaaagagagagagttcgtcgccgccatcacatactctggcggcagcccttactacgccgactctgtgaagggcagattcaccatcagccgggacaacgccaagaacaccgtgtacctccagatgaacagcctgaagcctgaggacaccgccgtgtactactgcgccgccaatccaacatacggcagcgactggaacgccgagaattggggccagggaacccaagtgacagtgtctagcctcgagagcggcggaggcggatctttcgaacaactgcaactgcaagagtctggccctggcctggtcaagccttctgaaaccctgagcctgacctgtaccgtgtccggcggctctatcagcagcggcgattactactggggctggatcagacagcctccaggcaagggactcgaatggatcggcagcatcagctacagcggctccacctactacaacccaagcctgaagtccagagtgaccatcagcgtggacaccagcagaaaccagttctccctgaagctgagcagcgtgacagccgccgatacagccgtgtattattgcaccagagaggacagcagcaactggcggagtagaggacagggcacactggtcacagtgtcctctacgcgtgagcagaaactgatctcggaagaggatctggcgaagcccaccacgacgccagcgccgcgaccaccaacaccggcgcccaccatcgcgtcgcagcccctgtccctgcgcccagaggcgtgccggccagcggcggggggcgcagtgcacacgagggggctggacttcgcctgtgacatctacatctgggcgcccttggccgggacttgtggggtccttctcctgtcactggttatcaccctttactgcaaacggggcagaaagaaactcctgtatatattcaaacaaccatttatgagaccagtacaaactactcaagaggaagatggctgtagctgccgatttccagaagaagaagaaggaggatgtgaactgagagtgaagttcagcaggagcgcagacgcccccgcgtaccagcagggccagaaccagctctataacgagctgaatctaggacgaagagaggagtacgatgttttggacaagagacgtggccgggaccctgagatggggggaaagccgagaaggaagaaccctcaggaaggcctgtacaatgaactgcagaaagataagatggcggaggcctacagtgagattgggatgaaaggcgagcgccggaggggcaaggggcacgatggcctttaccagggtctcagtacagccaccaaggacacctacgacgcccttcacatgcaggccctgccccctcgctctagtggctccggcgagggcagaggaagtctactaacctgcggagatgtggaagaaaatcctggcccacatatgaccgagtacaagcccacggtgcgcctcgccacccgcgacgacgtccccagggccgtacgcaccctcgccgccgcgttcgccgactaccccgccacgcgccacaccgtcgatccggaccgccacatcgagcgggtcaccgagctgcaagaactcttcctcacgcgcgtcgggctcgacatcggcaaggtgtgggtcgcggacgacggcgccgcggtggcggtctggaccacgccggagagcgtcgaagcgggggcggtgttcgccgagatcggcccgcgcatggccgagttgagcggttcccggctggccgcgcagcaacagatggaaggcctcctggcgccgcaccggcccaaggagcccgcgtggttcctggccaccgtcggcgtctcgcccgaccaccagggcaagggtctgggcagcgccgtcgtgctccccggagtggaggcggccgagcgcgccggggtgcccgccttcctggagacctccgcgccccgcaacctccccttctacgagcggctcggcttcaccgtcaccgccgacgtcgaggtgcccgaaggaccgcgcacctggtgcatgacccgcaagcccggtgcctga

SEQ ID NO: 7122 - DNA, 2169 bp, Artificial Sequence
  Synthetic Polynucloetide
atggccttaccagtgaccgccttgctcctgccgctggccttgctgctccacgccgccaggccggaagtgcagctggttgaatctggcggaggactggttcaggctggcggatctctgagactgtcttgtgccgccagcggcagaacctttagcatgggctggtttagacaggcccctggcaaagagagagagttcgtcgccgccatcacatactctggcggcagcccttactacgccgactctgtgaagggcagattcaccatcagccgggacaacgccaagaacaccgtgtacctccagatgaacagcctgaagcctgaggacaccgccgtgtactactgcgccgccaatccaacatacggcagcgactggaacgccgagaattggggccagggaacccaagtgacagtgtctagcctcgagagcggcggaggcggatctttcgaacaactgcaactgcaagagtctggccctggcctggtcaagccttctgaaaccctgagcctgacctgtaccgtgtccggcggctctatcagcagcggcgattactactggggctggatcagacagcctccaggcaagggactcgaatggatcggcagcatcagctacagcggctccacctactacaacccaagcctgaagtccagagtgaccatcagcgtggacaccagcagaaaccagttctccctgaagctgagcagcgtgacagccgccgatacagccgtgtattattgcaccagagaggacagcagcaactggcggagtagaggacagggcacactggtcacagtgtcctctacgcgtgagcagaaactgatctcggaagaggatctgaaaattgaagttatgtatcctcctccttacctagacaatgagaagagcaatggaaccattatccatgtgaaagggaaacacctttgtccaagtcccctatttcccggaccttctaagcccttttgggtgctggtggtggttgggggagtcctggcttgctatagcttgctagtaacagtggcctttattattttctgggtgaggagtaagaggagcaggctcctgcacagtgactacatgaacatgactccacgccgccccggacccacccgcaagcattaccagccctatgccccaccacgcgacttcgcagcctatcgctccagagtgaagttcagcaggagcgcagacgcccccgcgtaccagcagggccagaaccagctctataacgagctcaatctaggacgaagagaggagtacgatgttttggacaagagacgtggccgggaccctgagatggggggaaagccgagaaggaagaaccctcaggaaggcctgtacaatgaactgcagaaagataagatggcggaggcctacagtgagattgggatgaaaggcgagcgccggaggggcaaggggcacgatggcctttaccagggtctcagtacagccaccaaggacacctacgacgcccttcacatgcaggccctgccccctcgctctagtggctccggcgagggcagaggaagtctactaacctgcggagatgtggaagaaaatcctggcccacatatgaccgagtacaagcccacggtgcgcctcgccacccgcgacgacgtccccagggccgtacgcaccctcgccgccgcgttcgccgactaccccgccacgcgccacaccgtcgatccggaccgccacatcgagcgggtcaccgagctgcaagaactcttcctcacgcgcgtcgggctcgacatcggcaaggtgtgggtcgcggacgacggcgccgcggtggcggtctggaccacgccggagagcgtcgaagcgggggcggtgttcgccgagatcggcccgcgcatggccgagttgagcggttcccggctggccgcgcagcaacagatggaaggcctcctggcgccgcaccggcccaaggagcccgcgtggttcctggccaccgtcggcgtctcgcccgaccaccagggcaagggtctgggcagcgccgtcgtgctccccggagtggaggcggccgagcgcgccggggtgcccgccttcctggagacctccgcgccccgcaacctccccttctacgagcggctcggcttcaccgtcaccgccgacgtcgaggtgcccgaaggaccgcgcacctggtgcatgacccgcaagcccggtgcctga

SEQ ID NO: 7123 - DNA, 1497 bp, Artificial Sequence
  Synthetic Polynucloetide
atggccttaccagtgaccgccttgctcctgccgctggccttgctgctccacgccgccaggccggaagtgcagctggttgaatctggcggaggactggttcaggctggcggatctctgagactgtcttgtgccgccagcggcagaacctttagcatgggctggtttagacaggcccctggcaaagagagagagttcgtcgccgccatcacatactctggcggcagcccttactacgccgactctgtgaagggcagattcaccatcagccgggacaacgccaagaacaccgtgtacctccagatgaacagcctgaagcctgaggacaccgccgtgtactactgcgccgccaatccaacatacggcagcgactggaacgccgagaattggggccagggaacccaagtgacagtgtctagcctcgagagcggcggaggcggatctttcgaacaactgcaactgcaagagtctggccctggcctggtcaagccttctgaaaccctgagcctgacctgtaccgtgtccggcggctctatcagcagcggcgattactactggggctggatcagacagcctccaggcaagggactcgaatggatcggcagcatcagctacagcggctccacctactacaacccaagcctgaagtccagagtgaccatcagcgtggacaccagcagaaaccagttctccctgaagctgagcagcgtgacagccgccgatacagccgtgtattattgcaccagagaggacagcagcaactggcggagtagaggacagggcacactggtcacagtgtcctctacgcgtgagcagaaactgatctcggaagaggatctgaaaattgaagttatgtatcctcctccttacctagacaatgagaagagcaatggaaccattatccatgtgaaagggaaacacctttgtccaagtcccctatttcccggaccttctaagcccttttgggtgctggtggtggttgggggagtcctggcttgctatagcttgctagtaacagtggcctttattattttctgggtgaggagtaagaggagcaggctcctgcacagtgactacatgaacatgactccacgccgccccggacccacccgcaagcattaccagccctatgccccaccacgcgacttcgcagcctatcgctccagagtgaagttcagcaggagcgcagacgcccccgcgtaccagcagggccagaaccagctctataacgagctcaatctaggacgaagagaggagtacgatgttttggacaagagacgtggccgggaccctgagatggggggaaagccgagaaggaagaaccctcaggaaggcctgtacaatgaactgcagaaagataagatggcggaggcctacagtgagattgggatgaaaggcgagcgccggaggggcaaggggcacgatggcctttaccagggtctcagtacagccaccaaggacacctacgacgcccttcacatgcaggccctgccccctcgc

SEQ ID NO: 7124 - DNA, 1518 bp, Artificial Sequence
  Synthetic Polynucloetide
atggccttaccagtgaccgccttgctcctgccgctggccttgctgctccacgccgccaggccggaagtgcagctggttgaatctggcggaggactggttcaggctggcggatctctgagactgtcttgtgccgccagcggcagaacctttagcatgggctggtttagacaggcccctggcaaagagagagagttcgtcgccgccatcacatactctggcggcagcccttactacgccgactctgtgaagggcagattcaccatcagccgggacaacgccaagaacaccgtgtacctccagatgaacagcctgaagcctgaggacaccgccgtgtactactgcgccgccaatccaacatacggcagcgactggaacgccgagaattggggccagggaacccaagtgacagtgtctagcctcgagagcggcggaggcggatctttcgaacaactgcaactgcaagagtctggccctggcctggtcaagccttctgaaaccctgagcctgacctgtaccgtgtccggcggctctatcagcagcggcgattactactggggctggatcagacagcctccaggcaagggactcgaatggatcggcagcatcagctacagcggctccacctactacaacccaagcctgaagtccagagtgaccatcagcgtggacaccagcagaaaccagttctccctgaagctgagcagcgtgacagccgccgatacagccgtgtattattgcaccagagaggacagcagcaactggcggagtagaggacagggcacactggtcacagtgtcctctacgcgtgagcagaaactgatctcggaagaggatctggcgaagcccaccacgacgccagcgccgcgaccaccaacaccggcgcccaccatcgcgtcgcagcccctgtccctgcgcccagaggcgtgccggccagcggcggggggcgcagtgcacacgagggggctggacttcgcctgtgacatctacatctgggcgcccttggccgggacttgtggggtccttctcctgtcactggttatcaccctttactgcaaacggggcagaaagaaactcctgtatatattcaaacaaccatttatgagaccagtacaaactactcaagaggaagatggctgtagctgccgatttccagaagaagaagaaggaggatgtgaactgagagtgaagttcagcaggagcgcagacgcccccgcgtaccagcagggccagaaccagctctataacgagctgaatctaggacgaagagaggagtacgatgttttggacaagagacgtggccgggaccctgagatggggggaaagccgagaaggaagaaccctcaggaaggcctgtacaatgaactgcagaaagataagatggcggaggcctacagtgagattgggatgaaaggcgagcgccggaggggcaaggggcacgatggcctttaccagggtctcagtacagccaccaaggacacctacgacgcccttcacatgcaggccctgccccctcgctga

SEQ ID NO: 7125 - DNA, 1521 bp, Artificial Sequence
  Synthetic Polynucloetide
atggccttaccagtgaccgccttgctcctgccgctggccttgctgctccacgccgccaggccggaacaactgcaactgcaagagtctggccctggcctggtcaagccttctgaaaccctgagcctgacctgtaccgtgtccggcggctctatcagcagcggcgattactactggggctggatcagacagcctccaggcaagggactcgaatggatcggcagcatcagctacagcggctccacctactacaacccaagcctgaagtccagagtgaccatcagcgtggacaccagcagaaaccagttctccctgaagctgagcagcgtgacagccgccgatacagccgtgtattattgcaccagagaggacagcagcaactggcggagtagaggacagggcacactggtcacagtgtcctctctcgagagcggcggaggcggatctttcgaagaagtgcagctggttgaatctggcggaggactggttcaggctggcggatctctgagactgtcttgtgccgccagcggcagaacctttagcatgggctggtttagacaggcccctggcaaagagagagagttcgtcgccgccatcacatactctggcggcagcccttactacgccgactctgtgaagggcagattcaccatcagccgggacaacgccaagaacaccgtgtacctccagatgaacagcctgaagcctgaggacaccgccgtgtactactgcgccgccaatccaacatacggcagcgactggaacgccgagaattggggccagggaacccaagtgacagtgtctagcacgcgtgagcagaaactgatctcggaagaggatctggcgaagcccaccacgacgccagcgccgcgaccaccaacaccggcgcccaccatcgcgtcgcagcccctgtccctgcgcccagaggcgtgccggccagcggcggggggcgcagtgcacacgagggggctggacttcgcctgtgacatctacatctgggcgcccttggccgggacttgtggggtccttctcctgtcactggttatcaccctttactgcaaacggggcagaaagaaactcctgtatatattcaaacaaccatttatgagaccagtacaaactactcaagaggaagatggctgtagctgccgatttccagaagaagaagaaggaggatgtgaactgagagtgaagttcagcaggagcgcagacgcccccgcgtaccagcagggccagaaccagctctataacgagctgaatctaggacgaagagaggagtacgatgttttggacaagagacgtggccgggaccctgagatggggggaaagccgagaaggaagaaccctcaggaaggcctgtacaatgaactgcagaaagataagatggcggaggcctacagtgagattgggatgaaaggcgagcgccggaggggcaaggggcacgatggcctttaccagggtctcagtacagccaccaaggacacctacgacgcccttcacatgcaggccctgccccctcgctga

SEQ ID NO: 7126 - DNA, 2757 bp, Artificial Sequence
  Synthetic Polynucloetide
atggccttaccagtgaccgccttgctcctgccgctggccttgctgctccacgccgccaggccggaagtgcagctggttgaatctggcggaggactggttcaggctggcggatctctgagactgtcttgtgccgccagcggcagaacctttagcatgggctggtttagacaggcccctggcaaagagagagagttcgtcgccgccatcacatactctggcggcagcccttactacgccgactctgtgaagggcagattcaccatcagccgggacaacgccaagaacaccgtgtacctccagatgaacagcctgaagcctgaggacaccgccgtgtactactgcgccgccaatccaacatacggcagcgactggaacgccgagaattggggccagggaacccaagtgacagtgtctagcctcgagagcggcggaggcggatctttcgaacaactgcaactgcaagagtctggccctggcctggtcaagccttctgaaaccctgagcctgacctgtaccgtgtccggcggctctatcagcagcggcgattactactggggctggatcagacagcctccaggcaagggactcgaatggatcggcagcatcagctacagcggctccacctactacaacccaagcctgaagtccagagtgaccatcagcgtggacaccagcagaaaccagttctccctgaagctgagcagcgtgacagccgccgatacagccgtgtattattgcaccagagaggacagcagcaactggcggagtagaggacagggcacactggtcacagtgtcctctacgcgtgagcagaaactgatctcggaagaggatctggcgaagcccaccacgacgccagcgccgcgaccaccaacaccggcgcccaccatcgcgtcgcagcccctgtccctgcgcccagaggcgtgccggccagcggcggggggcgcagtgcacacgagggggctggacttcgcctgtgacatctacatctgggcgcccttggccgggacttgtggggtccttctcctgtcactggttatcaccctttactgcgggcgcgccagagtgaagttcagcaggagcgcagacgcccccgcgtaccagcagggccagaaccagctctataacgagctgaatctaggacgaagagaggagtacgatgttttggacaagagacgtggccgggaccctgagatggggggaaagccgagaaggaagaaccctcaggaaggcctgtacaatgaactgcagaaagataagatggcggaggcctacagtgagattgggatgaaaggcgagcgccggaggggcaaggggcacgatggcctttaccagggtctcagtacagccaccaaggacacctacgacgcccttcacatgcaggccctgccccctcgctctagaggatctggagcaacaaacttctcactactcaaacaagcaggtgacgtggaggagaatcccgggcctgggatccacatggccacttacgaggttctctgtgaggtggcgcggaaactgggcacggatgacagggaagtggtattgttcctcctaaacgtgttcatacctcaacccacactggcccaattaattggagctcttagagctttaaaggaggagggcaggttaacgtttcccctgttagcggaatgtctgtttcgtgcaggtcgcagagacctcttgcgcgacctgcttcacttagacccgcgttttttagagcgccacctagcgggcacaatgagttatttcagcccttatcagctcactgttctccacgtagacggggagctgtgtgcgagggatattaggtctttgatatttttaagcaaggacactatagggtctcgcagcacaccacagacattcttacactgggtgtactgtatggaaaacttagacctactgggtcccactgacgtggatgccctaatgtcaatgcttagatctttgtcaagagtagacctacagcgccaagtgcaaaccctaatgggccttcacctttccggcccatcacactcccaacactatcgccatacaccactcgagaccgatttctacgactacaaggacgacgatgacaagactagtggctccggcgagggcagaggaagtctactaacctgcggagatgtggaagaaaatcctggcccacatatgaccgagtacaagcccacggtgcgcctcgccacccgcgacgacgtccccagggccgtacgcaccctcgccgccgcgttcgccgactaccccgccacgcgccacaccgtcgatccggaccgccacatcgagcgggtcaccgagctgcaagaactcttcctcacgcgcgtcgggctcgacatcggcaaggtgtgggtcgcggacgacggcgccgcggtggcggtctggaccacgccggagagcgtcgaagcgggggcggtgttcgccgagatcggcccgcgcatggccgagttgagcggttcccggctggccgcgcagcaacagatggaaggcctcctggcgccgcaccggcccaaggagcccgcgtggttcctggccaccgtcggcgtctcgcccgaccaccagggcaagggtctgggcagcgccgtcgtgctccccggagtggaggcggccgagcgcgccggggtgcccgccttcctggagacctccgcgccccgcaacctccccttctacgagcggctcggcttcaccgtcaccgccgacgtcgaggtgcccgaaggaccgcgcacctggtgcatgacccgcaagcccggtgcctga

SEQ ID NO: 7127 - DNA, 2592 bp, Artificial Sequence
  Synthetic Polynucloetide
atggccttaccagtgaccgccttgctcctgccgctggccttgctgctccacgccgccaggccggaagtgcagctggttgaatctggcggaggactggttcaggctggcggatctctgagactgtcttgtgccgccagcggcagaacctttagcatgggctggtttagacaggcccctggcaaagagagagagttcgtcgccgccatcacatactctggcggcagcccttactacgccgactctgtgaagggcagattcaccatcagccgggacaacgccaagaacaccgtgtacctccagatgaacagcctgaagcctgaggacaccgccgtgtactactgcgccgccaatccaacatacggcagcgactggaacgccgagaattggggccagggaacccaagtgacagtgtctagcctcgagatccagaaccctgatcctgccgtgtaccagctgcgggatagcaagagcagcgacaagagcgtgtgtctgttcaccgacttcgacagccagaccaacgtgtcccagagcaaggactccgacgtgtacatcaccgataagtgcgtgctggacatgcggagcatggacttcaagagcaactccgccgtggcctggtccaacaagtccgatttcgcctgcgccaacgccttcaacaacagcattatccccgaggacacattcttcccaagcagcgacgtgccctgcgacgtgaagctggtggaaaagagcttcgagacagacaccaacctgaacttccagaacctgagcgtgatcggcttcagaatcctgctgctgaaagtggccggctttaacctgctgatgaccctgcggctgtggtccagccgcgccaagagaagcggatctggcgtgaagcagaccctgaatttcgacctgctgaagctggctggcgacgtggaatccaacccaggccctactagtatggactggatttggcgcatccttttccttgtcggcgctgctaccggcgcgcattccttcgaacaactgcaactgcaagagtctggccctggcctggtcaagccttctgaaaccctgagcctgacctgtaccgtgtccggcggctctatcagcagcggcgattactactggggctggatcagacagcctccaggcaagggactcgaatggatcggcagcatcagctacagcggctccacctactacaacccaagcctgaagtccagagtgaccatcagcgtggacaccagcagaaaccagttctccctgaagctgagcagcgtgacagccgccgatacagccgtgtattattgcaccagagaggacagcagcaactggcggagtagaggacagggcacactggtcacagtgtcctctacgcgtgaggacctgaagaacgtgttcccacctgaggtggccgtgttcgagcctagcaaggccgagatcgcccacacccagaaagccaccctcgtgtgcctggctaccggcttctaccccgaccatgtggaactgtcttggtgggtcaacggcaaagaggtgcacagcggcgtgtgtaccgacccccagccactgaaagaacagcccgccctgaacgacagccggtactgcctgagcagcagactgagagtgtccgccaccttctggcagaacccccggaaccacttcagatgccaggtgcagttctacggcctgagcgagaacgacgagtggacccaggacagagccaagcccgtgacccagatcgtgtctgccgaagcctggggcagagccgattgcggcatcaccagcgccagctaccaccagggcgtgctgagcgccaccatcctgtacgagatcctgctgggcaaggccaccctgtacgccgtgctggtgtctgccctggtgctgatggctatggtcaagcggaaggacagccggggaagggccaagcgatctggatctggagcaacaaacttctcactactcaaacaagcaggtgacgtggaggagaatcccgggccttctagaggccatatgaccgagtacaagcccacggtgcgcctcgccacccgcgacgacgtccccagggccgtacgcaccctcgccgccgcgttcgccgactaccccgccacgcgccacaccgtcgatccggaccgccacatcgagcgggtcaccgagctgcaagaactcttcctcacgcgcgtcgggctcgacatcggcaaggtgtgggtcgcggacgacggcgccgcggtggcggtctggaccacgccggagagcgtcgaagcgggggcggtgttcgccgagatcggcccgcgcatggccgagttgagcggttcccggctggccgcgcagcaacagatggaaggcctcctggcgccgcaccggcccaaggagcccgcgtggttcctggccaccgtcggcgtctcgcccgaccaccagggcaagggtctgggcagcgccgtcgtgctccccggagtggaggcggccgagcgcgccggggtgcccgccttcctggagacctccgcgccccgcaacctccccttctacgagcggctcggcttcaccgtcaccgccgacgtcgaggtgcccgaaggaccgcgcacctggtgcatgacccgcaagcccggtgcctga

SEQ ID NO: 7128 - DNA, 2589 bp, Artificial Sequence
  Synthetic Polynucloetide
atggccttaccagtgaccgccttgctcctgccgctggccttgctgctccacgccgccaggccggaagtgcagctggttgaatctggcggaggactggttcaggctggcggatctctgagactgtcttgtgccgccagcggcagaacctttagcatgggctggtttagacaggcccctggcaaagagagagagttcgtcgccgccatcacatactctggcggcagcccttactacgccgactctgtgaagggcagattcaccatcagccgggacaacgccaagaacaccgtgtacctccagatgaacagcctgaagcctgaggacaccgccgtgtactactgcgccgccaatccaacatacggcagcgactggaacgccgagaattggggccagggaacccaagtgacagtgtctagcctcgaggacctgaagaacgtgttcccacctgaggtggccgtgttcgagcctagcaaggccgagatcgcccacacccagaaagccaccctcgtgtgcctggctaccggcttctaccccgaccatgtggaactgtcttggtgggtcaacggcaaagaggtgcacagcggcgtgtgtaccgacccccagccactgaaagaacagcccgccctgaacgacagccggtactgcctgagcagcagactgagagtgtccgccaccttctggcagaacccccggaaccacttcagatgccaggtgcagttctacggcctgagcgagaacgacgagtggacccaggacagagccaagcccgtgacccagatcgtgtctgccgaagcctggggcagagccgattgcggcatcaccagcgccagctaccaccagggcgtgctgagcgccaccatcctgtacgagatcctgctgggcaaggccaccctgtacgccgtgctggtgtctgccctggtgctgatggctatggtcaagcggaaggacagccggggaagggccaagcgatctggatctggagcaacaaacttctcactactcaaacaagcaggtgacgtggaggagaatcccgggcctactagtatggactggatttggcgcatccttttccttgtcggcgctgctaccggcgcgcattccttcgaacaactgcaactgcaagagtctggccctggcctggtcaagccttctgaaaccctgagcctgacctgtaccgtgtccggcggctctatcagcagcggcgattactactggggctggatcagacagcctccaggcaagggactcgaatggatcggcagcatcagctacagcggctccacctactacaacccaagcctgaagtccagagtgaccatcagcgtggacaccagcagaaaccagttctccctgaagctgagcagcgtgacagccgccgatacagccgtgtattattgcaccagagaggacagcagcaactggcggagtagaggacagggcacactggtcacagtgtcctctacgcgtatccagaaccctgatcctgccgtgtaccagctgcgggatagcaagagcagcgacaagagcgtgtgtctgttcaccgacttcgacagccagaccaacgtgtcccagagcaaggactccgacgtgtacatcaccgataagtgcgtgctggacatgcggagcatggacttcaagagcaactccgccgtggcctggtccaacaagtccgatttcgcctgcgccaacgccttcaacaacagcattatccccgaggacacattcttcccaagcagcgacgtgccctgcgacgtgaagctggtggaaaagagcttcgagacagacaccaacctgaacttccagaacctgagcgtgatcggcttcagaatcctgctgctgaaagtggccggctttaacctgctgatgaccctgcggctgtggtccagccgcgccaagagaagcggatctggcgtgaagcagaccctgaatttcgacctgctgaagctggctggcgacgtggaatccaacccaggcccttctagaggccatatgaccgagtacaagcccacggtgcgcctcgccacccgcgacgacgtccccagggccgtacgcaccctcgccgccgcgttcgccgactaccccgccacgcgccacaccgtcgatccggaccgccacatcgagcgggtcaccgagctgcaagaactcttcctcacgcgcgtcgggctcgacatcggcaaggtgtgggtcgcggacgacggcgccgcggtggcggtctggaccacgccggagagcgtcgaagcgggggcggtgttcgccgagatcggcccgcgcatggccgagttgagcggttcccggctggccgcgcagcaacagatggaaggcctcctggcgccgcaccggcccaaggagcccgcgtggttcctggccaccgtcggcgtctcgcccgaccaccagggcaagggtctgggcagcgccgtcgtgctccccggagtggaggcggccgagcgcgccggggtgcccgccttcctggagacctccgcgccccgcaacctccccttctacgagcggctcggcttcaccgtcaccgccgacgtcgaggtgcccgaaggaccgcgcacctggtgcatgacccgcaagcccggtgcctga

SEQ ID NO: 7129 - DNA, 1887 bp, Artificial Sequence
  Synthetic Polynucloetide
atggccttaccagtgaccgccttgctcctgccgctggccttgctgctccacgccgccaggccggaagtgcagctggttgaatctggcggaggactggttcaggctggcggatctctgagactgtcttgtgccgccagcggcagaacctttagcatgggctggtttagacaggcccctggcaaagagagagagttcgtcgccgccatcacatactctggcggcagcccttactacgccgactctgtgaagggcagattcaccatcagccgggacaacgccaagaacaccgtgtacctccagatgaacagcctgaagcctgaggacaccgccgtgtactactgcgccgccaatccaacatacggcagcgactggaacgccgagaattggggccagggaacccaagtgacagtgtctagcctcgaggacctgaagaacgtgttcccacctgaggtggccgtgttcgagcctagcgaggccgagatcagccacacccagaaagccaccctcgtgtgcctggctaccggcttctaccccgaccatgtggaactgtcttggtgggtcaacggcaaagaggtgcacagcggcgtgtgtaccgacccccagccactgaaagaacagcccgccctgaacgacagccggtactgcctgagcagcagactgagagtgtccgccaccttctggcagaacccccggaaccacttcagatgccaggtgcagttctacggcctgagcgagaacgacgagtggacccaggacagagccaagcccgtgacccagatcgtgtctgccgaagcctggggcagagccgattgcggctttaccagcgagagctaccagcagggcgtgctgagcgccaccatcctgtacgagatcctgctgggcaaggccaccctgtacgccgtgctggtgtctgccctggtgctgatggctatggtcaagcggaaggacagccggggaagggccaagcgatctggatctggagcaacaaacttctcactactcaaacaagcaggtgacgtggaggagaatcccgggcctactagtatggactggatttggcgcatccttttccttgtcggcgctgctaccggcgcgcattccttcgaacaactgcaactgcaagagtctggccctggcctggtcaagccttctgaaaccctgagcctgacctgtaccgtgtccggcggctctatcagcagcggcgattactactggggctggatcagacagcctccaggcaagggactcgaatggatcggcagcatcagctacagcggctccacctactacaacccaagcctgaagtccagagtgaccatcagcgtggacaccagcagaaaccagttctccctgaagctgagcagcgtgacagccgccgatacagccgtgtattattgcaccagagaggacagcagcaactggcggagtagaggacagggcacactggtcacagtgtcctctacgcgtatccagaaccctgatcctgccgtgtaccagctgcgggatagcaagagcagcgacaagagcgtgtgtctgttcaccgacttcgacagccagaccaacgtgtcccagagcaaggactccgacgtgtacatcaccgataagtgcgtgctggacatgcggagcatggacttcaagagcaactccgccgtggcctggtccaacaagtccgatttcgcctgcgccaacgccttcaacaacagcattatccccgaggacacattcttcccaagccccgagagcagctgcgacgtgaagctggtggaaaagagcttcgagacagacaccaacctgaacttccagaacctgagcgtgatcggcttcagaatcctgctgctgaaagtggccggctttaacctgctgatgaccctgcggctgtggtccagc

SEQ ID NO: 7130 - DNA, 2562 bp, Artificial Sequence
  Synthetic Polynucloetide
atggccttaccagtgaccgccttgctcctgccgctggccttgctgctccacgccgccaggccggaagtgcagctggttgaatctggcggaggactggttcaggctggcggatctctgagactgtcttgtgccgccagcggcagaacctttagcatgggctggtttagacaggcccctggcaaagagagagagttcgtcgccgccatcacatactctggcggcagcccttactacgccgactctgtgaagggcagattcaccatcagccgggacaacgccaagaacaccgtgtacctccagatgaacagcctgaagcctgaggacaccgccgtgtactactgcgccgccaatccaacatacggcagcgactggaacgccgagaattggggccagggaacccaagtgacagtgtctagcctcgaggacctgaagaacgtgttcccacctgaggtggccgtgttcgagcctagcgaggccgagatcagccacacccagaaagccaccctcgtgtgcctggctaccggcttctaccccgaccatgtggaactgtcttggtgggtcaacggcaaagaggtgcacagcggcgtgtgtaccgacccccagccactgaaagaacagcccgccctgaacgacagccggtactgcctgagcagcagactgagagtgtccgccaccttctggcagaacccccggaaccacttcagatgccaggtgcagttctacggcctgagcgagaacgacgagtggacccaggacagagccaagcccgtgacccagatcgtgtctgccgaagcctggggcagagccgattgcggctttaccagcgagagctaccagcagggcgtgctgagcgccaccatcctgtacgagatcctgctgggcaaggccaccctgtacgccgtgctggtgtctgccctggtgctgatggctatggtcaagcggaaggacagccggggaagggccaagcgatctggatctggagcaacaaacttctcactactcaaacaagcaggtgacgtggaggagaatcccgggcctactagtatggactggatttggcgcatccttttccttgtcggcgctgctaccggcgcgcattccttcgaacaactgcaactgcaagagtctggccctggcctggtcaagccttctgaaaccctgagcctgacctgtaccgtgtccggcggctctatcagcagcggcgattactactggggctggatcagacagcctccaggcaagggactcgaatggatcggcagcatcagctacagcggctccacctactacaacccaagcctgaagtccagagtgaccatcagcgtggacaccagcagaaaccagttctccctgaagctgagcagcgtgacagccgccgatacagccgtgtattattgcaccagagaggacagcagcaactggcggagtagaggacagggcacactggtcacagtgtcctctacgcgtatccagaaccctgatcctgccgtgtaccagctgcgggatagcaagagcagcgacaagagcgtgtgtctgttcaccgacttcgacagccagaccaacgtgtcccagagcaaggactccgacgtgtacatcaccgataagtgcgtgctggacatgcggagcatggacttcaagagcaactccgccgtggcctggtccaacaagtccgatttcgcctgcgccaacgccttcaacaacagcattatccccgaggacacattcttcccaagccccgagagcagctgcgacgtgaagctggtggaaaagagcttcgagacagacaccaacctgaacttccagaacctgagcgtgatcggcttcagaatcctgctgctgaaagtggccggctttaacctgctgatgaccctgcggctgtggtccagccgcgccaagagaagcggatctggcgtgaagcagaccctgaatttcgacctgctgaagctggctggcgacgtggaatccaacccaggcccttctagaggcgggatccacaccatggctacctacgaggtgctgtgcgaggtggcaagaaagctgggcaccgacgacagagaagtggtgctgttcctgctgaacgtgttcatccctcagcctacactggcccagctgatcggtgcactgagagccctgaaagaggaaggccggctgacctttcctctgctggccgaatgcctgttcagagccggaagaagggatctgctgcgggacctgctgcatctggaccccagatttctggaaagacacctggccggcaccatgagctacttcagcccttaccagctgaccgtgctgcacgttgacggcgaactgtgcgccagagatattcggagcctgatcttcctgagcaaggacaccatcggcagccggtctacccctcagacatttctgcactgggtgtactgcatggaaaacctggacctgctcggccccacagatgtggatgccctgatgtccatgctgagaagcctgagcagagtggacctccagagacaggtgcagacactgatgggactgcacctgagcggacctagccacagccagcactacagacacacccct

SEQ ID NO: 7131 - DNA, 1899 bp, Artificial Sequence
  Synthetic Polynucloetide
atggccttaccagtgaccgccttgctcctgccgctggccttgctgctccacgccgccaggccggaagtgcagctggttgaatctggcggaggactggttcaggctggcggatctctgagactgtcttgtgccgccagcggcagaacctttagcatgggctggtttagacaggcccctggcaaagagagagagttcgtcgccgccatcacatactctggcggcagcccttactacgccgactctgtgaagggcagattcaccatcagccgggacaacgccaagaacaccgtgtacctccagatgaacagcctgaagcctgaggacaccgccgtgtactactgcgccgccaatccaacatacggcagcgactggaacgccgagaattggggccagggaacccaagtgacagtgtctagcctcgagatccagaaccctgatcctgccgtgtaccagctgcgggatagcaagagcagcgacaagagcgtgtgtctgttcaccgacttcgacagccagaccaacgtgtcccagagcaaggactccgacgtgtacatcaccgataagtgcgtgctggacatgcggagcatggacttcaagagcaactccgccgtggcctggtccaacaagtccgatttcgcctgcgccaacgccttcaacaacagcattatccccgaggacacattcttcccaagccccgagagcagctgcgacgtgaagctggtggaaaagagcttcgagacagacaccaacctgaacttccagaacctgagcgtgatcggcttcagaatcctgctgctgaaagtggccggctttaacctgctgatgaccctgcggctgtggtccagccgcgccaagagaagcggatctggcgtgaagcagaccctgaatttcgacctgctgaagctggctggcgacgtggaatccaacccaggccctactagtatggactggatttggcgcatccttttccttgtcggcgctgctaccggcgcgcattccttcgaacaactgcaactgcaagagtctggccctggcctggtcaagccttctgaaaccctgagcctgacctgtaccgtgtccggcggctctatcagcagcggcgattactactggggctggatcagacagcctccaggcaagggactcgaatggatcggcagcatcagctacagcggctccacctactacaacccaagcctgaagtccagagtgaccatcagcgtggacaccagcagaaaccagttctccctgaagctgagcagcgtgacagccgccgatacagccgtgtattattgcaccagagaggacagcagcaactggcggagtagaggacagggcacactggtcacagtgtcctctacgcgtgaggacctgaagaacgtgttcccacctgaggtggccgtgttcgagcctagcgaggccgagatcagccacacccagaaagccaccctcgtgtgcctggctaccggcttctaccccgaccatgtggaactgtcttggtgggtcaacggcaaagaggtgcacagcggcgtgtgtaccgacccccagccactgaaagaacagcccgccctgaacgacagccggtactgcctgagcagcagactgagagtgtccgccaccttctggcagaacccccggaaccacttcagatgccaggtgcagttctacggcctgagcgagaacgacgagtggacccaggacagagccaagcccgtgacccagatcgtgtctgccgaagcctggggcagagccgattgcggctttaccagcgagagctaccagcagggcgtgctgagcgccaccatcctgtacgagatcctgctgggcaaggccaccctgtacgccgtgctggtgtctgccctggtgctgatggctatggtcaagcggaaggacagccgggga

SEQ ID NO: 7132 - DNA, 2565 bp, Artificial Sequence
  Synthetic Polynucloetide
atggccttaccagtgaccgccttgctcctgccgctggccttgctgctccacgccgccaggccggaagtgcagctggttgaatctggcggaggactggttcaggctggcggatctctgagactgtcttgtgccgccagcggcagaacctttagcatgggctggtttagacaggcccctggcaaagagagagagttcgtcgccgccatcacatactctggcggcagcccttactacgccgactctgtgaagggcagattcaccatcagccgggacaacgccaagaacaccgtgtacctccagatgaacagcctgaagcctgaggacaccgccgtgtactactgcgccgccaatccaacatacggcagcgactggaacgccgagaattggggccagggaacccaagtgacagtgtctagcctcgagatccagaaccctgatcctgccgtgtaccagctgcgggatagcaagagcagcgacaagagcgtgtgtctgttcaccgacttcgacagccagaccaacgtgtcccagagcaaggactccgacgtgtacatcaccgataagtgcgtgctggacatgcggagcatggacttcaagagcaactccgccgtggcctggtccaacaagtccgatttcgcctgcgccaacgccttcaacaacagcattatccccgaggacacattcttcccaagccccgagagcagctgcgacgtgaagctggtggaaaagagcttcgagacagacaccaacctgaacttccagaacctgagcgtgatcggcttcagaatcctgctgctgaaagtggccggctttaacctgctgatgaccctgcggctgtggtccagccgcgccaagagaagcggatctggcgtgaagcagaccctgaatttcgacctgctgaagctggctggcgacgtggaatccaacccaggccctactagtatggactggatttggcgcatccttttccttgtcggcgctgctaccggcgcgcattccttcgaacaactgcaactgcaagagtctggccctggcctggtcaagccttctgaaaccctgagcctgacctgtaccgtgtccggcggctctatcagcagcggcgattactactggggctggatcagacagcctccaggcaagggactcgaatggatcggcagcatcagctacagcggctccacctactacaacccaagcctgaagtccagagtgaccatcagcgtggacaccagcagaaaccagttctccctgaagctgagcagcgtgacagccgccgatacagccgtgtattattgcaccagagaggacagcagcaactggcggagtagaggacagggcacactggtcacagtgtcctctacgcgtgaggacctgaagaacgtgttcccacctgaggtggccgtgttcgagcctagcgaggccgagatcagccacacccagaaagccaccctcgtgtgcctggctaccggcttctaccccgaccatgtggaactgtcttggtgggtcaacggcaaagaggtgcacagcggcgtgtgtaccgacccccagccactgaaagaacagcccgccctgaacgacagccggtactgcctgagcagcagactgagagtgtccgccaccttctggcagaacccccggaaccacttcagatgccaggtgcagttctacggcctgagcgagaacgacgagtggacccaggacagagccaagcccgtgacccagatcgtgtctgccgaagcctggggcagagccgattgcggctttaccagcgagagctaccagcagggcgtgctgagcgccaccatcctgtacgagatcctgctgggcaaggccaccctgtacgccgtgctggtgtctgccctggtgctgatggctatggtcaagcggaaggacagccggggaagggccaagcgatctggatctggagcaacaaacttctcactactcaaacaagcaggtgacgtggaggagaatcccgggccttctagaggcgggatccacaccatggctacctacgaggtgctgtgcgaggtggcaagaaagctgggcaccgacgacagagaagtggtgctgttcctgctgaacgtgttcatccctcagcctacactggcccagctgatcggtgcactgagagccctgaaagaggaaggccggctgacctttcctctgctggccgaatgcctgttcagagccggaagaagggatctgctgcgggacctgctgcatctggaccccagatttctggaaagacacctggccggcaccatgagctacttcagcccttaccagctgaccgtgctgcacgttgacggcgaactgtgcgccagagatattcggagcctgatcttcctgagcaaggacaccatcggcagccggtctacccctcagacatttctgcactgggtgtactgcatggaaaacctggacctgctcggccccacagatgtggatgccctgatgtccatgctgagaagcctgagcagagtggacctccagagacaggtgcagacactgatgggactgcacctgagcggacctagccacagccagcactacagacacacccct

SEQ ID NO: 7133 - DNA, 2709 bp, Artificial Sequence
  Synthetic Polynucloetide
atggccttaccagtgaccgccttgctcctgccgctggccttgctgctccacgccgccaggccgctcgaggggaaaccaattcccaaccctcttctgggactggattcaaccggcagcggcgaggacctgaagaacgtgttcccacctgaggtggccgtgttcgagcctagcaaggccgagatcgcccacacccagaaagccaccctcgtgtgcctggctaccggcttctaccccgaccatgtggaactgtcttggtgggtcaacggcaaagaggtgcacagcggcgtgtgtaccgacccccagccactgaaagaacagcccgccctgaacgacagccggtactgcctgagcagcagactgagagtgtccgccaccttctggcagaacccccggaaccacttcagatgccaggtgcagttctacggcctgagcgagaacgacgagtggacccaggacagagccaagcccgtgacccagatcgtgtctgccgaagcctggggcagagccgattgcggcatcaccagcgccagctaccaccagggcgtgctgagcgccaccatcctgtacgagatcctgctgggcaaggccaccctgtacgccgtgctggtgtctgccctggtgctgatggctatggtcaagcggaaggacagccggggaagggccaagcgatctggatctggagcaacaaacttctcactactcaaacaagcaggtgacgtggaggagaatcccgggcctactagcatggccttaccagtgaccgccttgctcctgccgctggccttgctgctccacgccgccaggccggaagtgcagctggttgaatctggcggaggactggttcaggctggcggatctctgagactgtcttgtgccgccagcggcagaacctttagcatgggctggtttagacaggcccctggcaaagagagagagttcgtcgccgccatcacatactctggcggcagcccttactacgccgactctgtgaagggcagattcaccatcagccgggacaacgccaagaacaccgtgtacctccagatgaacagcctgaagcctgaggacaccgccgtgtactactgcgccgccaatccaacatacggcagcgactggaacgccgagaattggggccagggaacccaagtgacagtgtctagcctcgagagcggcggaggcggatctttcgaacaactgcaactgcaagagtctggccctggcctggtcaagccttctgaaaccctgagcctgacctgtaccgtgtccggcggctctatcagcagcggcgattactactggggctggatcagacagcctccaggcaagggactcgaatggatcggcagcatcagctacagcggctccacctactacaacccaagcctgaagtccagagtgaccatcagcgtggacaccagcagaaaccagttctccctgaagctgagcagcgtgacagccgccgatacagccgtgtattattgcaccagagaggacagcagcaactggcggagtagaggacagggcacactggtcacagtgtcctctacgcgtgagcagaaactgatctcggaagaggatgggagcggcatccagaaccctgatcctgccgtgtaccagctgcgggatagcaagagcagcgacaagagcgtgtgtctgttcaccgacttcgacagccagaccaacgtgtcccagagcaaggactccgacgtgtacatcaccgataagtgcgtgctggacatgcggagcatggacttcaagagcaactccgccgtggcctggtccaacaagtccgatttcgcctgcgccaacgccttcaacaacagcattatccccgaggacacattcttcccaagcagcgacgtgccctgcgacgtgaagctggtggaaaagagcttcgagacagacaccaacctgaacttccagaacctgagcgtgatcggcttcagaatcctgctgctgaaagtggccggctttaacctgctgatgaccctgcggctgtggtccagccgcgccaagagaagcggatctggcgtgaagcagaccctgaatttcgacctgctgaagctggctggcgacgtggaatccaacccaggcccttctagaggccatatgaccgagtacaagcccacggtgcgcctcgccacccgcgacgacgtccccagggccgtacgcaccctcgccgccgcgttcgccgactaccccgccacgcgccacaccgtcgatccggaccgccacatcgagcgggtcaccgagctgcaagaactcttcctcacgcgcgtcgggctcgacatcggcaaggtgtgggtcgcggacgacggcgccgcggtggcggtctggaccacgccggagagcgtcgaagcgggggcggtgttcgccgagatcggcccgcgcatggccgagttgagcggttcccggctggccgcgcagcaacagatggaaggcctcctggcgccgcaccggcccaaggagcccgcgtggttcctggccaccgtcggcgtctcgcccgaccaccagggcaagggtctgggcagcgccgtcgtgctccccggagtggaggcggccgagcgcgccggggtgcccgccttcctggagacctccgcgccccgcaacctccccttctacgagcggctcggcttcaccgtcaccgccgacgtcgaggtgcccgaaggaccgcgcacctggtgcatgacccgcaagcccggtgcctga

SEQ ID NO: 7134 - DNA, 2712 bp, Artificial Sequence
  Synthetic Polynucloetide
atggccttaccagtgaccgccttgctcctgccgctggccttgctgctccacgccgccaggccgctcgagcagaaactgatctcggaagaggatctgggctccggcgatcgccctgatcctgccgtgtaccagctgcgggatagcaagagcagcgacaagagcgtgtgtctgttcaccgacttcgacagccagaccaacgtgtcccagagcaaggactccgacgtgtacatcaccgataagtgcgtgctggacatgcggagcatggacttcaagagcaactccgccgtggcctggtccaacaagtccgatttcgcctgcgccaacgccttcaacaacagcattatccccgaggacacattcttcccaagccccgagagcagctgcgacgtgaagctggtggaaaagagcttcgagacagacaccaacctgaacttccagaacctgagcgtgatcggcttcagaatcctgctgctgaaagtggccggctttaacctgctgatgaccctgcggctgtggtccagctctagtcgcgccaagagaagcggatctggcgtgaagcagaccctgaatttcgacctgctgaagctggctggcgacgtggaatccaacccaggccccactagcatggccttaccagtgaccgccttgctcctgccgctggccttgctgctccacgccgccaggccggaagtgcagctggttgaatctggcggaggactggttcaggctggcggatctctgagactgtcttgtgccgccagcggcagaacctttagcatgggctggtttagacaggcccctggcaaagagagagagttcgtcgccgccatcacatactctggcggcagcccttactacgccgactctgtgaagggcagattcaccatcagccgggacaacgccaagaacaccgtgtacctccagatgaacagcctgaagcctgaggacaccgccgtgtactactgcgccgccaatccaacatacggcagcgactggaacgccgagaattggggccagggaacccaagtgacagtgtctagcctcgagagcggcggaggcggatctttcgaacaactgcaactgcaagagtctggccctggcctggtcaagccttctgaaaccctgagcctgacctgtaccgtgtccggcggctctatcagcagcggcgattactactggggctggatcagacagcctccaggcaagggactcgaatggatcggcagcatcagctacagcggctccacctactacaacccaagcctgaagtccagagtgaccatcagcgtggacaccagcagaaaccagttctccctgaagctgagcagcgtgacagccgccgatacagccgtgtattattgcaccagagaggacagcagcaactggcggagtagaggacagggcacactggtcacagtgtcctctacgcgtgggaaaccaattcccaaccctcttctgggactggattcaaccggcagcggcgaggacctgaagaacgtgttcccacctgaggtggccgtgttcgagcctagcgaggccgagatcagccacacccagaaagccaccctcgtgtgcctggctaccggcttctaccccgaccatgtggaactgtcttggtgggtcaacggcaaagaggtgcacagcggcgtgtgtaccgacccccagccactgaaagaacagcccgccctgaacgacagccggtactgcctgagcagcagactgagagtgtccgccaccttctggcagaacccccggaaccacttcagatgccaggtgcagttctacggcctgagcgagaacgacgagtggacccaggacagagccaagcccgtgacccagatcgtgtctgccgaagcctggggcagagccgattgcggctttaccagcgagagctaccagcagggcgtgctgagcgccaccatcctgtacgagatcctgctgggcaaggccaccctgtacgccgtgctggtgtctgccctggtgctgatggctatggtcaagcggaaggacagccggggaagggccaagcgatctggatctggagcaacaaacttctcactactcaaacaagcaggtgacgtggaggagaatcccgggccttctagaggccatatgaccgagtacaagcccacggtgcgcctcgccacccgcgacgacgtccccagggccgtacgcaccctcgccgccgcgttcgccgactaccccgccacgcgccacaccgtcgatccggaccgccacatcgagcgggtcaccgagctgcaagaactcttcctcacgcgcgtcgggctcgacatcggcaaggtgtgggtcgcggacgacggcgccgcggtggcggtctggaccacgccggagagcgtcgaagcgggggcggtgttcgccgagatcggcccgcgcatggccgagttgagcggttcccggctggccgcgcagcaacagatggaaggcctcctggcgccgcaccggcccaaggagcccgcgtggttcctggccaccgtcggcgtctcgcccgaccaccagggcaagggtctgggcagcgccgtcgtgctccccggagtggaggcggccgagcgcgccggggtgcccgccttcctggagacctccgcgccccgcaacctccccttctacgagcggctcggcttcaccgtcaccgccgacgtcgaggtgcccgaaggaccgcgcacctggtgcatgacccgcaagcccggtgcctga

SEQ ID NO: 7135 - DNA, 2589 bp, Artificial Sequence
  Synthetic Polynucloetide
atggccttaccagtgaccgccttgctcctgccgctggccttgctgctccacgccgccaggccggaagtgcagctggttgaatctggcggaggactggttcaggctggcggatctctgagactgtcttgtgccgccagcggcagaacctttagcatgggctggtttagacaggcccctggcaaagagagagagttcgtcgccgccatcacatactctggcggcagcccttactacgccgactctgtgaagggcagattcaccatcagccgggacaacgccaagaacaccgtgtacctccagatgaacagcctgaagcctgaggacaccgccgtgtactactgcgccgccaatccaacatacggcagcgactggaacgccgagaattggggccagggaacccaagtgacagtgtctagcctcgaggacctgaagaacgtgttcccacctgaggtggccgtgttcgagcctagcgaggccgagatcagccacacccagaaagccaccctcgtgtgcctggctaccggcttctaccccgaccatgtggaactgtcttggtgggtcaacggcaaagaggtgcacagcggcgtgtctaccgacccccagccactgaaagaacagcccgccctgaacgacagccggtactgcctgagcagcagactgagagtgtccgccaccttctggcagaacccccggaaccacttcagatgccaggtgcagttctacggcctgagcgagaacgacgagtggacccaggacagagccaagcccgtgacccagatcgtgtctgccgaagcctggggcagagccgattgcggctttaccagcgagagctaccagcagggcgtgctgagcgccaccatcctgtacgagatcctgctgggcaaggccaccctgtacgccgtgctggtgtctgccctggtgctgatggctatggtcaagcggaaggacagccggggaagggccaagcgatctggatctggagcaacaaacttctcactactcaaacaagcaggtgacgtggaggagaatcccgggcctactagtatggactggatttggcgcatccttttccttgtcggcgctgctaccggcgcgcattccttcgaacaactgcaactgcaagagtctggccctggcctggtcaagccttctgaaaccctgagcctgacctgtaccgtgtccggcggctctatcagcagcggcgattactactggggctggatcagacagcctccaggcaagggactcgaatggatcggcagcatcagctacagcggctccacctactacaacccaagcctgaagtccagagtgaccatcagcgtggacaccagcagaaaccagttctccctgaagctgagcagcgtgacagccgccgatacagccgtgtattattgcaccagagaggacagcagcaactggcggagtagaggacagggcacactggtcacagtgtcctctacgcgtatccagaaccctgatcctgccgtgtaccagctgcgggatagcaagagcagcgacaagagcgtgtgtctgttcaccgacttcgacagccagaccaacgtgtcccagagcaaggactccgacgtgtacatcaccgataagaccgtgctggacatgcggagcatggacttcaagagcaactccgccgtggcctggtccaacaagtccgatttcgcctgcgccaacgccttcaacaacagcattatccccgaggacacattcttcccaagccccgagagcagctgcgacgtgaagctggtggaaaagagcttcgagacagacaccaacctgaacttccagaacctgagcgtgatcggcttcagaatcctgctgctgaaagtggccggctttaacctgctgatgaccctgcggctgtggtccagccgcgccaagagaagcggatctggcgtgaagcagaccctgaatttcgacctgctgaagctggctggcgacgtggaatccaacccaggcccttctagaggccatatgaccgagtacaagcccacggtgcgcctcgccacccgcgacgacgtccccagggccgtacgcaccctcgccgccgcgttcgccgactaccccgccacgcgccacaccgtcgatccggaccgccacatcgagcgggtcaccgagctgcaagaactcttcctcacgcgcgtcgggctcgacatcggcaaggtgtgggtcgcggacgacggcgccgcggtggcggtctggaccacgccggagagcgtcgaagcgggggcggtgttcgccgagatcggcccgcgcatggccgagttgagcggttcccggctggccgcgcagcaacagatggaaggcctcctggcgccgcaccggcccaaggagcccgcgtggttcctggccaccgtcggcgtctcgcccgaccaccagggcaagggtctgggcagcgccgtcgtgctccccggagtggaggcggccgagcgcgccggggtgcccgccttcctggagacctccgcgccccgcaacctccccttctacgagcggctcggcttcaccgtcaccgccgacgtcgaggtgcccgaaggaccgcgcacctggtgcatgacccgcaagcccggtgcctga

SEQ ID NO: 7136 - DNA, 2835 bp, Artificial Sequence
  Synthetic Polynucloetide
atggccttaccagtgaccgccttgctcctgccgctggccttgctgctccacgccgccaggccggaagtgcagctggttgaatctggcggaggactggttcaggctggcggatctctgagactgtcttgtgccgccagcggcagaacctttagcatgggctggtttagacaggcccctggcaaagagagagagttcgtcgccgccatcacatactctggcggcagcccttactacgccgactctgtgaagggcagattcaccatcagccgggacaacgccaagaacaccgtgtacctccagatgaacagcctgaagcctgaggacaccgccgtgtactactgcgccgccaatccaacatacggcagcgactggaacgccgagaattggggccagggaacccaagtgacagtgtctagcctcgaggacctgaagaacgtgttcccacctgaggtggccgtgttcgagcctagcgaggccgagatcagccacacccagaaagccaccctcgtgtgcctggctaccggcttctaccccgaccatgtggaactgtcttggtgggtcaacggcaaagaggtgcacagcggcgtgtctaccgacccccagccactgaaagaacagcccgccctgaacgacagccggtactgcctgagcagcagactgagagtgtccgccaccttctggcagaacccccggaaccacttcagatgccaggtgcagttctacggcctgagcgagaacgacgagtggacccaggacagagccaagcccgtgacccagatcgtgtctgccgaagcctggggcagagccgattgcggctttaccagcgagagctaccagcagggcgtgctgagcgccaccatcctgtacgagatcctgctgggcaaggccaccctgtacgccgtgctggtgtctgccctggtgctgatggctatggtcaagcggaaggacagccggggaagggccaagcgatctggatctggagcaacaaacttctcactactcaaacaagcaggtgacgtggaggagaatcccgggcctactagtatggactggatttggcgcatccttttccttgtcggcgctgctaccggcgcgcattccttcgaacaactgcaactgcaagagtctggccctggcctggtcaagccttctgaaaccctgagcctgacctgtaccgtgtccggcggctctatcagcagcggcgattactactggggctggatcagacagcctccaggcaagggactcgaatggatcggcagcatcagctacagcggctccacctactacaacccaagcctgaagtccagagtgaccatcagcgtggacaccagcagaaaccagttctccctgaagctgagcagcgtgacagccgccgatacagccgtgtattattgcaccagagaggacagcagcaactggcggagtagaggacagggcacactggtcacagtgtcctctacgcgtgagcagaaactgatctcggaagaggatgggagcggcaccccattcccttctctggcccctcccatcatgctgctggtggacggcaagcagcagatggtggtcgtgtgcctggtgctggatgtggccccacctggactggacagccccatctggtttagcgccggcaatggctctgccctggacgcctttacctacggcccaagccctgccaccgatggcacctggacaaatctggcccacctgagcctgcccagcgaggaactggcttcttgggagcctctcgtgtgccacacaggacctggcgctgagggacacagcagatccacccagcctatgcacctgtctggcgaggccagcaccgccagaacctgtcctcaggaacctctgagaggcacccctggcggagcactgtggctgggagtgctgagactgctgctgttcaagctgctgctgtttgacctgctgctgacctgctcctgtctgtgcgatcctgccggccctctgccttctcctgccaccaccacaagactgagagccctgggcagccacagactgcaccctgccacagagacaggcggcagagaggccacaagcagccctagaccccagcccagagacagaagatggggcgataccccccctggcagaaagcctggatctccagtccgcgccaagagaagcggatctggcgtgaagcagaccctgaatttcgacctgctgaagctggctggcgacgtggaatccaacccaggcccttctagaggccatatgaccgagtacaagcccacggtgcgcctcgccacccgcgacgacgtccccagggccgtacgcaccctcgccgccgcgttcgccgactaccccgccacgcgccacaccgtcgatccggaccgccacatcgagcgggtcaccgagctgcaagaactcttcctcacgcgcgtcgggctcgacatcggcaaggtgtgggtcgcggacgacggcgccgcggtggcggtctggaccacgccggagagcgtcgaagcgggggcggtgttcgccgagatcggcccgcgcatggccgagttgagcggttcccggctggccgcgcagcaacagatggaaggcctcctggcgccgcaccggcccaaggagcccgcgtggttcctggccaccgtcggcgtctcgcccgaccaccagggcaagggtctgggcagcgccgtcgtgctccccggagtggaggcggccgagcgcgccggggtgcccgccttcctggagacctccgcgccccgcaacctccccttctacgagcggctcggcttcaccgtcaccgccgacgtcgaggtgcccgaaggaccgcgcacctggtgcatgacccgcaagcccggtgcctga

SEQ ID NO: 7137 - DNA, 2874 bp, Artificial Sequence
  Synthetic Polynucloetide
atggccttaccagtgaccgccttgctcctgccgctggccttgctgctccacgccgccaggccgctcgaggacctgaagaacgtgttcccacctgaggtggccgtgttcgagcctagcgaggccgagatcagccacacccagaaagccaccctcgtgtgcctggctaccggcttctaccccgaccatgtggaactgtcttggtgggtcaacggcaaagaggtgcacagcggcgtgtctaccgacccccagccactgaaagaacagcccgccctgaacgacagccggtactgcctgagcagcagactgagagtgtccgccaccttctggcagaacccccggaaccacttcagatgccaggtgcagttctacggcctgagcgagaacgacgagtggacccaggacagagccaagcccgtgacccagatcgtgtctgccgaagcctggggcagagccgattgcggctttaccagcgagagctaccagcagggcgtgctgagcgccaccatcctgtacgagatcctgctgggcaaggccaccctgtacgccgtgctggtgtctgccctggtgctgatggctatggtcaagcggaaggacagccggggaagggccaagcgatctggatctggagcaacaaacttctcactactcaaacaagcaggtgacgtggaggagaatcccgggcctactagcatggccttaccagtgaccgccttgctcctgccgctggccttgctgctccacgccgccaggccggaagtgcagctggttgaatctggcggaggactggttcaggctggcggatctctgagactgtcttgtgccgccagcggcagaacctttagcatgggctggtttagacaggcccctggcaaagagagagagttcgtcgccgccatcacatactctggcggcagcccttactacgccgactctgtgaagggcagattcaccatcagccgggacaacgccaagaacaccgtgtacctccagatgaacagcctgaagcctgaggacaccgccgtgtactactgcgccgccaatccaacatacggcagcgactggaacgccgagaattggggccagggaacccaagtgacagtgtctagcctcgagagcggcggaggcggatctttcgaacaactgcaactgcaagagtctggccctggcctggtcaagccttctgaaaccctgagcctgacctgtaccgtgtccggcggctctatcagcagcggcgattactactggggctggatcagacagcctccaggcaagggactcgaatggatcggcagcatcagctacagcggctccacctactacaacccaagcctgaagtccagagtgaccatcagcgtggacaccagcagaaaccagttctccctgaagctgagcagcgtgacagccgccgatacagccgtgtattattgcaccagagaggacagcagcaactggcggagtagaggacagggcacactggtcacagtgtcctctacgcgtgagcagaaactgatctcggaagaggatctggggagcggcaccccattcccttctctggcccctcccatcatgctgctggtggacggcaagcagcagatggtggtcgtgtgcctggtgctggatgtggccccacctggactggacagccccatctggtttagcgccggcaatggctctgccctggacgcctttacctacggcccaagccctgccaccgatggcacctggacaaatctggcccacctgagcctgcccagcgaggaactggcttcttgggagcctctcgtgtgccacacaggacctggcgctgagggacacagcagatccacccagcctatgcacctgtctggcgaggccagcaccgccagaacctgtcctcaggaacctctgagaggcacccctggcggagcactgtggctgggagtgctgagactgctgctgttcaagctgctgctgtttgacctgctgctgacctgctcctgtctgtgcgatcctgccggccctctgccttctcctgccaccaccacaagactgagagccctgggcagccacagactgcaccctgccacagagacaggcggcagagaggccacaagcagccctagaccccagcccagagacagaagatggggcgataccccccctggcagaaagcctggatctccagtccgcgccaagagaagcggatctggcgtgaagcagaccctgaatttcgacctgctgaagctggctggcgacgtggaatccaacccaggcccttctagatctagaggccatatgaccgagtacaagcccacggtgcgcctcgccacccgcgacgacgtccccagggccgtacgcaccctcgccgccgcgttcgccgactaccccgccacgcgccacaccgtcgatccggaccgccacatcgagcgggtcaccgagctgcaagaactcttcctcacgcgcgtcgggctcgacatcggcaaggtgtgggtcgcggacgacggcgccgcggtggcggtctggaccacgccggagagcgtcgaagcgggggcggtgttcgccgagatcggcccgcgcatggccgagttgagcggttcccggctggccgcgcagcaacagatggaaggcctcctggcgccgcaccggcccaaggagcccgcgtggttcctggccaccgtcggcgtctcgcccgaccaccagggcaagggtctgggcagcgccgtcgtgctccccggagtggaggcggccgagcgcgccggggtgcccgccttcctggagacctccgcgccccgcaacctccccttctacgagcggctcggcttcaccgtcaccgccgacgtcgaggtgcccgaaggaccgcgcacctggtgcatgacccgcaagcccggtgcctga

SEQ ID NO: 7138 - DNA, 2700 bp, Artificial Sequence
  Synthetic Polynucloetide
atggccttaccagtgaccgccttgctcctgccgctggccttgctgctccacgccgccaggccggaagtgcagctggttgaatctggcggaggactggttcaggctggcggatctctgagactgtcttgtgccgccagcggcagaacctttagcatgggctggtttagacaggcccctggcaaagagagagagttcgtcgccgccatcacatactctggcggcagcccttactacgccgactctgtgaagggcagattcaccatcagccgggacaacgccaagaacaccgtgtacctccagatgaacagcctgaagcctgaggacaccgccgtgtactactgcgccgccaatccaacatacggcagcgactggaacgccgagaattggggccagggaacccaagtgacagtgtctagcctcgaggggaaaccaattcccaaccctcttctgggactggattcaaccggcagcggcgacaagcagctggacgccgacgtgtcccccaagcctaccatcttcctgccctctatcgccgagacaaagctccagaaggccggcacctacctgtgcctgctggaaaagttcttcccagatgtgattaagatccactggcaggaaaagaagtccaacaccatcctgggcagccaggaaggcaacaccatgaagaccaacgacacctacatgaagttcagctggctgaccgtgcccgagaagtccctggacaaagaacacagatgcatcgtgcggcacgaaaacaacaagaacggcgtggaccaggaaatcatcttcccacccatcaagaccgatgtgattacaatggaccccaaggacaactgctccaaggacgccaacgataccctgctgctccagctgaccaacaccagcgcctactacatgtacttgttgctgctgctgaagtccgtggtgtacttcgccatcatcacatgctgcctgctgcggagaaccgccttctgctgcaacggcgagaagtctagggccaagcgatctggatctggagcaacaaacttctcactactcaaacaagcaggtgacgtggaggagaatcccgggcctactagtatggactggatttggcgcatccttttccttgtcggcgctgctaccggcgcgcattccttcgaacaactgcaactgcaagagtctggccctggcctggtcaagccttctgaaaccctgagcctgacctgtaccgtgtccggcggctctatcagcagcggcgattactactggggctggatcagacagcctccaggcaagggactcgaatggatcggcagcatcagctacagcggctccacctactacaacccaagcctgaagtccagagtgaccatcagcgtggacaccagcagaaaccagttctccctgaagctgagcagcgtgacagccgccgatacagccgtgtattattgcaccagagaggacagcagcaactggcggagtagaggacagggcacactggtcacagtgtcctctacgcgtgagcagaaactgatctcggaagaggatgggagcggcagccagcctcacaccaagcccagcgtgttcgtgatgaagaacggcaccaacgtggcctgcctcgtgaaagagttctaccccaaggacatcaggatcaacctggtgtccagcaagaagatcaccgagttcgaccccgccatcgtgatctcccccagcggcaagtacaacgccgtgaagctggggaagtacgaggacagcaacagcgtgacctgctccgtgcagcacgacaacaagaccgtgcacagcaccgactttgaagtgaaaaccgactccaccgaccacgtgaagcccaaagagacagagaacaccaagcagcccagcaagagctgccacaagcccaaggccatcgtgcacaccgagaaagtgaacatgatgagcctgaccgtgctgggcctgcggatgctgttcgccaaaaccgtggccgtgaacttcctgctgaccgccaagctgttcttcctccgcgccaagagaagcggatctggcgtgaagcagaccctgaatttcgacctgctgaagctggctggcgacgtggaatccaacccaggcccttctagaggccatatgaccgagtacaagcccacggtgcgcctcgccacccgcgacgacgtccccagggccgtacgcaccctcgccgccgcgttcgccgactaccccgccacgcgccacaccgtcgatccggaccgccacatcgagcgggtcaccgagctgcaagaactcttcctcacgcgcgtcgggctcgacatcggcaaggtgtgggtcgcggacgacggcgccgcggtggcggtctggaccacgccggagagcgtcgaagcgggggcggtgttcgccgagatcggcccgcgcatggccgagttgagcggttcccggctggccgcgcagcaacagatggaaggcctcctggcgccgcaccggcccaaggagcccgcgtggttcctggccaccgtcggcgtctcgcccgaccaccagggcaagggtctgggcagcgccgtcgtgctccccggagtggaggcggccgagcgcgccggggtgcccgccttcctggagacctccgcgccccgcaacctccccttctacgagcggctcggcttcaccgtcaccgccgacgtcgaggtgcccgaaggaccgcgcacctggtgcatgacccgcaagcccggtgcctga

SEQ ID NO: 7139 - DNA, 1911 bp, Artificial Sequence
  Synthetic Polynucloetide
atggccttaccagtgaccgccttgctcctgccgctggccttgctgctccacgccgccaggccggaagtgcagctggttgaatctggcggaggactggttcaggctggcggatctctgagactgtcttgtgccgccagcggcagaacctttagcatgggctggtttagacaggcccctggcaaagagagagagttcgtcgccgccatcacatactctggcggcagcccttactacgccgactctgtgaagggcagattcaccatcagccgggacaacgccaagaacaccgtgtacctccagatgaacagcctgaagcctgaggacaccgccgtgtactactgcgccgccaatccaacatacggcagcgactggaacgccgagaattggggccagggaacccaagtgacagtgtctagcctcgagagccagcctcacaccaagcccagcgtgttcgtgatgaagaacggcaccaacgtggcctgcctcgtgaaagagttctaccccaaggacatcaggatcaacctggtgtccagcaagaagatcaccgagttcgaccccgccatcgtgatctcccccagcggcaagtacaacgccgtgaagctggggaagtacgaggacagcaacagcgtgacctgctccgtgcagcacgacaacaagaccgtgcacagcaccgactttgaagtgaaaaccgactccaccgaccacgtgaagcccaaagagacagagaacaccaagcagcccagcaagagctgccacaagcccaaggccatcgtgcacaccgagaaagtgaacatgatgagcctgaccgtgctgggcctgcggatgctgttcgccaaaaccgtggccgtgaacttcctgctgaccgccaagctgttcttcctcagggccaagcgatctggatctggagcaacaaacttctcactactcaaacaagcaggtgacgtggaggagaatcccgggcctactagtatggactggatttggcgcatccttttccttgtcggcgctgctaccggcgcgcattccttcgaacaactgcaactgcaagagtctggccctggcctggtcaagccttctgaaaccctgagcctgacctgtaccgtgtccggcggctctatcagcagcggcgattactactggggctggatcagacagcctccaggcaagggactcgaatggatcggcagcatcagctacagcggctccacctactacaacccaagcctgaagtccagagtgaccatcagcgtggacaccagcagaaaccagttctccctgaagctgagcagcgtgacagccgccgatacagccgtgtattattgcaccagagaggacagcagcaactggcggagtagaggacagggcacactggtcacagtgtcctctacgcgtgacaagcagctggacgccgacgtgtcccccaagcctaccatcttcctgccctctatcgccgagacaaagctccagaaggccggcacctacctgtgcctgctggaaaagttcttcccagatgtgattaagatccactggcaggaaaagaagtccaacaccatcctgggcagccaggaaggcaacaccatgaagaccaacgacacctacatgaagttcagctggctgaccgtgcccgagaagtccctggacaaagaacacagatgcatcgtgcggcacgaaaacaacaagaacggcgtggaccaggaaatcatcttcccacccatcaagaccgatgtgattacaatggaccccaaggacaactgctccaaggacgccaacgataccctgctgctccagctgaccaacaccagcgcctactacatgtacttgttgctgctgctgaagtccgtggtgtacttcgccatcatcacatgctgcctgctgcggagaaccgccttctgctgcaacggcgagaagtct

SEQ ID NO: 7140 - DNA, 2730 bp, Artificial Sequence
  Synthetic Polynucloetide
atggccttaccagtgaccgccttgctcctgccgctggccttgctgctccacgccgccaggccgctcgaggggaaaccaattcccaaccctcttctgggactggattcaaccggcagcggcgacaagcagctggacgccgacgtgtcccccaagcctaccatcttcctgccctctatcgccgagacaaagctccagaaggccggcacctacctgtgcctgctggaaaagttcttcccagatgtgattaagatccactggcaggaaaagaagtccaacaccatcctgggcagccaggaaggcaacaccatgaagaccaacgacacctacatgaagttcagctggctgaccgtgcccgagaagtccctggacaaagaacacagatgcatcgtgcggcacgaaaacaacaagaacggcgtggaccaggaaatcatcttcccacccatcaagaccgatgtgattacaatggaccccaaggacaactgctccaaggacgccaacgataccctgctgctccagctgaccaacaccagcgcctactacatgtacttgttgctgctgctgaagtccgtggtgtacttcgccatcatcacatgctgcctgctgcggagaaccgccttctgctgcaacggcgagaagtctagggccaagcgatctggatctggagcaacaaacttctcactactcaaacaagcaggtgacgtggaggagaatcccgggcctactagcatggccttaccagtgaccgccttgctcctgccgctggccttgctgctccacgccgccaggccggaagtgcagctggttgaatctggcggaggactggttcaggctggcggatctctgagactgtcttgtgccgccagcggcagaacctttagcatgggctggtttagacaggcccctggcaaagagagagagttcgtcgccgccatcacatactctggcggcagcccttactacgccgactctgtgaagggcagattcaccatcagccgggacaacgccaagaacaccgtgtacctccagatgaacagcctgaagcctgaggacaccgccgtgtactactgcgccgccaatccaacatacggcagcgactggaacgccgagaattggggccagggaacccaagtgacagtgtctagcctcgagagcggcggaggcggatctttcgaacaactgcaactgcaagagtctggccctggcctggtcaagccttctgaaaccctgagcctgacctgtaccgtgtccggcggctctatcagcagcggcgattactactggggctggatcagacagcctccaggcaagggactcgaatggatcggcagcatcagctacagcggctccacctactacaacccaagcctgaagtccagagtgaccatcagcgtggacaccagcagaaaccagttctccctgaagctgagcagcgtgacagccgccgatacagccgtgtattattgcaccagagaggacagcagcaactggcggagtagaggacagggcacactggtcacagtgtcctctacgcgtgagcagaaactgatctcggaagaggatgggagcggcagccagcctcacaccaagcccagcgtgttcgtgatgaagaacggcaccaacgtggcctgcctcgtgaaagagttctaccccaaggacatcaggatcaacctggtgtccagcaagaagatcaccgagttcgaccccgccatcgtgatctcccccagcggcaagtacaacgccgtgaagctggggaagtacgaggacagcaacagcgtgacctgctccgtgcagcacgacaacaagaccgtgcacagcaccgactttgaagtgaaaaccgactccaccgaccacgtgaagcccaaagagacagagaacaccaagcagcccagcaagagctgccacaagcccaaggccatcgtgcacaccgagaaagtgaacatgatgagcctgaccgtgctgggcctgcggatgctgttcgccaaaaccgtggccgtgaacttcctgctgaccgccaagctgttcttcctccgcgccaagagaagcggatctggcgtgaagcagaccctgaatttcgacctgctgaagctggctggcgacgtggaatccaacccaggcccttctagaggccatatgaccgagtacaagcccacggtgcgcctcgccacccgcgacgacgtccccagggccgtacgcaccctcgccgccgcgttcgccgactaccccgccacgcgccacaccgtcgatccggaccgccacatcgagcgggtcaccgagctgcaagaactcttcctcacgcgcgtcgggctcgacatcggcaaggtgtgggtcgcggacgacggcgccgcggtggcggtctggaccacgccggagagcgtcgaagcgggggcggtgttcgccgagatcggcccgcgcatggccgagttgagcggttcccggctggccgcgcagcaacagatggaaggcctcctggcgccgcaccggcccaaggagcccgcgtggttcctggccaccgtcggcgtctcgcccgaccaccagggcaagggtctgggcagcgccgtcgtgctccccggagtggaggcggccgagcgcgccggggtgcccgccttcctggagacctccgcgccccgcaacctccccttctacgagcggctcggcttcaccgtcaccgccgacgtcgaggtgcccgaaggaccgcgcacctggtgcatgacccgcaagcccggtgcctga

SEQ ID NO: 7141 - DNA, 3120 bp, Artificial Sequence
  Synthetic Polynucloetide
atggccttaccagtgaccgccttgctcctgccgctggccttgctgctccacgccgccaggccggaagtgcagctggttgaatctggcggaggactggttcaggctggcggatctctgagactgtcttgtgccgccagcggcagaacctttagcatgggctggtttagacaggcccctggcaaagagagagagttcgtcgccgccatcacatactctggcggcagcccttactacgccgactctgtgaagggcagattcaccatcagccgggacaacgccaagaacaccgtgtacctccagatgaacagcctgaagcctgaggacaccgccgtgtactactgcgccgccaatccaacatacggcagcgactggaacgccgagaattggggccagggaacccaagtgacagtgtctagcggacagcctaaggccaatcctaccgtgacactgttccctccaagcagcgaagaactccaggccaacaaggccacacttgtgtgcctgatctccgacttctaccctggggctgtgacagtggcttggaaggccgatggatctcctgtgaaagccggcgtggaaaccaccaagccatccaagcagagcaacaacaaatacgccgccagctcctacctgagcctgacacctgagcagtggaagtcccacagatcctacagctgccaagtgacccacgaaggcagcaccgtggaaaagacagtggcccctacagagtgcagcggatcccagagcttcggcctgctggaccccaagctgtgctacctgctggatggcatcctgttcatctacggcgtgatcctgaccgccctgttcctgagagtgaagttcagcagaagcgccgacgcccctgcctaccagcagggacagaaccaactgtacaacgagctgaacctgggcagacgggaagagtacgacgtgctggacaagcggagaggcagggaccctgagatgggcggaaagccccagcggagaaagaacccccaggaaggactgtataacgaactccagaaagacaagatggccgaagcctacagcgagatcggcatgaagggcgagcggagaagaggcaagggccacgatggcctgtaccagggcctgagcaccgccaccaaggacacctatgacgccctgcacatgcaggccctgcctccaagaagggccaagcgatctggatctggagcaacaaacttctcactactcaaacaagcaggtgacgtggaggagaatcccgggcctactagtatggactggatttggcgcatccttttccttgtcggcgctgctaccggcgcgcattccttcgaacaactgcaactgcaagagtctggccctggcctggtcaagccttctgaaaccctgagcctgacctgtaccgtgtccggcggctctatcagcagcggcgattactactggggctggatcagacagcctccaggcaagggactcgaatggatcggcagcatcagctacagcggctccacctactacaacccaagcctgaagtccagagtgaccatcagcgtggacaccagcagaaaccagttctccctgaagctgagcagcgtgacagccgccgatacagccgtgtattattgcaccagagaggacagcagcaactggcggagtagaggacagggcacactggtcacagtgtcctctgcctctacaaagggaccctccgtgtttcctctggctcccagcagcaagtctacaagcggaggaacagccgctctgggctgcctggtcaaggattactttcccgagcctgtgaccgtgtcctggaatagcggagcactgacaagcggcgtgcacacctttccagccgtgctgcaaagcagcggcctgtactctctgagcagcgtggtcacagtgcctagctctagcctgggcacccagacctacatctgcaatgtgaaccacaagcctagcaacaccaaggtggacaagagagtggaacccaagagctgtggtacccagagttttgggttgttggaccctaaattgtgctatctgttggacggaatcctgttcatttacggagtgatcctgaccgcattgttcctgcgggttaagttttccagatccgcagacgcacccgcttaccaacaagggcagaaccaactctacaatgaacttaatttggggcggagggaagagtacgacgttctggacaaaaggaggggacgagatcccgagatgggcggaaagcctcagcgaaggaagaatccgcaagaggggctttataacgaactccagaaagataaaatggcagaagcctatagtgagattgggatgaagggagaaaggaggaggggtaaaggtcacgatgggttgtaccaaggattgagcacagccactaaagatacctatgatgcgctccacatgcaggccctgccgccaagacgcgccaagagaagcggatctggcgtgaagcagaccctgaatttcgacctgctgaagctggctggcgacgtggaatccaacccaggcccttctagaggccatatgaccgagtacaagcccacggtgcgcctcgccacccgcgacgacgtccccagggccgtacgcaccctcgccgccgcgttcgccgactaccccgccacgcgccacaccgtcgatccggaccgccacatcgagcgggtcaccgagctgcaagaactcttcctcacgcgcgtcgggctcgacatcggcaaggtgtgggtcgcggacgacggcgccgcggtggcggtctggaccacgccggagagcgtcgaagcgggggcggtgttcgccgagatcggcccgcgcatggccgagttgagcggttcccggctggccgcgcagcaacagatggaaggcctcctggcgccgcaccggcccaaggagcccgcgtggttcctggccaccgtcggcgtctcgcccgaccaccagggcaagggtctgggcagcgccgtcgtgctccccggagtggaggcggccgagcgcgccggggtgcccgccttcctggagacctccgcgccccgcaacctccccttctacgagcggctcggcttcaccgtcaccgccgacgtcgaggtgcccgaaggaccgcgcacctggtgcatgacccgcaagcccggtgcctga

SEQ ID NO: 7142 - DNA, 2475 bp, Artificial Sequence
  Synthetic Polynucloetide
atggccttaccagtgaccgccttgctcctgccgctggccttgctgctccacgccgccaggccggaagtgcagctggttgaatctggcggaggactggttcaggctggcggatctctgagactgtcttgtgccgccagcggcagaacctttagcatgggctggtttagacaggcccctggcaaagagagagagttcgtcgccgccatcacatactctggcggcagcccttactacgccgactctgtgaagggcagattcaccatcagccgggacaacgccaagaacaccgtgtacctccagatgaacagcctgaagcctgaggacaccgccgtgtactactgcgccgccaatccaacatacggcagcgactggaacgccgagaattggggccagggaacccaagtgacagtgtctagcctcgaggacctgaagaacgtgttcccacctgaggtggccgtgttcgagcctagcgaggccgagatcagccacacccagaaagccaccctcgtgtgcctggctaccggcttctaccccgaccatgtggaactgtcttggtgggtcaacggcaaagaggtgcacagcggcgtgtctaccgacccccagccactgaaagaacagcccgccctgaacgacagccggtactgcctgagcagcagactgagagtgtccgccaccttctggcagaacccccggaaccacttcagatgccaggtgcagttctacggcctgagcgagaacgacgagtggacccaggacagagccaagcccgtgacccagatcgtgtctgccgaagcctggggcagagccgattgcggatcccagagcttcggcctgctggaccccaagctgtgctacctgctggatggcatcctgttcatctacggcgtgatcctgaccgccctgttcctgagagtgaagttcagcagaagcgccgacgcccctgcctaccagcagggacagaaccaactgtacaacgagctgaacctgggcagacgggaagagtacgacgtgctggacaagcggagaggcagggaccctgagatgggcggaaagccccagcggagaaagaacccccaggaaggactgtataacgaactccagaaagacaagatggccgaagcctacagcgagatcggcatgaagggcgagcggagaagaggcaagggccacgatggcctgtaccagggcctgagcaccgccaccaaggacacctatgacgccctgcacatgcaggccctgcctccaagaagggccaagcgatctggatctggagcaacaaacttctcactactcaaacaagcaggtgacgtggaggagaatcccgggcctactagtatggactggatttggcgcatccttttccttgtcggcgctgctaccggcgcgcattccttcgaacaactgcaactgcaagagtctggccctggcctggtcaagccttctgaaaccctgagcctgacctgtaccgtgtccggcggctctatcagcagcggcgattactactggggctggatcagacagcctccaggcaagggactcgaatggatcggcagcatcagctacagcggctccacctactacaacccaagcctgaagtccagagtgaccatcagcgtggacaccagcagaaaccagttctccctgaagctgagcagcgtgacagccgccgatacagccgtgtattattgcaccagagaggacagcagcaactggcggagtagaggacagggcacactggtcacagtgtcctctacgcgtatccagaaccctgatcctgccgtgtaccagctgcgggatagcaagagcagcgacaagagcgtgtgtctgttcaccgacttcgacagccagaccaacgtgtcccagagcaaggactccgacgtgtacatcaccgataagaccgtgctggacatgcggagcatggacttcaagagcaactccgccgtggcctggtccaacaagtccgatttcgcctgcgccaacgccttcaacaacagcattatccccgaggacacattcttcccaagccccgagagcagctgcggtacccagagttttgggttgttggaccctaaattgtgctatctgttggacggaatcctgttcatttacggagtgatcctgaccgcattgttcctgcgggttaagttttccagatccgcagacgcacccgcttaccaacaagggcagaaccaactctacaatgaacttaatttggggcggagggaagagtacgacgttctggacaaaaggaggggacgagatcccgagatgggcggaaagcctcagcgaaggaagaatccgcaagaggggctttataacgaactccagaaagataaaatggcagaagcctatagtgagattgggatgaagggagaaaggaggaggggtaaaggtcacgatgggttgtaccaaggattgagcacagccactaaagatacctatgatgcgctccacatgcaggccctgccgccaaga

SEQ ID NO: 7143 - DNA, 2475 bp, Artificial Sequence
  Synthetic Polynucloetide
atggccttaccagtgaccgccttgctcctgccgctggccttgctgctccacgccgccaggccggaagtgcagctggttgaatctggcggaggactggttcaggctggcggatctctgagactgtcttgtgccgccagcggcagaacctttagcatgggctggtttagacaggcccctggcaaagagagagagttcgtcgccgccatcacatactctggcggcagcccttactacgccgactctgtgaagggcagattcaccatcagccgggacaacgccaagaacaccgtgtacctccagatgaacagcctgaagcctgaggacaccgccgtgtactactgcgccgccaatccaacatacggcagcgactggaacgccgagaattggggccagggaacccaagtgacagtgtctagcctcgaggacctgaagaacgtgttcccacctgaggtggccgtgttcgagcctagcaaggccgagatcgcccacacccagaaagccaccctcgtgtgcctggctaccggcttctaccccgaccatgtggaactgtcttggtgggtcaacggcaaagaggtgcacagcggcgtgtgtaccgacccccagccactgaaagaacagcccgccctgaacgacagccggtactgcctgagcagcagactgagagtgtccgccaccttctggcagaacccccggaaccacttcagatgccaggtgcagttctacggcctgagcgagaacgacgagtggacccaggacagagccaagcccgtgacccagatcgtgtctgccgaagcctggggcagagccgattgcggatcccagagcttcggcctgctggaccccaagctgtgctacctgctggatggcatcctgttcatctacggcgtgatcctgaccgccctgttcctgagagtgaagttcagcagaagcgccgacgcccctgcctaccagcagggacagaaccaactgtacaacgagctgaacctgggcagacgggaagagtacgacgtgctggacaagcggagaggcagggaccctgagatgggcggaaagccccagcggagaaagaacccccaggaaggactgtataacgaactccagaaagacaagatggccgaagcctacagcgagatcggcatgaagggcgagcggagaagaggcaagggccacgatggcctgtaccagggcctgagcaccgccaccaaggacacctatgacgccctgcacatgcaggccctgcctccaagaagggccaagcgatctggatctggagcaacaaacttctcactactcaaacaagcaggtgacgtggaggagaatcccgggcctactagtatggactggatttggcgcatccttttccttgtcggcgctgctaccggcgcgcattccttcgaacaactgcaactgcaagagtctggccctggcctggtcaagccttctgaaaccctgagcctgacctgtaccgtgtccggcggctctatcagcagcggcgattactactggggctggatcagacagcctccaggcaagggactcgaatggatcggcagcatcagctacagcggctccacctactacaacccaagcctgaagtccagagtgaccatcagcgtggacaccagcagaaaccagttctccctgaagctgagcagcgtgacagccgccgatacagccgtgtattattgcaccagagaggacagcagcaactggcggagtagaggacagggcacactggtcacagtgtcctctacgcgtatccagaaccctgatcctgccgtgtaccagctgcgggatagcaagagcagcgacaagagcgtgtgtctgttcaccgacttcgacagccagaccaacgtgtcccagagcaaggactccgacgtgtacatcaccgataagtgcgtgctggacatgcggagcatggacttcaagagcaactccgccgtggcctggtccaacaagtccgatttcgcctgcgccaacgccttcaacaacagcattatccccgaggacacattcttcccaagcagcgacgtgccctgcggtacccagagttttgggttgttggaccctaaattgtgctatctgttggacggaatcctgttcatttacggagtgatcctgaccgcattgttcctgcgggttaagttttccagatccgcagacgcacccgcttaccaacaagggcagaaccaactctacaatgaacttaatttggggcggagggaagagtacgacgttctggacaaaaggaggggacgagatcccgagatgggcggaaagcctcagcgaaggaagaatccgcaagaggggctttataacgaactccagaaagataaaatggcagaagcctatagtgagattgggatgaagggagaaaggaggaggggtaaaggtcacgatgggttgtaccaaggattgagcacagccactaaagatacctatgatgcgctccacatgcaggccctgccgccaaga

SEQ ID NO: 7144 - DNA, 2688 bp, Artificial Sequence
  Synthetic Polynucloetide
atggccttaccagtgaccgccttgctcctgccgctggccttgctgctccacgccgccaggccggaagtgcagctggttgaatctggcggaggactggttcaggctggcggatctctgagactgtcttgtgccgccagcggcagaacctttagcatgggctggtttagacaggcccctggcaaagagagagagttcgtcgccgccatcacatactctggcggcagcccttactacgccgactctgtgaagggcagattcaccatcagccgggacaacgccaagaacaccgtgtacctccagatgaacagcctgaagcctgaggacaccgccgtgtactactgcgccgccaatccaacatacggcagcgactggaacgccgagaattggggccagggaacccaagtgacagtgtctagcctcgaggggaaaccaattcccaaccctcttctgggactggattcaaccggcagcggcgaggacctgaagaacgtgttcccacctgaggtggccgtgttcgagcctagcgaggccgagatcagccacacccagaaagccaccctcgtgtgcctggctaccggcttctaccccgaccatgtggaactgtcttggtgggtcaacggcaaagaggtgcacagcggcgtgtctaccgacccccagccactgaaagaacagcccgccctgaacgacagccggtactgcctgagcagcagactgagagtgtccgccaccttctggcagaacccccggaaccacttcagatgccaggtgcagttctacggcctgagcgagaacgacgagtggacccaggacagagccaagcccgtgacccagatcgtgtctgccgaagcctggggcagagccgattgcggatcccagagcttcggcctgctggaccccaagctgtgctacctgctggatggcatcctgttcatctacggcgtgatcctgaccgccctgttcctgagagtgaagttcagcagaagcgccgacgcccctgcctaccagcagggacagaaccaactgtacaacgagctgaacctgggcagacgggaagagtacgacgtgctggacaagcggagaggcagggaccctgagatgggcggaaagccccagcggagaaagaacccccaggaaggactgtataacgaactccagaaagacaagatggccgaagcctacagcgagatcggcatgaagggcgagcggagaagaggcaagggccacgatggcctgtaccagggcctgagcaccgccaccaaggacacctatgacgccctgcacatgcaggccctgcctccaagaagggccaagcgatctggatctggagcaacaaacttctcactactcaaacaagcaggtgacgtggaggagaatcccgggcctactagtatggactggatttggcgcatccttttccttgtcggcgctgctaccggcgcgcattccttcgaacaactgcaactgcaagagtctggccctggcctggtcaagccttctgaaaccctgagcctgacctgtaccgtgtccggcggctctatcagcagcggcgattactactggggctggatcagacagcctccaggcaagggactcgaatggatcggcagcatcagctacagcggctccacctactacaacccaagcctgaagtccagagtgaccatcagcgtggacaccagcagaaaccagttctccctgaagctgagcagcgtgacagccgccgatacagccgtgtattattgcaccagagaggacagcagcaactggcggagtagaggacagggcacactggtcacagtgtcctctacgcgtgagcagaaactgatctcggaagaggatgggagcggcatccagaaccctgatcctgccgtgtaccagctgcgggatagcaagagcagcgacaagagcgtgtgtctgttcaccgacttcgacagccagaccaacgtgtcccagagcaaggactccgacgtgtacatcaccgataagaccgtgctggacatgcggagcatggacttcaagagcaactccgccgtggcctggtccaacaagtccgatttcgcctgcgccaacgccttcaacaacagcattatccccgaggacacattcttcccaagccccgagagcagctgcggtacccagagttttgggttgttggaccctaaattgtgctatctgttggacggaatcctgttcatttacggagtgatcctgaccgcattgttcctgaggagcaagcggtcacggctgctccacagcgattacatgaatatgacaccacgaagaccgggtcctactcgcaaacactaccaaccctacgcacctccccgcgactttgcagcgtaccgatctcgggttaagttttccagatccgcagacgcacccgcttaccaacaagggcagaaccaactctacaatgaacttaatttggggcggagggaagagtacgacgttctggacaaaaggaggggacgagatcccgagatgggcggaaagcctcagcgaaggaagaatccgcaagaggggctttataacgaactccagaaagataaaatggcagaagcctatagtgagattgggatgaagggagaaaggaggaggggtaaaggtcacgatgggttgtaccaaggattgagcacagccactaaagatacctatgatgcgctccacatgcaggccctgccgccaaga

SEQ ID NO: 7145 - DNA, 2811 bp, Artificial Sequence
  Synthetic Polynucloetide
atggccttaccagtgaccgccttgctcctgccgctggccttgctgctccacgccgccaggccggaagtgcagctggttgaatctggcggaggactggttcaggctggcggatctctgagactgtcttgtgccgccagcggcagaacctttagcatgggctggtttagacaggcccctggcaaagagagagagttcgtcgccgccatcacatactctggcggcagcccttactacgccgactctgtgaagggcagattcaccatcagccgggacaacgccaagaacaccgtgtacctccagatgaacagcctgaagcctgaggacaccgccgtgtactactgcgccgccaatccaacatacggcagcgactggaacgccgagaattggggccagggaacccaagtgacagtgtctagcctcgaggggaaaccaattcccaaccctcttctgggactggattcaaccggcagcggcgaggacctgaagaacgtgttcccacctgaggtggccgtgttcgagcctagcgaggccgagatcagccacacccagaaagccaccctcgtgtgcctggctaccggcttctaccccgaccatgtggaactgtcttggtgggtcaacggcaaagaggtgcacagcggcgtgtctaccgacccccagccactgaaagaacagcccgccctgaacgacagccggtactgcctgagcagcagactgagagtgtccgccaccttctggcagaacccccggaaccacttcagatgccaggtgcagttctacggcctgagcgagaacgacgagtggacccaggacagagccaagcccgtgacccagatcgtgtctgccgaagcctggggcagagccgattgcggatcccagagcttcggcctgctggaccccaagctgtgctacctgctggatggcatcctgttcatctacggcgtgatcctgaccgccctgttcctgaggagtaagaggagcaggctcctgcacagtgactacatgaacatgactccacgccgccccggacccacccgcaagcattaccagccctatgccccaccacgcgacttcgcagcctatcgctccagagtgaagttcagcagaagcgccgacgcccctgcctaccagcagggacagaaccaactgtacaacgagctgaacctgggcagacgggaagagtacgacgtgctggacaagcggagaggcagggaccctgagatgggcggaaagccccagcggagaaagaacccccaggaaggactgtataacgaactccagaaagacaagatggccgaagcctacagcgagatcggcatgaagggcgagcggagaagaggcaagggccacgatggcctgtaccagggcctgagcaccgccaccaaggacacctatgacgccctgcacatgcaggccctgcctccaagaagggccaagcgatctggatctggagcaacaaacttctcactactcaaacaagcaggtgacgtggaggagaatcccgggcctactagtatggactggatttggcgcatccttttccttgtcggcgctgctaccggcgcgcattccttcgaacaactgcaactgcaagagtctggccctggcctggtcaagccttctgaaaccctgagcctgacctgtaccgtgtccggcggctctatcagcagcggcgattactactggggctggatcagacagcctccaggcaagggactcgaatggatcggcagcatcagctacagcggctccacctactacaacccaagcctgaagtccagagtgaccatcagcgtggacaccagcagaaaccagttctccctgaagctgagcagcgtgacagccgccgatacagccgtgtattattgcaccagagaggacagcagcaactggcggagtagaggacagggcacactggtcacagtgtcctctacgcgtgagcagaaactgatctcggaagaggatgggagcggcatccagaaccctgatcctgccgtgtaccagctgcgggatagcaagagcagcgacaagagcgtgtgtctgttcaccgacttcgacagccagaccaacgtgtcccagagcaaggactccgacgtgtacatcaccgataagaccgtgctggacatgcggagcatggacttcaagagcaactccgccgtggcctggtccaacaagtccgatttcgcctgcgccaacgccttcaacaacagcattatccccgaggacacattcttcccaagccccgagagcagctgcggtacccagagttttgggttgttggaccctaaattgtgctatctgttggacggaatcctgttcatttacggagtgatcctgaccgcattgttcctgaggagcaagcggtcacggctgctccacagcgattacatgaatatgacaccacgaagaccgggtcctactcgcaaacactaccaaccctacgcacctccccgcgactttgcagcgtaccgatctcgggttaagttttccagatccgcagacgcacccgcttaccaacaagggcagaaccaactctacaatgaacttaatttggggcggagggaagagtacgacgttctggacaaaaggaggggacgagatcccgagatgggcggaaagcctcagcgaaggaagaatccgcaagaggggctttataacgaactccagaaagataaaatggcagaagcctatagtgagattgggatgaagggagaaaggaggaggggtaaaggtcacgatgggttgtaccaaggattgagcacagccactaaagatacctatgatgcgctccacatgcaggccctgccgccaaga

SEQ ID NO: 7146 - DNA, 2694 bp, Artificial Sequence
  Synthetic Polynucloetide
atggccttaccagtgaccgccttgctcctgccgctggccttgctgctccacgccgccaggccggaagtgcagctggttgaatctggcggaggactggttcaggctggcggatctctgagactgtcttgtgccgccagcggcagaacctttagcatgggctggtttagacaggcccctggcaaagagagagagttcgtcgccgccatcacatactctggcggcagcccttactacgccgactctgtgaagggcagattcaccatcagccgggacaacgccaagaacaccgtgtacctccagatgaacagcctgaagcctgaggacaccgccgtgtactactgcgccgccaatccaacatacggcagcgactggaacgccgagaattggggccagggaacccaagtgacagtgtctagcctcgaggggaaaccaattcccaaccctcttctgggactggattcaaccggcagcggcgaggacctgaagaacgtgttcccacctgaggtggccgtgttcgagcctagcgaggccgagatcagccacacccagaaagccaccctcgtgtgcctggctaccggcttctaccccgaccatgtggaactgtcttggtgggtcaacggcaaagaggtgcacagcggcgtgtctaccgacccccagccactgaaagaacagcccgccctgaacgacagccggtactgcctgagcagcagactgagagtgtccgccaccttctggcagaacccccggaaccacttcagatgccaggtgcagttctacggcctgagcgagaacgacgagtggacccaggacagagccaagcccgtgacccagatcgtgtctgccgaagcctggggcagagccgattgcggatcccagagcttcggcctgctggaccccaagctgtgctacctgctggatggcatcctgttcatctacggcgtgatcctgaccgccctgttcctgagagtgaagttcagcagaagcgccgacgcccctgcctaccagcagggacagaaccaactgtacaacgagctgaacctgggcagacgggaagagtacgacgtgctggacaagcggagaggcagggaccctgagatgggcggaaagccccagcggagaaagaacccccaggaaggactgtataacgaactccagaaagacaagatggccgaagcctacagcgagatcggcatgaagggcgagcggagaagaggcaagggccacgatggcctgtaccagggcctgagcaccgccaccaaggacacctatgacgccctgcacatgcaggccctgcctccaagaagggccaagcgatctggatctggagcaacaaacttctcactactcaaacaagcaggtgacgtggaggagaatcccgggcctactagtatggactggatttggcgcatccttttccttgtcggcgctgctaccggcgcgcattccttcgaacaactgcaactgcaagagtctggccctggcctggtcaagccttctgaaaccctgagcctgacctgtaccgtgtccggcggctctatcagcagcggcgattactactggggctggatcagacagcctccaggcaagggactcgaatggatcggcagcatcagctacagcggctccacctactacaacccaagcctgaagtccagagtgaccatcagcgtggacaccagcagaaaccagttctccctgaagctgagcagcgtgacagccgccgatacagccgtgtattattgcaccagagaggacagcagcaactggcggagtagaggacagggcacactggtcacagtgtcctctacgcgtgagcagaaactgatctcggaagaggatctggggagcggcatccagaaccctgatcctgccgtgtaccagctgcgggatagcaagagcagcgacaagagcgtgtgtctgttcaccgacttcgacagccagaccaacgtgtcccagagcaaggactccgacgtgtacatcaccgataagaccgtgctggacatgcggagcatggacttcaagagcaactccgccgtggcctggtccaacaagtccgatttcgcctgcgccaacgccttcaacaacagcattatccccgaggacacattcttcccaagccccgagagcagctgcggtacccagagttttgggttgttggaccctaaattgtgctatctgttggacggaatcctgttcatttacggagtgatcctgaccgcattgttcctgaagagaggccggaagaagctgctgtacatcttcaagcagcctttcatgcggcccgtgcagaccacccaggaagaggacggctgctcctgccggttccccgaggaagaagaaggcggctgcgagctgcgggttaagttttccagatccgcagacgcacccgcttaccaacaagggcagaaccaactctacaatgaacttaatttggggcggagggaagagtacgacgttctggacaaaaggaggggacgagatcccgagatgggcggaaagcctcagcgaaggaagaatccgcaagaggggctttataacgaactccagaaagataaaatggcagaagcctatagtgagattgggatgaagggagaaaggaggaggggtaaaggtcacgatgggttgtaccaaggattgagcacagccactaaagatacctatgatgcgctccacatgcaggccctgccgccaaga

SEQ ID NO: 7147 - DNA, 2820 bp, Artificial Sequence
  Synthetic Polynucloetide
atggccttaccagtgaccgccttgctcctgccgctggccttgctgctccacgccgccaggccggaagtgcagctggttgaatctggcggaggactggttcaggctggcggatctctgagactgtcttgtgccgccagcggcagaacctttagcatgggctggtttagacaggcccctggcaaagagagagagttcgtcgccgccatcacatactctggcggcagcccttactacgccgactctgtgaagggcagattcaccatcagccgggacaacgccaagaacaccgtgtacctccagatgaacagcctgaagcctgaggacaccgccgtgtactactgcgccgccaatccaacatacggcagcgactggaacgccgagaattggggccagggaacccaagtgacagtgtctagcctcgaggggaaaccaattcccaaccctcttctgggactggattcaaccggcagcggcgaggacctgaagaacgtgttcccacctgaggtggccgtgttcgagcctagcgaggccgagatcagccacacccagaaagccaccctcgtgtgcctggctaccggcttctaccccgaccatgtggaactgtcttggtgggtcaacggcaaagaggtgcacagcggcgtgtctaccgacccccagccactgaaagaacagcccgccctgaacgacagccggtactgcctgagcagcagactgagagtgtccgccaccttctggcagaacccccggaaccacttcagatgccaggtgcagttctacggcctgagcgagaacgacgagtggacccaggacagagccaagcccgtgacccagatcgtgtctgccgaagcctggggcagagccgattgcggatcccagagcttcggcctgctggaccccaagctgtgctacctgctggatggcatcctgttcatctacggcgtgatcctgaccgccctgttcctgaaacggggcagaaagaaactcctgtatatattcaaacaaccatttatgagaccagtacaaactactcaagaggaagatggctgtagctgccgatttccagaagaagaagaaggaggatgtgaactgagagtgaagttcagcagaagcgccgacgcccctgcctaccagcagggacagaaccaactgtacaacgagctgaacctgggcagacgggaagagtacgacgtgctggacaagcggagaggcagggaccctgagatgggcggaaagccccagcggagaaagaacccccaggaaggactgtataacgaactccagaaagacaagatggccgaagcctacagcgagatcggcatgaagggcgagcggagaagaggcaagggccacgatggcctgtaccagggcctgagcaccgccaccaaggacacctatgacgccctgcacatgcaggccctgcctccaagaagggccaagcgatctggatctggagcaacaaacttctcactactcaaacaagcaggtgacgtggaggagaatcccgggcctactagtatggactggatttggcgcatccttttccttgtcggcgctgctaccggcgcgcattccttcgaacaactgcaactgcaagagtctggccctggcctggtcaagccttctgaaaccctgagcctgacctgtaccgtgtccggcggctctatcagcagcggcgattactactggggctggatcagacagcctccaggcaagggactcgaatggatcggcagcatcagctacagcggctccacctactacaacccaagcctgaagtccagagtgaccatcagcgtggacaccagcagaaaccagttctccctgaagctgagcagcgtgacagccgccgatacagccgtgtattattgcaccagagaggacagcagcaactggcggagtagaggacagggcacactggtcacagtgtcctctacgcgtgagcagaaactgatctcggaagaggatctggggagcggcatccagaaccctgatcctgccgtgtaccagctgcgggatagcaagagcagcgacaagagcgtgtgtctgttcaccgacttcgacagccagaccaacgtgtcccagagcaaggactccgacgtgtacatcaccgataagaccgtgctggacatgcggagcatggacttcaagagcaactccgccgtggcctggtccaacaagtccgatttcgcctgcgccaacgccttcaacaacagcattatccccgaggacacattcttcccaagccccgagagcagctgcggtacccagagttttgggttgttggaccctaaattgtgctatctgttggacggaatcctgttcatttacggagtgatcctgaccgcattgttcctgaagagaggccggaagaagctgctgtacatcttcaagcagcctttcatgcggcccgtgcagaccacccaggaagaggacggctgctcctgccggttccccgaggaagaagaaggcggctgcgagctgcgggttaagttttccagatccgcagacgcacccgcttaccaacaagggcagaaccaactctacaatgaacttaatttggggcggagggaagagtacgacgttctggacaaaaggaggggacgagatcccgagatgggcggaaagcctcagcgaaggaagaatccgcaagaggggctttataacgaactccagaaagataaaatggcagaagcctatagtgagattgggatgaagggagaaaggaggaggggtaaaggtcacgatgggttgtaccaaggattgagcacagccactaaagatacctatgatgcgctccacatgcaggccctgccgccaaga

SEQ ID NO: 7148 - DNA, 2493 bp, Artificial Sequence
  Synthetic Polynucloetide
atggccttaccagtgaccgccttgctcctgccgctggccttgctgctccacgccgccaggccggaagtgcagctggttgaatctggcggaggactggttcaggctggcggatctctgagactgtcttgtgccgccagcggcagaacctttagcatgggctggtttagacaggcccctggcaaagagagagagttcgtcgccgccatcacatactctggcggcagcccttactacgccgactctgtgaagggcagattcaccatcagccgggacaacgccaagaacaccgtgtacctccagatgaacagcctgaagcctgaggacaccgccgtgtactactgcgccgccaatccaacatacggcagcgactggaacgccgagaattggggccagggaacccaagtgacagtgtctagcctcgagcagagcttcggcctgctggaccccaagctgtgctacctgctggatggcatcctgttcatctacggcgtgatcctgaccgccctgttcctgagagtgaagttcagcagaagcgccgacgcccctgcctaccagcagggacagaaccaactgtacaacgagctgaacctgggcagacgggaagagtacgacgtgctggacaagcggagaggcagggaccctgagatgggcggaaagccccagcggagaaagaacccccaggaaggactgtataacgaactccagaaagacaagatggccgaagcctacagcgagatcggcatgaagggcgagcggagaagaggcaagggccacgatggcctgtaccagggcctgagcaccgccaccaaggacacctatgacgccctgcacatgcaggccctgcctccaagaagggccaagcgatctggatctggagcaacaaacttctcactactcaaacaagcaggtgacgtggaggagaatcccgggcctactagtatggactggatttggcgcatccttttccttgtcggcgctgctaccggcgcgcattccttcgaacaactgcaactgcaagagtctggccctggcctggtcaagccttctgaaaccctgagcctgacctgtaccgtgtccggcggctctatcagcagcggcgattactactggggctggatcagacagcctccaggcaagggactcgaatggatcggcagcatcagctacagcggctccacctactacaacccaagcctgaagtccagagtgaccatcagcgtggacaccagcagaaaccagttctccctgaagctgagcagcgtgacagccgccgatacagccgtgtattattgcaccagagaggacagcagcaactggcggagtagaggacagggcacactggtcacagtgtcctctacgcgtcagagttttgggttgttggaccctaaattgtgctatctgttggacggaatcctgttcatttacggagtgatcctgaccgcattgttcctgcgggttaagttttccagatccgcagacgcacccgcttaccaacaagggcagaaccaactctacaatgaacttaatttggggcggagggaagagtacgacgttctggacaaaaggaggggacgagatcccgagatgggcggaaagcctcagcgaaggaagaatccgcaagaggggctttataacgaactccagaaagataaaatggcagaagcctatagtgagattgggatgaagggagaaaggaggaggggtaaaggtcacgatgggttgtaccaaggattgagcacagccactaaagatacctatgatgcgctccacatgcaggccctgccgccaagacgcgccaagagaagcggatctggcgtgaagcagaccctgaatttcgacctgctgaagctggctggcgacgtggaatccaacccaggcccttctagaggccatatgaccgagtacaagcccacggtgcgcctcgccacccgcgacgacgtccccagggccgtacgcaccctcgccgccgcgttcgccgactaccccgccacgcgccacaccgtcgatccggaccgccacatcgagcgggtcaccgagctgcaagaactcttcctcacgcgcgtcgggctcgacatcggcaaggtgtgggtcgcggacgacggcgccgcggtggcggtctggaccacgccggagagcgtcgaagcgggggcggtgttcgccgagatcggcccgcgcatggccgagttgagcggttcccggctggccgcgcagcaacagatggaaggcctcctggcgccgcaccggcccaaggagcccgcgtggttcctggccaccgtcggcgtctcgcccgaccaccagggcaagggtctgggcagcgccgtcgtgctccccggagtggaggcggccgagcgcgccggggtgcccgccttcctggagacctccgcgccccgcaacctccccttctacgagcggctcggcttcaccgtcaccgccgacgtcgaggtgcccgaaggaccgcgcacctggtgcatgacccgcaagcccggtgcctga

SEQ ID NO: 7149 - DNA, 1965 bp, Artificial Sequence
  Synthetic Polynucloetide
atggccttaccagtgaccgccttgctcctgccgctggccttgctgctccacgccgccaggccggaagtgcagctggttgaatctggcggaggactggttcaggctggcggatctctgagactgtcttgtgccgccagcggcagaacctttagcatgggctggtttagacaggcccctggcaaagagagagagttcgtcgccgccatcacatactctggcggcagcccttactacgccgactctgtgaagggcagattcaccatcagccgggacaacgccaagaacaccgtgtacctccagatgaacagcctgaagcctgaggacaccgccgtgtactactgcgccgccaatccaacatacggcagcgactggaacgccgagaattggggccagggaacccaagtgacagtgtctagcctcgagggacagcctaaggccaatcctaccgtgacactgttccctccaagcagcgaagaactccaggccaacaaggccacacttgtgtgcctgatctccgacttctaccctggggctgtgacagtggcttggaaggccgatggatctcctgtgaaagccggcgtggaaaccaccaagccatccaagcagagcaacaacaaatacgccgccagctcctacctgagcctgacacctgagcagtggaagtcccacagatcctacagctgccaagtgacccacgaaggcagcaccgtggaaaagacagtggcccctacagagtgcagccccatcaagaccgatgtgattacaatggaccccaaggacaactgctccaaggacgccaacgataccctgctgctccagctgaccaacaccagcgcctactacatgtacttgttgctgctgctgaagtccgtggtgtacttcgccatcatcacatgctgcctgctgcggagaaccgccttctgctgcaacggcgagaagtctagggccaagcgatctggatctggagcaacaaacttctcactactcaaacaagcaggtgacgtggaggagaatcccgggcctactagtatggactggatttggcgcatccttttccttgtcggcgctgctaccggcgcgcattccttcgaacaactgcaactgcaagagtctggccctggcctggtcaagccttctgaaaccctgagcctgacctgtaccgtgtccggcggctctatcagcagcggcgattactactggggctggatcagacagcctccaggcaagggactcgaatggatcggcagcatcagctacagcggctccacctactacaacccaagcctgaagtccagagtgaccatcagcgtggacaccagcagaaaccagttctccctgaagctgagcagcgtgacagccgccgatacagccgtgtattattgcaccagagaggacagcagcaactggcggagtagaggacagggcacactggtcacagtgtcctctacgcgtgcctctacaaagggaccctccgtgtttcctctggctcccagcagcaagtctacaagcggaggaacagccgctctgggctgcctggtcaaggattactttcccgagcctgtgaccgtgtcctggaatagcggagcactgacaagcggcgtgcacacctttccagccgtgctgcaaagcagcggcctgtactctctgagcagcgtggtcacagtgcctagctctagcctgggcacccagacctacatctgcaatgtgaaccacaagcctagcaacaccaaggtggacaagagagtggaacccaagagctgtgaagtgaaaaccgactccaccgaccacgtgaagcccaaagagacagagaacaccaagcagcccagcaagagctgccacaagcccaaggccatcgtgcacaccgagaaagtgaacatgatgagcctgaccgtgctgggcctgcggatgctgttcgccaaaaccgtggccgtgaacttcctgctgaccgccaagctgttcttcctc

SEQ ID NO: 7150 - DNA, 1899 bp, Artificial Sequence
  Synthetic Polynucloetide
atggccttaccagtgaccgccttgctcctgccgctggccttgctgctccacgccgccaggccggaagtgcagctggttgaatctggcggaggactggttcaggctggcggatctctgagactgtcttgtgccgccagcggcagaacctttagcatgggctggtttagacaggcccctggcaaagagagagagttcgtcgccgccatcacatactctggcggcagcccttactacgccgactctgtgaagggcagattcaccatcagccgggacaacgccaagaacaccgtgtacctccagatgaacagcctgaagcctgaggacaccgccgtgtactactgcgccgccaatccaacatacggcagcgactggaacgccgagaattggggccagggaacccaagtgacagtgtctagcctcgagggacagcctaaggccaatcctaccgtgacactgttccctccaagcagcgaagaactccaggccaacaaggccacacttgtgtgcctgatctccgacttctaccctggggctgtgacagtggcttggaaggccgatggatctcctgtgaaagccggcgtggaaaccaccaagccatccaagcagagcaacaacaaatacgccgccagctcctacctgagcctgacacctgagcagtggaagtcccacagatcctacagctgccaagtgacccacgaaggcagcaccgtggaaaagacagtggcccctacagagtgcagcggcagagccgattgcggcatcaccagcgccagctaccaccagggcgtgctgagcgccaccatcctgtacgagatcctgctgggcaaggccaccctgtacgccgtgctggtgtctgccctggtgctgatggctatggtcaagcggaaggacagccggggaagggccaagcgatctggatctggagcaacaaacttctcactactcaaacaagcaggtgacgtggaggagaatcccgggcctactagtatggactggatttggcgcatccttttccttgtcggcgctgctaccggcgcgcattccttcgaacaactgcaactgcaagagtctggccctggcctggtcaagccttctgaaaccctgagcctgacctgtaccgtgtccggcggctctatcagcagcggcgattactactggggctggatcagacagcctccaggcaagggactcgaatggatcggcagcatcagctacagcggctccacctactacaacccaagcctgaagtccagagtgaccatcagcgtggacaccagcagaaaccagttctccctgaagctgagcagcgtgacagccgccgatacagccgtgtattattgcaccagagaggacagcagcaactggcggagtagaggacagggcacactggtcacagtgtcctctacgcgtgcctctacaaagggaccctccgtgtttcctctggctcccagcagcaagtctacaagcggaggaacagccgctctgggctgcctggtcaaggattactttcccgagcctgtgaccgtgtcctggaatagcggagcactgacaagcggcgtgcacacctttccagccgtgctgcaaagcagcggcctgtactctctgagcagcgtggtcacagtgcctagctctagcctgggcacccagacctacatctgcaatgtgaaccacaagcctagcaacaccaaggtggacaagagagtggaacccaagagctgtatccccgaggacacattcttcccaagcagcgacgtgccctgcgacgtgaagctggtggaaaagagcttcgagacagacaccaacctgaacttccagaacctgagcgtgatcggcttcagaatcctgctgctgaaagtggccggctttaacctgctgatgaccctgcggctgtggtccagc

SEQ ID NO: 7151 - DNA, 1899 bp, Artificial Sequence
  Synthetic Polynucloetide
atggccttaccagtgaccgccttgctcctgccgctggccttgctgctccacgccgccaggccggaagtgcagctggttgaatctggcggaggactggttcaggctggcggatctctgagactgtcttgtgccgccagcggcagaacctttagcatgggctggtttagacaggcccctggcaaagagagagagttcgtcgccgccatcacatactctggcggcagcccttactacgccgactctgtgaagggcagattcaccatcagccgggacaacgccaagaacaccgtgtacctccagatgaacagcctgaagcctgaggacaccgccgtgtactactgcgccgccaatccaacatacggcagcgactggaacgccgagaattggggccagggaacccaagtgacagtgtctagcctcgagggacagcctaaggccaatcctaccgtgacactgttccctccaagcagcgaagaactccaggccaacaaggccacacttgtgtgcctgatctccgacttctaccctggggctgtgacagtggcttggaaggccgatggatctcctgtgaaagccggcgtggaaaccaccaagccatccaagcagagcaacaacaaatacgccgccagctcctacctgagcctgacacctgagcagtggaagtcccacagatcctacagctgccaagtgacccacgaaggcagcaccgtggaaaagacagtggcccctacagagtgcagcggcagagccgattgcggctttaccagcgagagctaccagcagggcgtgctgagcgccaccatcctgtacgagatcctgctgggcaaggccaccctgtacgccgtgctggtgtctgccctggtgctgatggctatggtcaagcggaaggacagccggggaagggccaagcgatctggatctggagcaacaaacttctcactactcaaacaagcaggtgacgtggaggagaatcccgggcctactagtatggactggatttggcgcatccttttccttgtcggcgctgctaccggcgcgcattccttcgaacaactgcaactgcaagagtctggccctggcctggtcaagccttctgaaaccctgagcctgacctgtaccgtgtccggcggctctatcagcagcggcgattactactggggctggatcagacagcctccaggcaagggactcgaatggatcggcagcatcagctacagcggctccacctactacaacccaagcctgaagtccagagtgaccatcagcgtggacaccagcagaaaccagttctccctgaagctgagcagcgtgacagccgccgatacagccgtgtattattgcaccagagaggacagcagcaactggcggagtagaggacagggcacactggtcacagtgtcctctacgcgtgcctctacaaagggaccctccgtgtttcctctggctcccagcagcaagtctacaagcggaggaacagccgctctgggctgcctggtcaaggattactttcccgagcctgtgaccgtgtcctggaatagcggagcactgacaagcggcgtgcacacctttccagccgtgctgcaaagcagcggcctgtactctctgagcagcgtggtcacagtgcctagctctagcctgggcacccagacctacatctgcaatgtgaaccacaagcctagcaacaccaaggtggacaagagagtggaacccaagagctgtatccccgaggacacattcttcccaagccccgagagcagctgcgacgtgaagctggtggaaaagagcttcgagacagacaccaacctgaacttccagaacctgagcgtgatcggcttcagaatcctgctgctgaaagtggccggctttaacctgctgatgaccctgcggctgtggtccagc

SEQ ID NO: 7152 - DNA, 1362 bp, Artificial Sequence
  Synthetic Polynucloetide
atggccttaccagtgaccgccttgctcctgccgctggccttgctgctccacgccgccaggccggaagtgcagctggttgaatctggcggaggactggttcaggctggcggatctctgagactgtcttgtgccgccagcggcagaacctttagcatgggctggtttagacaggcccctggcaaagagagagagttcgtcgccgccatcacatactctggcggcagcccttactacgccgactctgtgaagggcagattcaccatcagccgggacaacgccaagaacaccgtgtacctccagatgaacagcctgaagcctgaggacaccgccgtgtactactgcgccgccaatccaacatacggcagcgactggaacgccgagaattggggccagggaacccaagtgacagtgtctagcctcgagagcggcggaggcggatctttcgaacaactgcaactgcaagagtctggccctggcctggtcaagccttctgaaaccctgagcctgacctgtaccgtgtccggcggctctatcagcagcggcgattactactggggctggatcagacagcctccaggcaagggactcgaatggatcggcagcatcagctacagcggctccacctactacaacccaagcctgaagtccagagtgaccatcagcgtggacaccagcagaaaccagttctccctgaagctgagcagcgtgacagccgccgatacagccgtgtattattgcaccagagaggacagcagcaactggcggagtagaggacagggcacactggtcacagtgtcctctacgcgtgacggtaacgaggagatgggaggaatcactcaaaccccttacaaagtctcaatttcaggaacaactgttatccttacatgtccccagtatcctggcagcgagatcctttggcagcataacgacaagaatatagggggagatgaagacgataagaatatcggatctgacgaggatcacttgagcctgaaagagttctccgagcttgaacaaagcggatattatgtgtgctatccgcgcgggtcaaagccggaagacgctaacttttacctttatctccgagccagagtgtgcgaaaattgcatggaaatggacgttatgtccgttgctacaatagttatcgtagatatatgcatcacgggtggactgcttctgctggtttattattggtccaagaatagaaaggccaaagctaaacccgtgaccagaggcgctggcgcaggcggaaggcaaaggggacaaaacaaagaacggccaccaccagtgccaaatccagattatgagcctattcggaaaggacagagggacctgtactctggcctgaatcagagaagaatc

SEQ ID NO: 7153 - DNA, 1257 bp, Artificial Sequence
  Synthetic Polynucloetide
atggccttaccagtgaccgccttgctcctgccgctggccttgctgctccacgccgccaggccggaagtgcagctggttgaatctggcggaggactggttcaggctggcggatctctgagactgtcttgtgccgccagcggcagaacctttagcatgggctggtttagacaggcccctggcaaagagagagagttcgtcgccgccatcacatactctggcggcagcccttactacgccgactctgtgaagggcagattcaccatcagccgggacaacgccaagaacaccgtgtacctccagatgaacagcctgaagcctgaggacaccgccgtgtactactgcgccgccaatccaacatacggcagcgactggaacgccgagaattggggccagggaacccaagtgacagtgtctagcctcgagagcggcggaggcggatctttcgaacaactgcaactgcaagagtctggccctggcctggtcaagccttctgaaaccctgagcctgacctgtaccgtgtccggcggctctatcagcagcggcgattactactggggctggatcagacagcctccaggcaagggactcgaatggatcggcagcatcagctacagcggctccacctactacaacccaagcctgaagtccagagtgaccatcagcgtggacaccagcagaaaccagttctccctgaagctgagcagcgtgacagccgccgatacagccgtgtattattgcaccagagaggacagcagcaactggcggagtagaggacagggcacactggtcacagtgtcctctacgcgtttcaagatccccatcgaggaactggaagatcgggtgttcgtgaactgcaacacctctatcacctgggtggaaggcaccgtgggaacactgctgagcgacatcaccagactggacctcggcaagcggattctggaccctcggggcatctacagatgcaacggcaccgacatctacaaggacaaagaaagcaccgtgcaggtccactacagaatgtgccagtcctgcgtggaactggaccctgctacagtggccggcatcatcgtgaccgatgtgatcgctactctgctgctggctctgggagtgttctgcttcgccggacacgaaacaggcagactgtctggcgctgccgatacacaggccctgctgagaaacgaccaagtgtatcagcccctgcgcgacagagatgatgcccagtattctcacctcggcggcaactgggctagaaacaag

SEQ ID NO: 7154 - DNA, 1287 bp, Artificial Sequence
  Synthetic Polynucloetide
atggccttaccagtgaccgccttgctcctgccgctggccttgctgctccacgccgccaggccggaagtgcagctggttgaatctggcggaggactggttcaggctggcggatctctgagactgtcttgtgccgccagcggcagaacctttagcatgggctggtttagacaggcccctggcaaagagagagagttcgtcgccgccatcacatactctggcggcagcccttactacgccgactctgtgaagggcagattcaccatcagccgggacaacgccaagaacaccgtgtacctccagatgaacagcctgaagcctgaggacaccgccgtgtactactgcgccgccaatccaacatacggcagcgactggaacgccgagaattggggccagggaacccaagtgacagtgtctagcctcgagagcggcggaggcggatctttcgaacaactgcaactgcaagagtctggccctggcctggtcaagccttctgaaaccctgagcctgacctgtaccgtgtccggcggctctatcagcagcggcgattactactggggctggatcagacagcctccaggcaagggactcgaatggatcggcagcatcagctacagcggctccacctactacaacccaagcctgaagtccagagtgaccatcagcgtggacaccagcagaaaccagttctccctgaagctgagcagcgtgacagccgccgatacagccgtgtattattgcaccagagaggacagcagcaactggcggagtagaggacagggcacactggtcacagtgtcctctacgcgtcagagcatcaagggcaaccacctggtcaaggtgtacgactaccaagaggacggcagcgtgctgctgacatgtgatgccgaggccaagaacatcacctggtttaaggacggcaagatgatcggcttcctgaccgaggacaagaagaagtggaacctgggcagcaacgctaaggaccccagaggcatgtatcagtgcaagggcagccagaacaagagcaagcccctccaggtgtactaccggatgtgccagaactgcatcgagctgaacgccgctaccatcagcggctttctgttcgccgagatcgtgtccatcttcgtgctggccgtgggcgtgtactttatcgctggacaggatggcgtgcggcagagcagagcttccgataagcaaaccctgctgcctaacgaccagctgtaccagcctctgaaggacagagaggacgaccagtacagccacctccagggcaatcagctgagaagaaac

SEQ ID NO: 7155 - DNA, 1236 bp, Artificial Sequence
  Synthetic Polynucloetide
atggccttaccagtgaccgccttgctcctgccgctggccttgctgctccacgccgccaggccggaagtgcagctggttgaatctggcggaggactggttcaggctggcggatctctgagactgtcttgtgccgccagcggcagaacctttagcatgggctggtttagacaggcccctggcaaagagagagagttcgtcgccgccatcacatactctggcggcagcccttactacgccgactctgtgaagggcagattcaccatcagccgggacaacgccaagaacaccgtgtacctccagatgaacagcctgaagcctgaggacaccgccgtgtactactgcgccgccaatccaacatacggcagcgactggaacgccgagaattggggccagggaacccaagtgacagtgtctagcctcgagagcggcggaggcggatctttcgaacaactgcaactgcaagagtctggccctggcctggtcaagccttctgaaaccctgagcctgacctgtaccgtgtccggcggctctatcagcagcggcgattactactggggctggatcagacagcctccaggcaagggactcgaatggatcggcagcatcagctacagcggctccacctactacaacccaagcctgaagtccagagtgaccatcagcgtggacaccagcagaaaccagttctccctgaagctgagcagcgtgacagccgccgatacagccgtgtattattgcaccagagaggacagcagcaactggcggagtagaggacagggcacactggtcacagtgtcctctacgcgtcagagttttgggttgttggaccctaaattgtgctatctgttggacggaatcctgttcatttacggagtgatcctgaccgcattgttcctgcgggttaagttttccagatccgcagacgcacccgcttaccaacaagggcagaaccaactctacaatgaacttaatttggggcggagggaagagtacgacgttctggacaaaaggaggggacgagatcccgagatgggcggaaagcctcagcgaaggaagaatccgcaagaggggctttataacgaactccagaaagataaaatggcagaagcctatagtgagattgggatgaagggagaaaggaggaggggtaaaggtcacgatgggttgtaccaaggattgagcacagccactaaagatacctatgatgcgctccacatgcaggccctgccgccaaga

SEQ ID NO: 7156 - DNA, 1365 bp, Artificial Sequence
  Synthetic Polynucloetide
atggccttaccagtgaccgccttgctcctgccgctggccttgctgctccacgccgccaggccggaacaactgcaactgcaagagtctggccctggcctggtcaagccttctgaaaccctgagcctgacctgtaccgtgtccggcggctctatcagcagcggcgattactactggggctggatcagacagcctccaggcaagggactcgaatggatcggcagcatcagctacagcggctccacctactacaacccaagcctgaagtccagagtgaccatcagcgtggacaccagcagaaaccagttctccctgaagctgagcagcgtgacagccgccgatacagccgtgtattattgcaccagagaggacagcagcaactggcggagtagaggacagggcacactggtcacagtgtcctctctcgagagcggcggaggcggatctttcgaagaagtgcagctggttgaatctggcggaggactggttcaggctggcggatctctgagactgtcttgtgccgccagcggcagaacctttagcatgggctggtttagacaggcccctggcaaagagagagagttcgtcgccgccatcacatactctggcggcagcccttactacgccgactctgtgaagggcagattcaccatcagccgggacaacgccaagaacaccgtgtacctccagatgaacagcctgaagcctgaggacaccgccgtgtactactgcgccgccaatccaacatacggcagcgactggaacgccgagaattggggccagggaacccaagtgacagtgtctagcacgcgtgacggtaacgaggagatgggaggaatcactcaaaccccttacaaagtctcaatttcaggaacaactgttatccttacatgtccccagtatcctggcagcgagatcctttggcagcataacgacaagaatatagggggagatgaagacgataagaatatcggatctgacgaggatcacttgagcctgaaagagttctccgagcttgaacaaagcggatattatgtgtgctatccgcgcgggtcaaagccggaagacgctaacttttacctttatctccgagccagagtgtgcgaaaattgcatggaaatggacgttatgtccgttgctacaatagttatcgtagatatatgcatcacgggtggactgcttctgctggtttattattggtccaagaatagaaaggccaaagctaaacccgtgaccagaggcgctggcgcaggcggaaggcaaaggggacaaaacaaagaacggccaccaccagtgccaaatccagattatgagcctattcggaaaggacagagggacctgtactctggcctgaatcagagaagaatc

SEQ ID NO: 7157 - DNA, 1260 bp, Artificial Sequence
  Synthetic Polynucloetide
atggccttaccagtgaccgccttgctcctgccgctggccttgctgctccacgccgccaggccggaacaactgcaactgcaagagtctggccctggcctggtcaagccttctgaaaccctgagcctgacctgtaccgtgtccggcggctctatcagcagcggcgattactactggggctggatcagacagcctccaggcaagggactcgaatggatcggcagcatcagctacagcggctccacctactacaacccaagcctgaagtccagagtgaccatcagcgtggacaccagcagaaaccagttctccctgaagctgagcagcgtgacagccgccgatacagccgtgtattattgcaccagagaggacagcagcaactggcggagtagaggacagggcacactggtcacagtgtcctctctcgagagcggcggaggcggatctttcgaagaagtgcagctggttgaatctggcggaggactggttcaggctggcggatctctgagactgtcttgtgccgccagcggcagaacctttagcatgggctggtttagacaggcccctggcaaagagagagagttcgtcgccgccatcacatactctggcggcagcccttactacgccgactctgtgaagggcagattcaccatcagccgggacaacgccaagaacaccgtgtacctccagatgaacagcctgaagcctgaggacaccgccgtgtactactgcgccgccaatccaacatacggcagcgactggaacgccgagaattggggccagggaacccaagtgacagtgtctagcacgcgtttcaagatccccatcgaggaactggaagatcgggtgttcgtgaactgcaacacctctatcacctgggtggaaggcaccgtgggaacactgctgagcgacatcaccagactggacctcggcaagcggattctggaccctcggggcatctacagatgcaacggcaccgacatctacaaggacaaagaaagcaccgtgcaggtccactacagaatgtgccagtcctgcgtggaactggaccctgctacagtggccggcatcatcgtgaccgatgtgatcgctactctgctgctggctctgggagtgttctgcttcgccggacacgaaacaggcagactgtctggcgctgccgatacacaggccctgctgagaaacgaccaagtgtatcagcccctgcgcgacagagatgatgcccagtattctcacctcggcggcaactgggctagaaacaag

SEQ ID NO: 7158 - DNA, 1290 bp, Artificial Sequence
  Synthetic Polynucloetide
atggccttaccagtgaccgccttgctcctgccgctggccttgctgctccacgccgccaggccggaacaactgcaactgcaagagtctggccctggcctggtcaagccttctgaaaccctgagcctgacctgtaccgtgtccggcggctctatcagcagcggcgattactactggggctggatcagacagcctccaggcaagggactcgaatggatcggcagcatcagctacagcggctccacctactacaacccaagcctgaagtccagagtgaccatcagcgtggacaccagcagaaaccagttctccctgaagctgagcagcgtgacagccgccgatacagccgtgtattattgcaccagagaggacagcagcaactggcggagtagaggacagggcacactggtcacagtgtcctctctcgagagcggcggaggcggatctttcgaagaagtgcagctggttgaatctggcggaggactggttcaggctggcggatctctgagactgtcttgtgccgccagcggcagaacctttagcatgggctggtttagacaggcccctggcaaagagagagagttcgtcgccgccatcacatactctggcggcagcccttactacgccgactctgtgaagggcagattcaccatcagccgggacaacgccaagaacaccgtgtacctccagatgaacagcctgaagcctgaggacaccgccgtgtactactgcgccgccaatccaacatacggcagcgactggaacgccgagaattggggccagggaacccaagtgacagtgtctagcacgcgtcagagcatcaagggcaaccacctggtcaaggtgtacgactaccaagaggacggcagcgtgctgctgacatgtgatgccgaggccaagaacatcacctggtttaaggacggcaagatgatcggcttcctgaccgaggacaagaagaagtggaacctgggcagcaacgctaaggaccccagaggcatgtatcagtgcaagggcagccagaacaagagcaagcccctccaggtgtactaccggatgtgccagaactgcatcgagctgaacgccgctaccatcagcggctttctgttcgccgagatcgtgtccatcttcgtgctggccgtgggcgtgtactttatcgctggacaggatggcgtgcggcagagcagagcttccgataagcaaaccctgctgcctaacgaccagctgtaccagcctctgaaggacagagaggacgaccagtacagccacctccagggcaatcagctgagaagaaac

SEQ ID NO: 7159 - DNA, 1239 bp, Artificial Sequence
  Synthetic Polynucloetide
atggccttaccagtgaccgccttgctcctgccgctggccttgctgctccacgccgccaggccggaacaactgcaactgcaagagtctggccctggcctggtcaagccttctgaaaccctgagcctgacctgtaccgtgtccggcggctctatcagcagcggcgattactactggggctggatcagacagcctccaggcaagggactcgaatggatcggcagcatcagctacagcggctccacctactacaacccaagcctgaagtccagagtgaccatcagcgtggacaccagcagaaaccagttctccctgaagctgagcagcgtgacagccgccgatacagccgtgtattattgcaccagagaggacagcagcaactggcggagtagaggacagggcacactggtcacagtgtcctctctcgagagcggcggaggcggatctttcgaagaagtgcagctggttgaatctggcggaggactggttcaggctggcggatctctgagactgtcttgtgccgccagcggcagaacctttagcatgggctggtttagacaggcccctggcaaagagagagagttcgtcgccgccatcacatactctggcggcagcccttactacgccgactctgtgaagggcagattcaccatcagccgggacaacgccaagaacaccgtgtacctccagatgaacagcctgaagcctgaggacaccgccgtgtactactgcgccgccaatccaacatacggcagcgactggaacgccgagaattggggccagggaacccaagtgacagtgtctagcacgcgtcagagttttgggttgttggaccctaaattgtgctatctgttggacggaatcctgttcatttacggagtgatcctgaccgcattgttcctgcgggttaagttttccagatccgcagacgcacccgcttaccaacaagggcagaaccaactctacaatgaacttaatttggggcggagggaagagtacgacgttctggacaaaaggaggggacgagatcccgagatgggcggaaagcctcagcgaaggaagaatccgcaagaggggctttataacgaactccagaaagataaaatggcagaagcctatagtgagattgggatgaagggagaaaggaggaggggtaaaggtcacgatgggttgtaccaaggattgagcacagccactaaagatacctatgatgcgctccacatgcaggccctgccgccaaga

SEQ ID NO: 7160 - DNA, 1938 bp, Artificial Sequence
  Synthetic Polynucloetide
atggccttaccagtgaccgccttgctcctgccgctggccttgctgctccacgccgccaggccggaagtgcagctggttgaatctggcggaggactggttcaggctggcggatctctgagactgtcttgtgccgccagcggcagaacctttagcatgggctggtttagacaggcccctggcaaagagagagagttcgtcgccgccatcacatactctggcggcagcccttactacgccgactctgtgaagggcagattcaccatcagccgggacaacgccaagaacaccgtgtacctccagatgaacagcctgaagcctgaggacaccgccgtgtactactgcgccgccaatccaacatacggcagcgactggaacgccgagaattggggccagggaacccaagtgacagtgtctagcctcgagagcggcggaggcggatctttcgaacaactgcaactgcaagagtctggccctggcctggtcaagccttctgaaaccctgagcctgacctgtaccgtgtccggcggctctatcagcagcggcgattactactggggctggatcagacagcctccaggcaagggactcgaatggatcggcagcatcagctacagcggctccacctactacaacccaagcctgaagtccagagtgaccatcagcgtggacaccagcagaaaccagttctccctgaagctgagcagcgtgacagccgccgatacagccgtgtattattgcaccagagaggacagcagcaactggcggagtagaggacagggcacactggtcacagtgtcctctacgcgtgggagcggcatccagaaccctgatcctgccgtgtaccagctgcgggatagcaagagcagcgacaagagcgtgtgtctgttcaccgacttcgacagccagaccaacgtgtcccagagcaaggactccgacgtgtacatcaccgataagaccgtgctggacatgcggagcatggacttcaagagcaactccgccgtggcctggtccaacaagtccgatttcgcctgcgccaacgccttcaacaacagcattatccccgaggacacattcttcccaagccccgagagcagctgcgacgtgaagctggtggaaaagagcttcgagacagacaccaacctgaacttccagaacctgagcgtgatcggcttcagaatcctgctgctgaaagtggccggctttaacctgctgatgaccctgcggctgtggtccagccgcgccaagagaagcggatctggcgtgaagcagaccctgaatttcgacctgctgaagctggctggcgacgtggaatccaacccaggcccttctagaggccatatgaccgagtacaagcccacggtgcgcctcgccacccgcgacgacgtccccagggccgtacgcaccctcgccgccgcgttcgccgactaccccgccacgcgccacaccgtcgatccggaccgccacatcgagcgggtcaccgagctgcaagaactcttcctcacgcgcgtcgggctcgacatcggcaaggtgtgggtcgcggacgacggcgccgcggtggcggtctggaccacgccggagagcgtcgaagcgggggcggtgttcgccgagatcggcccgcgcatggccgagttgagcggttcccggctggccgcgcagcaacagatggaaggcctcctggcgccgcaccggcccaaggagcccgcgtggttcctggccaccgtcggcgtctcgcccgaccaccagggcaagggtctgggcagcgccgtcgtgctccccggagtggaggcggccgagcgcgccggggtgcccgccttcctggagacctccgcgccccgcaacctccccttctacgagcggctcggcttcaccgtcaccgccgacgtcgaggtgcccgaaggaccgcgcacctggtgcatgacccgcaagcccggtgcctga

SEQ ID NO: 7161 - DNA, 2034 bp, Artificial Sequence
  Synthetic Polynucloetide
atggccttaccagtgaccgccttgctcctgccgctggccttgctgctccacgccgccaggccggaagtgcagctggttgaatctggcggaggactggttcaggctggcggatctctgagactgtcttgtgccgccagcggcagaacctttagcatgggctggtttagacaggcccctggcaaagagagagagttcgtcgccgccatcacatactctggcggcagcccttactacgccgactctgtgaagggcagattcaccatcagccgggacaacgccaagaacaccgtgtacctccagatgaacagcctgaagcctgaggacaccgccgtgtactactgcgccgccaatccaacatacggcagcgactggaacgccgagaattggggccagggaacccaagtgacagtgtctagcctcgagagcggcggaggcggatctttcgaacaactgcaactgcaagagtctggccctggcctggtcaagccttctgaaaccctgagcctgacctgtaccgtgtccggcggctctatcagcagcggcgattactactggggctggatcagacagcctccaggcaagggactcgaatggatcggcagcatcagctacagcggctccacctactacaacccaagcctgaagtccagagtgaccatcagcgtggacaccagcagaaaccagttctccctgaagctgagcagcgtgacagccgccgatacagccgtgtattattgcaccagagaggacagcagcaactggcggagtagaggacagggcacactggtcacagtgtcctctctcgaggacctgaagaacgtgttcccacctgaggtggccgtgttcgagcctagcgaggccgagatcagccacacccagaaagccaccctcgtgtgcctggctaccggcttctaccccgaccatgtggaactgtcttggtgggtcaacggcaaagaggtgcacagcggcgtgtctaccgacccccagccactgaaagaacagcccgccctgaacgacagccggtactgcctgagcagcagactgagagtgtccgccaccttctggcagaacccccggaaccacttcagatgccaggtgcagttctacggcctgagcgagaacgacgagtggacccaggacagagccaagcccgtgacccagatcgtgtctgccgaagcctggggcagagccgattgcggctttaccagcgagagctaccagcagggcgtgctgagcgccaccatcctgtacgagatcctgctgggcaaggccaccctgtacgccgtgctggtgtctgccctggtgctgatggctatggtcaagcggaaggacagccggggaagggccaagcgatctggatctggagcaacaaacttctcactactcaaacaagcaggtgacgtggaggagaatcccgggcctactagaggccatatgaccgagtacaagcccacggtgcgcctcgccacccgcgacgacgtccccagggccgtacgcaccctcgccgccgcgttcgccgactaccccgccacgcgccacaccgtcgatccggaccgccacatcgagcgggtcaccgagctgcaagaactcttcctcacgcgcgtcgggctcgacatcggcaaggtgtgggtcgcggacgacggcgccgcggtggcggtctggaccacgccggagagcgtcgaagcgggggcggtgttcgccgagatcggcccgcgcatggccgagttgagcggttcccggctggccgcgcagcaacagatggaaggcctcctggcgccgcaccggcccaaggagcccgcgtggttcctggccaccgtcggcgtctcgcccgaccaccagggcaagggtctgggcagcgccgtcgtgctccccggagtggaggcggccgagcgcgccggggtgcccgccttcctggagacctccgcgccccgcaacctccccttctacgagcggctcggcttcaccgtcaccgccgacgtcgaggtgcccgaaggaccgcgcacctggtgcatgacccgcaagcccggtgcctga

SEQ ID NO: 7162 - DNA, 2184 bp, Artificial Sequence
  Synthetic Polynucloetide
atggccttaccagtgaccgccttgctcctgccgctggccttgctgctccacgccgccaggccggaagtgcagctggttgaatctggcggaggactggttcaggctggcggatctctgagactgtcttgtgccgccagcggcagaacctttagcatgggctggtttagacaggcccctggcaaagagagagagttcgtcgccgccatcacatactctggcggcagcccttactacgccgactctgtgaagggcagattcaccatcagccgggacaacgccaagaacaccgtgtacctccagatgaacagcctgaagcctgaggacaccgccgtgtactactgcgccgccaatccaacatacggcagcgactggaacgccgagaattggggccagggaacccaagtgacagtgtctagcctcgagagcggcggaggcggatctttcgaacaactgcaactgcaagagtctggccctggcctggtcaagccttctgaaaccctgagcctgacctgtaccgtgtccggcggctctatcagcagcggcgattactactggggctggatcagacagcctccaggcaagggactcgaatggatcggcagcatcagctacagcggctccacctactacaacccaagcctgaagtccagagtgaccatcagcgtggacaccagcagaaaccagttctccctgaagctgagcagcgtgacagccgccgatacagccgtgtattattgcaccagagaggacagcagcaactggcggagtagaggacagggcacactggtcacagtgtcctctacgcgtgagcagaaactgatctcggaagaggatctggggagcggcaccccattcccttctctggcccctcccatcatgctgctggtggacggcaagcagcagatggtggtcgtgtgcctggtgctggatgtggccccacctggactggacagccccatctggtttagcgccggcaatggctctgccctggacgcctttacctacggcccaagccctgccaccgatggcacctggacaaatctggcccacctgagcctgcccagcgaggaactggcttcttgggagcctctcgtgtgccacacaggacctggcgctgagggacacagcagatccacccagcctatgcacctgtctggcgaggccagcaccgccagaacctgtcctcaggaacctctgagaggcacccctggcggagcactgtggctgggagtgctgagactgctgctgttcaagctgctgctgtttgacctgctgctgacctgctcctgtctgtgcgatcctgccggccctctgccttctcctgccaccaccacaagactgagagccctgggcagccacagactgcaccctgccacagagacaggcggcagagaggccacaagcagccctagaccccagcccagagacagaagatggggcgataccccccctggcagaaagcctggatctccagtccgcgccaagagaagcggatctggcgtgaagcagaccctgaatttcgacctgctgaagctggctggcgacgtggaatccaacccaggcccttctagatctagaggccatatgaccgagtacaagcccacggtgcgcctcgccacccgcgacgacgtccccagggccgtacgcaccctcgccgccgcgttcgccgactaccccgccacgcgccacaccgtcgatccggaccgccacatcgagcgggtcaccgagctgcaagaactcttcctcacgcgcgtcgggctcgacatcggcaaggtgtgggtcgcggacgacggcgccgcggtggcggtctggaccacgccggagagcgtcgaagcgggggcggtgttcgccgagatcggcccgcgcatggccgagttgagcggttcccggctggccgcgcagcaacagatggaaggcctcctggcgccgcaccggcccaaggagcccgcgtggttcctggccaccgtcggcgtctcgcccgaccaccagggcaagggtctgggcagcgccgtcgtgctccccggagtggaggcggccgagcgcgccggggtgcccgccttcctggagacctccgcgccccgcaacctccccttctacgagcggctcggcttcaccgtcaccgccgacgtcgaggtgcccgaaggaccgcgcacctggtgcatgacccgcaagcccggtgcctga

SEQ ID NO: 7163 - DNA, 1650 bp, Artificial Sequence
  Synthetic Polynucloetide
atggccttaccagtgaccgccttgctcctgccgctggccttgctgctccacgccgccaggccggaagtgcagctggttgaatctggcggaggactggttcaggctggcggatctctgagactgtcttgtgccgccagcggcagaacctttagcatgggctggtttagacaggcccctggcaaagagagagagttcgtcgccgccatcacatactctggcggcagcccttactacgccgactctgtgaagggcagattcaccatcagccgggacaacgccaagaacaccgtgtacctccagatgaacagcctgaagcctgaggacaccgccgtgtactactgcgccgccaatccaacatacggcagcgactggaacgccgagaattggggccagggaacccaagtgacagtgtctagcctcgaggacctgaagaacgtgttcccacctgaggtggccgtgttcgagcctagcgaggccgagatcagccacacccagaaagccaccctcgtgtgcctggctaccggcttctaccccgaccatgtggaactgtcttggtgggtcaacggcaaagaggtgcacagcggcgtgtctaccgacccccagccactgaaagaacagcccgccctgaacgacagccggtactgcctgagcagcagactgagagtgtccgccaccttctggcagaacccccggaaccacttcagatgccaggtgcagttctacggcctgagcgagaacgacgagtggacccaggacagagccaagcccgtgacccagatcgtgtctgccgaagcctggggcagagccgattgcggctttaccagcgagagctaccagcagggcgtgctgagcgccaccatcctgtacgagatcctgctgggcaaggccaccctgtacgccgtgctggtgtctgccctggtgctgatggctatggtcaagcggaaggacagccggggaagggccaagcgatctggatctggagcaacaaacttctcactactcaaacaagcaggtgacgtggaggagaatcccgggcctactagaggccatatgaccgagtacaagcccacggtgcgcctcgccacccgcgacgacgtccccagggccgtacgcaccctcgccgccgcgttcgccgactaccccgccacgcgccacaccgtcgatccggaccgccacatcgagcgggtcaccgagctgcaagaactcttcctcacgcgcgtcgggctcgacatcggcaaggtgtgggtcgcggacgacggcgccgcggtggcggtctggaccacgccggagagcgtcgaagcgggggcggtgttcgccgagatcggcccgcgcatggccgagttgagcggttcccggctggccgcgcagcaacagatggaaggcctcctggcgccgcaccggcccaaggagcccgcgtggttcctggccaccgtcggcgtctcgcccgaccaccagggcaagggtctgggcagcgccgtcgtgctccccggagtggaggcggccgagcgcgccggggtgcccgccttcctggagacctccgcgccccgcaacctccccttctacgagcggctcggcttcaccgtcaccgccgacgtcgaggtgcccgaaggaccgcgcacctggtgcatgacccgcaagcccggtgcctga

SEQ ID NO: 7164 - DNA, 957 bp, Artificial Sequence
  Synthetic Polynucloetide
atggccttaccagtgaccgccttgctcctgccgctggccttgctgctccacgccgccaggccggaagtgcagctggttgaatctggcggaggactggttcaggctggcggatctctgagactgtcttgtgccgccagcggcagaacctttagcatgggctggtttagacaggcccctggcaaagagagagagttcgtcgccgccatcacatactctggcggcagcccttactacgccgactctgtgaagggcagattcaccatcagccgggacaacgccaagaacaccgtgtacctccagatgaacagcctgaagcctgaggacaccgccgtgtactactgcgccgccaatccaacatacggcagcgactggaacgccgagaattggggccagggaacccaagtgacagtgtctagcctcgaggacctgaagaacgtgttcccacctgaggtggccgtgttcgagcctagcgaggccgagatcagccacacccagaaagccaccctcgtgtgcctggctaccggcttctaccccgaccatgtggaactgtcttggtgggtcaacggcaaagaggtgcacagcggcgtgtctaccgacccccagccactgaaagaacagcccgccctgaacgacagccggtactgcctgagcagcagactgagagtgtccgccaccttctggcagaacccccggaaccacttcagatgccaggtgcagttctacggcctgagcgagaacgacgagtggacccaggacagagccaagcccgtgacccagatcgtgtctgccgaagcctggggcagagccgattgcggctttaccagcgagagctaccagcagggcgtgctgagcgccaccatcctgtacgagatcctgctgggcaaggccaccctgtacgccgtgctggtgtctgccctggtgctgatggctatggtcaagcggaaggacagccgggga

SEQ ID NO: 7165 - DNA, 1344 bp, Artificial Sequence
  Synthetic Polynucloetide
atggactggatttggcgcatccttttccttgtcggcgctgctaccggcgcgcattccttcgaacaactgcaactgcaagagtctggccctggcctggtcaagccttctgaaaccctgagcctgacctgtaccgtgtccggcggctctatcagcagcggcgattactactggggctggatcagacagcctccaggcaagggactcgaatggatcggcagcatcagctacagcggctccacctactacaacccaagcctgaagtccagagtgaccatcagcgtggacaccagcagaaaccagttctccctgaagctgagcagcgtgacagccgccgatacagccgtgtattattgcaccagagaggacagcagcaactggcggagtagaggacagggcacactggtcacagtgtcctctacgcgtatccagaaccctgatcctgccgtgtaccagctgcgggatagcaagagcagcgacaagagcgtgtgtctgttcaccgacttcgacagccagaccaacgtgtcccagagcaaggactccgacgtgtacatcaccgataagaccgtgctggacatgcggagcatggacttcaagagcaactccgccgtggcctggtccaacaagtccgatttcgcctgcgccaacgccttcaacaacagcattatccccgaggacacattcttcccaagccccgagagcagctgcgacgtgaagctggtggaaaagagcttcgagacagacaccaacctgaacttccagaacctgagcgtgatcggcttcagaatcctgctgctgaaagtggccggctttaacctgctgatgaccctgcggctgtggtccagccgcgccaagagaagcggatctggcgtgaagcagaccctgaatttcgacctgctgaagctggctggcgacgtggaatccaacccaggcccttctagaggccatatggccaagcctttgtctcaagaagaatccaccctcattgaaagagcaacggctacaatcaacagcatccccatctctgaagactacagcgtcgccagcgcagctctctctagcgacggccgcatcttcactggtgtcaatgtatatcattttactgggggaccttgtgcagaactcgtggtgctgggcactgctgctgctgcggcagctggcaacctgacttgtatcgtcgcgatcggaaatgagaacaggggcatcttgagcccctgcggacggtgccgacaggtgcttctcgatctgcatcctgggatcaaagccatagtgaaggacagtgatggacagccgacggcagttgggattcgtgaattgctgccctctggttatgtgtgggagggctga

SEQ ID NO: 7166 - DNA, 843 bp, Artificial Sequence
  Synthetic Polynucloetide
atggactggatttggcgcatccttttccttgtcggcgctgctaccggcgcgcattccttcgaacaactgcaactgcaagagtctggccctggcctggtcaagccttctgaaaccctgagcctgacctgtaccgtgtccggcggctctatcagcagcggcgattactactggggctggatcagacagcctccaggcaagggactcgaatggatcggcagcatcagctacagcggctccacctactacaacccaagcctgaagtccagagtgaccatcagcgtggacaccagcagaaaccagttctccctgaagctgagcagcgtgacagccgccgatacagccgtgtattattgcaccagagaggacagcagcaactggcggagtagaggacagggcacactggtcacagtgtcctctacgcgtatccagaaccctgatcctgccgtgtaccagctgcgggatagcaagagcagcgacaagagcgtgtgtctgttcaccgacttcgacagccagaccaacgtgtcccagagcaaggactccgacgtgtacatcaccgataagaccgtgctggacatgcggagcatggacttcaagagcaactccgccgtggcctggtccaacaagtccgatttcgcctgcgccaacgccttcaacaacagcattatccccgaggacacattcttcccaagccccgagagcagctgcgacgtgaagctggtggaaaagagcttcgagacagacaccaacctgaacttccagaacctgagcgtgatcggcttcagaatcctgctgctgaaagtggccggctttaacctgctgatgaccctgcggctgtggtccagc

SEQ ID NO: 7167 - DNA, 1704 bp, Artificial Sequence
  Synthetic Polynucloetide
atggccttaccagtgaccgccttgctcctgccgctggccttgctgctccacgccgccaggccggaagtgcagctggttgaatctggcggaggactggttcaggctggcggatctctgagactgtcttgtgccgccagcggcagaacctttagcatgggctggtttagacaggcccctggcaaagagagagagttcgtcgccgccatcacatactctggcggcagcccttactacgccgactctgtgaagggcagattcaccatcagccgggacaacgccaagaacaccgtgtacctccagatgaacagcctgaagcctgaggacaccgccgtgtactactgcgccgccaatccaacatacggcagcgactggaacgccgagaattggggccagggaacccaagtgacagtgtctagcctcgaggggaaaccaattcccaaccctcttctgggactggattcaaccggcagcggcgaggacctgaagaacgtgttcccacctgaggtggccgtgttcgagcctagcgaggccgagatcagccacacccagaaagccaccctcgtgtgcctggctaccggcttctaccccgaccatgtggaactgtcttggtgggtcaacggcaaagaggtgcacagcggcgtgtgtaccgacccccagccactgaaagaacagcccgccctgaacgacagccggtactgcctgagcagcagactgagagtgtccgccaccttctggcagaacccccggaaccacttcagatgccaggtgcagttctacggcctgagcgagaacgacgagtggacccaggacagagccaagcccgtgacccagatcgtgtctgccgaagcctggggcagagccgattgcggctttaccagcgagagctaccagcagggcgtgctgagcgccaccatcctgtacgagatcctgctgggcaaggccaccctgtacgccgtgctggtgtctgccctggtgctgatggctatggtcaagcggaaggacagccggggaagggccaagcgatctggatctggagcaacaaacttctcactactcaaacaagcaggtgacgtggaggagaatcccgggcctactagaggccatatgaccgagtacaagcccacggtgcgcctcgccacccgcgacgacgtccccagggccgtacgcaccctcgccgccgcgttcgccgactaccccgccacgcgccacaccgtcgatccggaccgccacatcgagcgggtcaccgagctgcaagaactcttcctcacgcgcgtcgggctcgacatcggcaaggtgtgggtcgcggacgacggcgccgcggtggcggtctggaccacgccggagagcgtcgaagcgggggcggtgttcgccgagatcggcccgcgcatggccgagttgagcggttcccggctggccgcgcagcaacagatggaaggcctcctggcgccgcaccggcccaaggagcccgcgtggttcctggccaccgtcggcgtctcgcccgaccaccagggcaagggtctgggcagcgccgtcgtgctccccggagtggaggcggccgagcgcgccggggtgcccgccttcctggagacctccgcgccccgcaacctccccttctacgagcggctcggcttcaccgtcaccgccgacgtcgaggtgcccgaaggaccgcgcacctggtgcatgacccgcaagcccggtgcctga

SEQ ID NO: 7168 - DNA, 1014 bp, Artificial Sequence
  Synthetic Polynucloetide
atggccttaccagtgaccgccttgctcctgccgctggccttgctgctccacgccgccaggccggaagtgcagctggttgaatctggcggaggactggttcaggctggcggatctctgagactgtcttgtgccgccagcggcagaacctttagcatgggctggtttagacaggcccctggcaaagagagagagttcgtcgccgccatcacatactctggcggcagcccttactacgccgactctgtgaagggcagattcaccatcagccgggacaacgccaagaacaccgtgtacctccagatgaacagcctgaagcctgaggacaccgccgtgtactactgcgccgccaatccaacatacggcagcgactggaacgccgagaattggggccagggaacccaagtgacagtgtctagcctcgaggggaaaccaattcccaaccctcttctgggactggattcaaccggcagcggcgaggacctgaagaacgtgttcccacctgaggtggccgtgttcgagcctagcgaggccgagatcagccacacccagaaagccaccctcgtgtgcctggctaccggcttctaccccgaccatgtggaactgtcttggtgggtcaacggcaaagaggtgcacagcggcgtgtgtaccgacccccagccactgaaagaacagcccgccctgaacgacagccggtactgcctgagcagcagactgagagtgtccgccaccttctggcagaacccccggaaccacttcagatgccaggtgcagttctacggcctgagcgagaacgacgagtggacccaggacagagccaagcccgtgacccagatcgtgtctgccgaagcctggggcagagccgattgcggctttaccagcgagagctaccagcagggcgtgctgagcgccaccatcctgtacgagatcctgctgggcaaggccaccctgtacgccgtgctggtgtctgccctggtgctgatggctatggtcaagcggaaggacagccggggatga

SEQ ID NO: 7169 - DNA, 1380 bp, Artificial Sequence
  Synthetic Polynucloetide
atggactggatttggcgcatccttttccttgtcggcgctgctaccggcgcgcattccttcgaacaactgcaactgcaagagtctggccctggcctggtcaagccttctgaaaccctgagcctgacctgtaccgtgtccggcggctctatcagcagcggcgattactactggggctggatcagacagcctccaggcaagggactcgaatggatcggcagcatcagctacagcggctccacctactacaacccaagcctgaagtccagagtgaccatcagcgtggacaccagcagaaaccagttctccctgaagctgagcagcgtgacagccgccgatacagccgtgtattattgcaccagagaggacagcagcaactggcggagtagaggacagggcacactggtcacagtgtcctctacgcgtgagcagaaactgatctcggaagaggatgggagcggcatccagaaccctgatcctgccgtgtaccagctgcgggatagcaagagcagcgacaagagcgtgtgtctgttcaccgacttcgacagccagaccaacgtgtcccagagcaaggactccgacgtgtacatcaccgataagtgcgtgctggacatgcggagcatggacttcaagagcaactccgccgtggcctggtccaacaagtccgatttcgcctgcgccaacgccttcaacaacagcattatccccgaggacacattcttcccaagccccgagagcagctgcgacgtgaagctggtggaaaagagcttcgagacagacaccaacctgaacttccagaacctgagcgtgatcggcttcagaatcctgctgctgaaagtggccggctttaacctgctgatgaccctgcggctgtggtccagccgcgccaagagaagcggatctggcgtgaagcagaccctgaatttcgacctgctgaagctggctggcgacgtggaatccaacccaggcccttctagaggccatatggccaagcctttgtctcaagaagaatccaccctcattgaaagagcaacggctacaatcaacagcatccccatctctgaagactacagcgtcgccagcgcagctctctctagcgacggccgcatcttcactggtgtcaatgtatatcattttactgggggaccttgtgcagaactcgtggtgctgggcactgctgctgctgcggcagctggcaacctgacttgtatcgtcgcgatcggaaatgagaacaggggcatcttgagcccctgcggacggtgccgacaggtgcttctcgatctgcatcctgggatcaaagccatagtgaaggacagtgatggacagccgacggcagttgggattcgtgaattgctgccctctggttatgtgtgggagggctga

SEQ ID NO: 7170 - DNA, 882 bp, Artificial Sequence
  Synthetic Polynucloetide
atggactggatttggcgcatccttttccttgtcggcgctgctaccggcgcgcattccttcgaacaactgcaactgcaagagtctggccctggcctggtcaagccttctgaaaccctgagcctgacctgtaccgtgtccggcggctctatcagcagcggcgattactactggggctggatcagacagcctccaggcaagggactcgaatggatcggcagcatcagctacagcggctccacctactacaacccaagcctgaagtccagagtgaccatcagcgtggacaccagcagaaaccagttctccctgaagctgagcagcgtgacagccgccgatacagccgtgtattattgcaccagagaggacagcagcaactggcggagtagaggacagggcacactggtcacagtgtcctctacgcgtgagcagaaactgatctcggaagaggatgggagcggcatccagaaccctgatcctgccgtgtaccagctgcgggatagcaagagcagcgacaagagcgtgtgtctgttcaccgacttcgacagccagaccaacgtgtcccagagcaaggactccgacgtgtacatcaccgataagtgcgtgctggacatgcggagcatggacttcaagagcaactccgccgtggcctggtccaacaagtccgatttcgcctgcgccaacgccttcaacaacagcattatccccgaggacacattcttcccaagccccgagagcagctgcgacgtgaagctggtggaaaagagcttcgagacagacaccaacctgaacttccagaacctgagcgtgatcggcttcagaatcctgctgctgaaagtggccggctttaacctgctgatgaccctgcggctgtggtccagctga

SEQ ID NO: 7171 - DNA, 1938 bp, Artificial Sequence
  Synthetic Polynucloetide
atggccttaccagtgaccgccttgctcctgccgctggccttgctgctccacgccgccaggccggaagtgcagctggttgaatctggcggaggactggttcaggctggcggatctctgagactgtcttgtgccgccagcggcagaacctttagcatgggctggtttagacaggcccctggcaaagagagagagttcgtcgccgccatcacatactctggcggcagcccttactacgccgactctgtgaagggcagattcaccatcagccgggacaacgccaagaacaccgtgtacctccagatgaacagcctgaagcctgaggacaccgccgtgtactactgcgccgccaatccaacatacggcagcgactggaacgccgagaattggggccagggaacccaagtgacagtgtctagcctcgagagcggcggaggcggatctttcgaacaactgcaactgcaagagtctggccctggcctggtcaagccttctgaaaccctgagcctgacctgtaccgtgtccggcggctctatcagcagcggcgattactactggggctggatcagacagcctccaggcaagggactcgaatggatcggcagcatcagctacagcggctccacctactacaacccaagcctgaagtccagagtgaccatcagcgtggacaccagcagaaaccagttctccctgaagctgagcagcgtgacagccgccgatacagccgtgtattattgcaccagagaggacagcagcaactggcggagtagaggacagggcacactggtcacagtgtcctctacgcgtgggagcggcatccagaaccctgatcctgccgtgtaccagctgcgggatagcaagagcagcgacaagagcgtgtgtctgttcaccgacttcgacagccagaccaacgtgtcccagagcaaggactccgacgtgtacatcaccgataagaccgtgctggacatgcggagcatggacttcaagagcaactccgccgtggcctggtccaacaagtccgatttcgcctgcgccaacgccttcaacaacagcattatccccgaggacacattcttcccaagcagcgacgtgccctgcgacgtgaagctggtggaaaagagcttcgagacagacaccaacctgaacttccagaacctgagcgtgatcggcttcagaatcctgctgctgaaagtggccggctttaacctgctgatgaccctgcggctgtggtccagccgcgccaagagaagcggatctggcgtgaagcagaccctgaatttcgacctgctgaagctggctggcgacgtggaatccaacccaggcccttctagaggccatatgaccgagtacaagcccacggtgcgcctcgccacccgcgacgacgtccccagggccgtacgcaccctcgccgccgcgttcgccgactaccccgccacgcgccacaccgtcgatccggaccgccacatcgagcgggtcaccgagctgcaagaactcttcctcacgcgcgtcgggctcgacatcggcaaggtgtgggtcgcggacgacggcgccgcggtggcggtctggaccacgccggagagcgtcgaagcgggggcggtgttcgccgagatcggcccgcgcatggccgagttgagcggttcccggctggccgcgcagcaacagatggaaggcctcctggcgccgcaccggcccaaggagcccgcgtggttcctggccaccgtcggcgtctcgcccgaccaccagggcaagggtctgggcagcgccgtcgtgctccccggagtggaggcggccgagcgcgccggggtgcccgccttcctggagacctccgcgccccgcaacctccccttctacgagcggctcggcttcaccgtcaccgccgacgtcgaggtgcccgaaggaccgcgcacctggtgcatgacccgcaagcccggtgcctga

SEQ ID NO: 7172 - DNA, 2034 bp, Artificial Sequence
  Synthetic Polynucloetide
atggccttaccagtgaccgccttgctcctgccgctggccttgctgctccacgccgccaggccggaagtgcagctggttgaatctggcggaggactggttcaggctggcggatctctgagactgtcttgtgccgccagcggcagaacctttagcatgggctggtttagacaggcccctggcaaagagagagagttcgtcgccgccatcacatactctggcggcagcccttactacgccgactctgtgaagggcagattcaccatcagccgggacaacgccaagaacaccgtgtacctccagatgaacagcctgaagcctgaggacaccgccgtgtactactgcgccgccaatccaacatacggcagcgactggaacgccgagaattggggccagggaacccaagtgacagtgtctagcctcgagagcggcggaggcggatctttcgaacaactgcaactgcaagagtctggccctggcctggtcaagccttctgaaaccctgagcctgacctgtaccgtgtccggcggctctatcagcagcggcgattactactggggctggatcagacagcctccaggcaagggactcgaatggatcggcagcatcagctacagcggctccacctactacaacccaagcctgaagtccagagtgaccatcagcgtggacaccagcagaaaccagttctccctgaagctgagcagcgtgacagccgccgatacagccgtgtattattgcaccagagaggacagcagcaactggcggagtagaggacagggcacactggtcacagtgtcctctctcgaggacctgaagaacgtgttcccacctgaggtggccgtgttcgagcctagcaaggccgagatcgcccacacccagaaagccaccctcgtgtgcctggctaccggcttctaccccgaccatgtggaactgtcttggtgggtcaacggcaaagaggtgcacagcggcgtgtctaccgacccccagccactgaaagaacagcccgccctgaacgacagccggtactgcctgagcagcagactgagagtgtccgccaccttctggcagaacccccggaaccacttcagatgccaggtgcagttctacggcctgagcgagaacgacgagtggacccaggacagagccaagcccgtgacccagatcgtgtctgccgaagcctggggcagagccgattgcggcatcaccagcgccagctaccaccagggcgtgctgagcgccaccatcctgtacgagatcctgctgggcaaggccaccctgtacgccgtgctggtgtctgccctggtgctgatggctatggtcaagcggaaggacagccggggaagggccaagcgatctggatctggagcaacaaacttctcactactcaaacaagcaggtgacgtggaggagaatcccgggcctactagaggccatatgaccgagtacaagcccacggtgcgcctcgccacccgcgacgacgtccccagggccgtacgcaccctcgccgccgcgttcgccgactaccccgccacgcgccacaccgtcgatccggaccgccacatcgagcgggtcaccgagctgcaagaactcttcctcacgcgcgtcgggctcgacatcggcaaggtgtgggtcgcggacgacggcgccgcggtggcggtctggaccacgccggagagcgtcgaagcgggggcggtgttcgccgagatcggcccgcgcatggccgagttgagcggttcccggctggccgcgcagcaacagatggaaggcctcctggcgccgcaccggcccaaggagcccgcgtggttcctggccaccgtcggcgtctcgcccgaccaccagggcaagggtctgggcagcgccgtcgtgctccccggagtggaggcggccgagcgcgccggggtgcccgccttcctggagacctccgcgccccgcaacctccccttctacgagcggctcggcttcaccgtcaccgccgacgtcgaggtgcccgaaggaccgcgcacctggtgcatgacccgcaagcccggtgcctga

SEQ ID NO: 7173 - DNA, 2103 bp, Artificial Sequence
  Synthetic Polynucloetide
atggccttaccagtgaccgccttgctcctgccgctggccttgctgctccacgccgccaggccggaagtgcagctggttgaatctggcggaggactggttcaggctggcggatctctgagactgtcttgtgccgccagcggcagaacctttagcatgggctggtttagacaggcccctggcaaagagagagagttcgtcgccgccatcacatactctggcggcagcccttactacgccgactctgtgaagggcagattcaccatcagccgggacaacgccaagaacaccgtgtacctccagatgaacagcctgaagcctgaggacaccgccgtgtactactgcgccgccaatccaacatacggcagcgactggaacgccgagaattggggccagggaacccaagtgacagtgtctagcctcgagagcggcggaggcggatctttcgaacaactgcaactgcaagagtctggccctggcctggtcaagccttctgaaaccctgagcctgacctgtaccgtgtccggcggctctatcagcagcggcgattactactggggctggatcagacagcctccaggcaagggactcgaatggatcggcagcatcagctacagcggctccacctactacaacccaagcctgaagtccagagtgaccatcagcgtggacaccagcagaaaccagttctccctgaagctgagcagcgtgacagccgccgatacagccgtgtattattgcaccagagaggacagcagcaactggcggagtagaggacagggcacactggtcacagtgtcctctacgcgtgggtctggaggcggaggcagcggcggaggcgggagcggcgacggtaacgaggagatgggaggaatcactcaaaccccttacaaagtctcaatttcaggaacaactgttatccttacatgtccccagtatcctggcagcgagatcctttggcagcataacgacaagaatatagggggagatgaagacgataagaatatcggatctgacgaggatcacttgagcctgaaagagttctccgagcttgaacaaagcggatattatgtgtgctatccgcgcgggtcaaagccggaagacgctaacttttacctttatctccgagccagagtgtgcgaaaattgcatggaaatggacgttatgtccgttgctacaatagttatcgtagatatatgcatcacgggtggactgcttctgctggtttattattggtccaagaatagaaaggccaaagctaaacccgtgaccagaggcgctggcgcaggcggaaggcaaaggggacaaaacaaagaacggccaccaccagtgccaaatccagattatgagcctattcggaaaggacagagggacctgtactctggcctgaatcagagaagaatccgcgccaagagaagcggatctggcgtgaagcagaccctgaatttcgacctgctgaagctggctggcgacgtggaatccaacccaggcccttctagaggccatatgaccgagtacaagcccacggtgcgcctcgccacccgcgacgacgtccccagggccgtacgcaccctcgccgccgcgttcgccgactaccccgccacgcgccacaccgtcgatccggaccgccacatcgagcgggtcaccgagctgcaagaactcttcctcacgcgcgtcgggctcgacatcggcaaggtgtgggtcgcggacgacggcgccgcggtggcggtctggaccacgccggagagcgtcgaagcgggggcggtgttcgccgagatcggcccgcgcatggccgagttgagcggttcccggctggccgcgcagcaacagatggaaggcctcctggcgccgcaccggcccaaggagcccgcgtggttcctggccaccgtcggcgtctcgcccgaccaccagggcaagggtctgggcagcgccgtcgtgctccccggagtggaggcggccgagcgcgccggggtgcccgccttcctggagacctccgcgccccgcaacctccccttctacgagcggctcggcttcaccgtcaccgccgacgtcgaggtgcccgaaggaccgcgcacctggtgcatgacccgcaagcccggtgcctga

SEQ ID NO: 7174 - DNA, 1998 bp, Artificial Sequence
  Synthetic Polynucloetide
atggccttaccagtgaccgccttgctcctgccgctggccttgctgctccacgccgccaggccggaagtgcagctggttgaatctggcggaggactggttcaggctggcggatctctgagactgtcttgtgccgccagcggcagaacctttagcatgggctggtttagacaggcccctggcaaagagagagagttcgtcgccgccatcacatactctggcggcagcccttactacgccgactctgtgaagggcagattcaccatcagccgggacaacgccaagaacaccgtgtacctccagatgaacagcctgaagcctgaggacaccgccgtgtactactgcgccgccaatccaacatacggcagcgactggaacgccgagaattggggccagggaacccaagtgacagtgtctagcctcgagagcggcggaggcggatctttcgaacaactgcaactgcaagagtctggccctggcctggtcaagccttctgaaaccctgagcctgacctgtaccgtgtccggcggctctatcagcagcggcgattactactggggctggatcagacagcctccaggcaagggactcgaatggatcggcagcatcagctacagcggctccacctactacaacccaagcctgaagtccagagtgaccatcagcgtggacaccagcagaaaccagttctccctgaagctgagcagcgtgacagccgccgatacagccgtgtattattgcaccagagaggacagcagcaactggcggagtagaggacagggcacactggtcacagtgtcctctacgcgtgggtctggaggcggaggcagcggcggaggcgggagcggcttcaagatccccatcgaggaactggaagatcgggtgttcgtgaactgcaacacctctatcacctgggtggaaggcaccgtgggaacactgctgagcgacatcaccagactggacctcggcaagcggattctggaccctcggggcatctacagatgcaacggcaccgacatctacaaggacaaagaaagcaccgtgcaggtccactacagaatgtgccagtcctgcgtggaactggaccctgctacagtggccggcatcatcgtgaccgatgtgatcgctactctgctgctggctctgggagtgttctgcttcgccggacacgaaacaggcagactgtctggcgctgccgatacacaggccctgctgagaaacgaccaagtgtatcagcccctgcgcgacagagatgatgcccagtattctcacctcggcggcaactgggctagaaacaagcgcgccaagagaagcggatctggcgtgaagcagaccctgaatttcgacctgctgaagctggctggcgacgtggaatccaacccaggcccttctagaggccatatgaccgagtacaagcccacggtgcgcctcgccacccgcgacgacgtccccagggccgtacgcaccctcgccgccgcgttcgccgactaccccgccacgcgccacaccgtcgatccggaccgccacatcgagcgggtcaccgagctgcaagaactcttcctcacgcgcgtcgggctcgacatcggcaaggtgtgggtcgcggacgacggcgccgcggtggcggtctggaccacgccggagagcgtcgaagcgggggcggtgttcgccgagatcggcccgcgcatggccgagttgagcggttcccggctggccgcgcagcaacagatggaaggcctcctggcgccgcaccggcccaaggagcccgcgtggttcctggccaccgtcggcgtctcgcccgaccaccagggcaagggtctgggcagcgccgtcgtgctccccggagtggaggcggccgagcgcgccggggtgcccgccttcctggagacctccgcgccccgcaacctccccttctacgagcggctcggcttcaccgtcaccgccgacgtcgaggtgcccgaaggaccgcgcacctggtgcatgacccgcaagcccggtgcctga

SEQ ID NO: 7175 - DNA, 2028 bp, Artificial Sequence
  Synthetic Polynucloetide
atggccttaccagtgaccgccttgctcctgccgctggccttgctgctccacgccgccaggccggaagtgcagctggttgaatctggcggaggactggttcaggctggcggatctctgagactgtcttgtgccgccagcggcagaacctttagcatgggctggtttagacaggcccctggcaaagagagagagttcgtcgccgccatcacatactctggcggcagcccttactacgccgactctgtgaagggcagattcaccatcagccgggacaacgccaagaacaccgtgtacctccagatgaacagcctgaagcctgaggacaccgccgtgtactactgcgccgccaatccaacatacggcagcgactggaacgccgagaattggggccagggaacccaagtgacagtgtctagcctcgagagcggcggaggcggatctttcgaacaactgcaactgcaagagtctggccctggcctggtcaagccttctgaaaccctgagcctgacctgtaccgtgtccggcggctctatcagcagcggcgattactactggggctggatcagacagcctccaggcaagggactcgaatggatcggcagcatcagctacagcggctccacctactacaacccaagcctgaagtccagagtgaccatcagcgtggacaccagcagaaaccagttctccctgaagctgagcagcgtgacagccgccgatacagccgtgtattattgcaccagagaggacagcagcaactggcggagtagaggacagggcacactggtcacagtgtcctctacgcgtgggtctggaggcggaggcagcggcggaggcgggagcggccagagcatcaagggcaaccacctggtcaaggtgtacgactaccaagaggacggcagcgtgctgctgacatgtgatgccgaggccaagaacatcacctggtttaaggacggcaagatgatcggcttcctgaccgaggacaagaagaagtggaacctgggcagcaacgctaaggaccccagaggcatgtatcagtgcaagggcagccagaacaagagcaagcccctccaggtgtactaccggatgtgccagaactgcatcgagctgaacgccgctaccatcagcggctttctgttcgccgagatcgtgtccatcttcgtgctggccgtgggcgtgtactttatcgctggacaggatggcgtgcggcagagcagagcttccgataagcaaaccctgctgcctaacgaccagctgtaccagcctctgaaggacagagaggacgaccagtacagccacctccagggcaatcagctgagaagaaaccgcgccaagagaagcggatctggcgtgaagcagaccctgaatttcgacctgctgaagctggctggcgacgtggaatccaacccaggcccttctagaggccatatgaccgagtacaagcccacggtgcgcctcgccacccgcgacgacgtccccagggccgtacgcaccctcgccgccgcgttcgccgactaccccgccacgcgccacaccgtcgatccggaccgccacatcgagcgggtcaccgagctgcaagaactcttcctcacgcgcgtcgggctcgacatcggcaaggtgtgggtcgcggacgacggcgccgcggtggcggtctggaccacgccggagagcgtcgaagcgggggcggtgttcgccgagatcggcccgcgcatggccgagttgagcggttcccggctggccgcgcagcaacagatggaaggcctcctggcgccgcaccggcccaaggagcccgcgtggttcctggccaccgtcggcgtctcgcccgaccaccagggcaagggtctgggcagcgccgtcgtgctccccggagtggaggcggccgagcgcgccggggtgcccgccttcctggagacctccgcgccccgcaacctccccttctacgagcggctcggcttcaccgtcaccgccgacgtcgaggtgcccgaaggaccgcgcacctggtgcatgacccgcaagcccggtgcctga

SEQ ID NO: 7176 - DNA, 1977 bp, Artificial Sequence
  Synthetic Polynucloetide
atggccttaccagtgaccgccttgctcctgccgctggccttgctgctccacgccgccaggccggaagtgcagctggttgaatctggcggaggactggttcaggctggcggatctctgagactgtcttgtgccgccagcggcagaacctttagcatgggctggtttagacaggcccctggcaaagagagagagttcgtcgccgccatcacatactctggcggcagcccttactacgccgactctgtgaagggcagattcaccatcagccgggacaacgccaagaacaccgtgtacctccagatgaacagcctgaagcctgaggacaccgccgtgtactactgcgccgccaatccaacatacggcagcgactggaacgccgagaattggggccagggaacccaagtgacagtgtctagcctcgagagcggcggaggcggatctttcgaacaactgcaactgcaagagtctggccctggcctggtcaagccttctgaaaccctgagcctgacctgtaccgtgtccggcggctctatcagcagcggcgattactactggggctggatcagacagcctccaggcaagggactcgaatggatcggcagcatcagctacagcggctccacctactacaacccaagcctgaagtccagagtgaccatcagcgtggacaccagcagaaaccagttctccctgaagctgagcagcgtgacagccgccgatacagccgtgtattattgcaccagagaggacagcagcaactggcggagtagaggacagggcacactggtcacagtgtcctctacgcgtgggtctggaggcggaggcagcggcggaggcgggagcggccagagttttgggttgttggaccctaaattgtgctatctgttggacggaatcctgttcatttacggagtgatcctgaccgcattgttcctgcgggttaagttttccagatccgcagacgcacccgcttaccaacaagggcagaaccaactctacaatgaacttaatttggggcggagggaagagtacgacgttctggacaaaaggaggggacgagatcccgagatgggcggaaagcctcagcgaaggaagaatccgcaagaggggctttataacgaactccagaaagataaaatggcagaagcctatagtgagattgggatgaagggagaaaggaggaggggtaaaggtcacgatgggttgtaccaaggattgagcacagccactaaagatacctatgatgcgctccacatgcaggccctgccgccaagacgcgccaagagaagcggatctggcgtgaagcagaccctgaatttcgacctgctgaagctggctggcgacgtggaatccaacccaggcccttctagaggccatatgaccgagtacaagcccacggtgcgcctcgccacccgcgacgacgtccccagggccgtacgcaccctcgccgccgcgttcgccgactaccccgccacgcgccacaccgtcgatccggaccgccacatcgagcgggtcaccgagctgcaagaactcttcctcacgcgcgtcgggctcgacatcggcaaggtgtgggtcgcggacgacggcgccgcggtggcggtctggaccacgccggagagcgtcgaagcgggggcggtgttcgccgagatcggcccgcgcatggccgagttgagcggttcccggctggccgcgcagcaacagatggaaggcctcctggcgccgcaccggcccaaggagcccgcgtggttcctggccaccgtcggcgtctcgcccgaccaccagggcaagggtctgggcagcgccgtcgtgctccccggagtggaggcggccgagcgcgccggggtgcccgccttcctggagacctccgcgccccgcaacctccccttctacgagcggctcggcttcaccgtcaccgccgacgtcgaggtgcccgaaggaccgcgcacctggtgcatgacccgcaagcccggtgcctga

SEQ ID NO: 7177 - DNA, 2601 bp, Artificial Sequence
  Synthetic Polynucloetide
atggccttaccagtgaccgccttgctcctgccgctggccttgctgctccacgccgccaggccggaagtgcagctggttgaatctggcggaggactggttcaggctggcggatctctgagactgtcttgtgccgccagcggcagaacctttagcatgggctggtttagacaggcccctggcaaagagagagagttcgtcgccgccatcacatactctggcggcagcccttactacgccgactctgtgaagggcagattcaccatcagccgggacaacgccaagaacaccgtgtacctccagatgaacagcctgaagcctgaggacaccgccgtgtactactgcgccgccaatccaacatacggcagcgactggaacgccgagaattggggccagggaacccaagtgacagtgtctagcctcgagggacagcctaaggccaatcctaccgtgacactgttccctccaagcagcgaagaactccaggccaacaaggccacacttgtgtgcctgatctccgacttctaccctggggctgtgacagtggcttggaaggccgatggatctcctgtgaaagccggcgtggaaaccaccaagccatccaagcagagcaacaacaaatacgccgccagctcctacctgagcctgacacctgagcagtggaagtcccacagatcctacagctgccaagtgacccacgaaggcagcaccgtggaaaagacagtggcccctacagagtgcagcggcagagccgattgcggctttaccagcgagagctaccagcagggcgtgctgagcgccaccatcctgtacgagatcctgctgggcaaggccaccctgtacgccgtgctggtgtctgccctggtgctgatggctatggtcaagcggaaggacagccggggaagggccaagcgatctggatctggagcaacaaacttctcactactcaaacaagcaggtgacgtggaggagaatcccgggcctactagtatggactggatttggcgcatccttttccttgtcggcgctgctaccggcgcgcattccttcgaacaactgcaactgcaagagtctggccctggcctggtcaagccttctgaaaccctgagcctgacctgtaccgtgtccggcggctctatcagcagcggcgattactactggggctggatcagacagcctccaggcaagggactcgaatggatcggcagcatcagctacagcggctccacctactacaacccaagcctgaagtccagagtgaccatcagcgtggacaccagcagaaaccagttctccctgaagctgagcagcgtgacagccgccgatacagccgtgtattattgcaccagagaggacagcagcaactggcggagtagaggacagggcacactggtcacagtgtcctctacgcgtgcctctacaaagggaccctccgtgtttcctctggctcccagcagcaagtctacaagcggaggaacagccgctctgggctgcctggtcaaggattactttcccgagcctgtgaccgtgtcctggaatagcggagcactgacaagcggcgtgcacacctttccagccgtgctgcaaagcagcggcctgtactctctgagcagcgtggtcacagtgcctagctctagcctgggcacccagacctacatctgcaatgtgaaccacaagcctagcaacaccaaggtggacaagagagtggaacccaagagctgtatccccgaggacacattcttcccaagccccgagagcagctgcgacgtgaagctggtggaaaagagcttcgagacagacaccaacctgaacttccagaacctgagcgtgatcggcttcagaatcctgctgctgaaagtggccggctttaacctgctgatgaccctgcggctgtggtccagccgcgccaagagaagcggatctggcgtgaagcagaccctgaatttcgacctgctgaagctggctggcgacgtggaatccaacccaggcccttctagaggccatatgaccgagtacaagcccacggtgcgcctcgccacccgcgacgacgtccccagggccgtacgcaccctcgccgccgcgttcgccgactaccccgccacgcgccacaccgtcgatccggaccgccacatcgagcgggtcaccgagctgcaagaactcttcctcacgcgcgtcgggctcgacatcggcaaggtgtgggtcgcggacgacggcgccgcggtggcggtctggaccacgccggagagcgtcgaagcgggggcggtgttcgccgagatcggcccgcgcatggccgagttgagcggttcccggctggccgcgcagcaacagatggaaggcctcctggcgccgcaccggcccaaggagcccgcgtggttcctggccaccgtcggcgtctcgcccgaccaccagggcaagggtctgggcagcgccgtcgtgctccccggagtggaggcggccgagcgcgccggggtgcccgccttcctggagacctccgcgccccgcaacctccccttctacgagcggctcggcttcaccgtcaccgccgacgtcgaggtgcccgaaggaccgcgcacctggtgcatgacccgcaagcccggtgcctga

SEQ ID NO: 7178 - DNA, 1899 bp, Artificial Sequence; identical to SEQ ID NO: 7151
  Synthetic Polynucloetide

SEQ ID NO: 7179 - DNA, 1986 bp, Artificial Sequence
  Synthetic Polynucloetide
atggccttaccagtgaccgccttgctcctgccgctggccttgctgctccacgccgccaggccggaagtgcagctggttgaatctggcggaggactggttcaggctggcggatctctgagactgtcttgtgccgccagcggcagaacctttagcatgggctggtttagacaggcccctggcaaagagagagagttcgtcgccgccatcacatactctggcggcagcccttactacgccgactctgtgaagggcagattcaccatcagccgggacaacgccaagaacaccgtgtacctccagatgaacagcctgaagcctgaggacaccgccgtgtactactgcgccgccaatccaacatacggcagcgactggaacgccgagaattggggccagggaacccaagtgacagtgtctagcctcgagggatctggcagagccgattgcggctttaccagcgagagctaccagcagggcgtgctgagcgccaccatcctgtacgagatcctgctgggcaaggccaccctgtacgccgtgctggtgtctgccctggtgctgatggctatggtcaagcggaaggacagccggggaagggccaagcgatctggatctggagcaacaaacttctcactactcaaacaagcaggtgacgtggaggagaatcccgggcctactagtatggactggatttggcgcatccttttccttgtcggcgctgctaccggcgcgcattccttcgaacaactgcaactgcaagagtctggccctggcctggtcaagccttctgaaaccctgagcctgacctgtaccgtgtccggcggctctatcagcagcggcgattactactggggctggatcagacagcctccaggcaagggactcgaatggatcggcagcatcagctacagcggctccacctactacaacccaagcctgaagtccagagtgaccatcagcgtggacaccagcagaaaccagttctccctgaagctgagcagcgtgacagccgccgatacagccgtgtattattgcaccagagaggacagcagcaactggcggagtagaggacagggcacactggtcacagtgtcctctacgcgtggcagcatccccgaggacacattcttcccaagccccgagagcagctgcgacgtgaagctggtggaaaagagcttcgagacagacaccaacctgaacttccagaacctgagcgtgatcggcttcagaatcctgctgctgaaagtggccggctttaacctgctgatgaccctgcggctgtggtccagccgcgccaagagaagcggatctggcgtgaagcagaccctgaatttcgacctgctgaagctggctggcgacgtggaatccaacccaggcccttctagaggccatatgaccgagtacaagcccacggtgcgcctcgccacccgcgacgacgtccccagggccgtacgcaccctcgccgccgcgttcgccgactaccccgccacgcgccacaccgtcgatccggaccgccacatcgagcgggtcaccgagctgcaagaactcttcctcacgcgcgtcgggctcgacatcggcaaggtgtgggtcgcggacgacggcgccgcggtggcggtctggaccacgccggagagcgtcgaagcgggggcggtgttcgccgagatcggcccgcgcatggccgagttgagcggttcccggctggccgcgcagcaacagatggaaggcctcctggcgccgcaccggcccaaggagcccgcgtggttcctggccaccgtcggcgtctcgcccgaccaccagggcaagggtctgggcagcgccgtcgtgctccccggagtggaggcggccgagcgcgccggggtgcccgccttcctggagacctccgcgccccgcaacctccccttctacgagcggctcggcttcaccgtcaccgccgacgtcgaggtgcccgaaggaccgcgcacctggtgcatgacccgcaagcccggtgcctga

SEQ ID NO: 7180 - DNA, 1284 bp, Artificial Sequence
  Synthetic Polynucloetide
atggccttaccagtgaccgccttgctcctgccgctggccttgctgctccacgccgccaggccggaagtgcagctggttgaatctggcggaggactggttcaggctggcggatctctgagactgtcttgtgccgccagcggcagaacctttagcatgggctggtttagacaggcccctggcaaagagagagagttcgtcgccgccatcacatactctggcggcagcccttactacgccgactctgtgaagggcagattcaccatcagccgggacaacgccaagaacaccgtgtacctccagatgaacagcctgaagcctgaggacaccgccgtgtactactgcgccgccaatccaacatacggcagcgactggaacgccgagaattggggccagggaacccaagtgacagtgtctagcctcgagggatctggcagagccgattgcggctttaccagcgagagctaccagcagggcgtgctgagcgccaccatcctgtacgagatcctgctgggcaaggccaccctgtacgccgtgctggtgtctgccctggtgctgatggctatggtcaagcggaaggacagccggggaagggccaagcgatctggatctggagcaacaaacttctcactactcaaacaagcaggtgacgtggaggagaatcccgggcctactagtatggactggatttggcgcatccttttccttgtcggcgctgctaccggcgcgcattccttcgaacaactgcaactgcaagagtctggccctggcctggtcaagccttctgaaaccctgagcctgacctgtaccgtgtccggcggctctatcagcagcggcgattactactggggctggatcagacagcctccaggcaagggactcgaatggatcggcagcatcagctacagcggctccacctactacaacccaagcctgaagtccagagtgaccatcagcgtggacaccagcagaaaccagttctccctgaagctgagcagcgtgacagccgccgatacagccgtgtattattgcaccagagaggacagcagcaactggcggagtagaggacagggcacactggtcacagtgtcctctacgcgtggcagcatccccgaggacacattcttcccaagccccgagagcagctgcgacgtgaagctggtggaaaagagcttcgagacagacaccaacctgaacttccagaacctgagcgtgatcggcttcagaatcctgctgctgaaagtggccggctttaacctgctgatgaccctgcggctgtggtccagc

SEQ ID NO: 7181 - DNA, 2013 bp, Artificial Sequence
  Synthetic Polynucloetide
atggccttaccagtgaccgccttgctcctgccgctggccttgctgctccacgccgccaggccggaagtgcagctggttgaatctggcggaggactggttcaggctggcggatctctgagactgtcttgtgccgccagcggcagaacctttagcatgggctggtttagacaggcccctggcaaagagagagagttcgtcgccgccatcacatactctggcggcagcccttactacgccgactctgtgaagggcagattcaccatcagccgggacaacgccaagaacaccgtgtacctccagatgaacagcctgaagcctgaggacaccgccgtgtactactgcgccgccaatccaacatacggcagcgactggaacgccgagaattggggccagggaacccaagtgacagtgtctagcctcgaggacaaaactcacacatgcccaccgtgcccagcaggcagagccgattgcggctttaccagcgagagctaccagcagggcgtgctgagcgccaccatcctgtacgagatcctgctgggcaaggccaccctgtacgccgtgctggtgtctgccctggtgctgatggctatggtcaagcggaaggacagccggggaagggccaagcgatctggatctggagcaacaaacttctcactactcaaacaagcaggtgacgtggaggagaatcccgggcctactagtatggactggatttggcgcatccttttccttgtcggcgctgctaccggcgcgcattccttcgaacaactgcaactgcaagagtctggccctggcctggtcaagccttctgaaaccctgagcctgacctgtaccgtgtccggcggctctatcagcagcggcgattactactggggctggatcagacagcctccaggcaagggactcgaatggatcggcagcatcagctacagcggctccacctactacaacccaagcctgaagtccagagtgaccatcagcgtggacaccagcagaaaccagttctccctgaagctgagcagcgtgacagccgccgatacagccgtgtattattgcaccagagaggacagcagcaactggcggagtagaggacagggcacactggtcacagtgtcctctacgcgtggcagcatccccgaggacacattcttcccaagccccgagagcagctgcgacgtgaagctggtggaaaagagcttcgagacagacaccaacctgaacttccagaacctgagcgtgatcggcttcagaatcctgctgctgaaagtggccggctttaacctgctgatgaccctgcggctgtggtccagccgcgccaagagaagcggatctggcgtgaagcagaccctgaatttcgacctgctgaagctggctggcgacgtggaatccaacccaggcccttctagaggccatatgaccgagtacaagcccacggtgcgcctcgccacccgcgacgacgtccccagggccgtacgcaccctcgccgccgcgttcgccgactaccccgccacgcgccacaccgtcgatccggaccgccacatcgagcgggtcaccgagctgcaagaactcttcctcacgcgcgtcgggctcgacatcggcaaggtgtgggtcgcggacgacggcgccgcggtggcggtctggaccacgccggagagcgtcgaagcgggggcggtgttcgccgagatcggcccgcgcatggccgagttgagcggttcccggctggccgcgcagcaacagatggaaggcctcctggcgccgcaccggcccaaggagcccgcgtggttcctggccaccgtcggcgtctcgcccgaccaccagggcaagggtctgggcagcgccgtcgtgctccccggagtggaggcggccgagcgcgccggggtgcccgccttcctggagacctccgcgccccgcaacctccccttctacgagcggctcggcttcaccgtcaccgccgacgtcgaggtgcccgaaggaccgcgcacctggtgcatgacccgcaagcccggtgcctga

SEQ ID NO: 7182 - DNA, 2013 bp, Artificial Sequence
  Synthetic Polynucloetide
atggccttaccagtgaccgccttgctcctgccgctggccttgctgctccacgccgccaggccggaagtgcagctggttgaatctggcggaggactggttcaggctggcggatctctgagactgtcttgtgccgccagcggcagaacctttagcatgggctggtttagacaggcccctggcaaagagagagagttcgtcgccgccatcacatactctggcggcagcccttactacgccgactctgtgaagggcagattcaccatcagccgggacaacgccaagaacaccgtgtacctccagatgaacagcctgaagcctgaggacaccgccgtgtactactgcgccgccaatccaacatacggcagcgactggaacgccgagaattggggccagggaacccaagtgacagtgtctagcctcgagggatctggcagagccgattgcggctttaccagcgagagctaccagcagggcgtgctgagcgccaccatcctgtacgagatcctgctgggcaaggccaccctgtacgccgtgctggtgtctgccctggtgctgatggctatggtcaagcggaaggacagccggggaagggccaagcgatctggatctggagcaacaaacttctcactactcaaacaagcaggtgacgtggaggagaatcccgggcctactagtatggactggatttggcgcatccttttccttgtcggcgctgctaccggcgcgcattccttcgaacaactgcaactgcaagagtctggccctggcctggtcaagccttctgaaaccctgagcctgacctgtaccgtgtccggcggctctatcagcagcggcgattactactggggctggatcagacagcctccaggcaagggactcgaatggatcggcagcatcagctacagcggctccacctactacaacccaagcctgaagtccagagtgaccatcagcgtggacaccagcagaaaccagttctccctgaagctgagcagcgtgacagccgccgatacagccgtgtattattgcaccagagaggacagcagcaactggcggagtagaggacagggcacactggtcacagtgtcctctacgcgtgataaaactcatacctgtccgccatgcccggcaatccccgaggacacattcttcccaagccccgagagcagctgcgacgtgaagctggtggaaaagagcttcgagacagacaccaacctgaacttccagaacctgagcgtgatcggcttcagaatcctgctgctgaaagtggccggctttaacctgctgatgaccctgcggctgtggtccagccgcgccaagagaagcggatctggcgtgaagcagaccctgaatttcgacctgctgaagctggctggcgacgtggaatccaacccaggcccttctagaggccatatgaccgagtacaagcccacggtgcgcctcgccacccgcgacgacgtccccagggccgtacgcaccctcgccgccgcgttcgccgactaccccgccacgcgccacaccgtcgatccggaccgccacatcgagcgggtcaccgagctgcaagaactcttcctcacgcgcgtcgggctcgacatcggcaaggtgtgggtcgcggacgacggcgccgcggtggcggtctggaccacgccggagagcgtcgaagcgggggcggtgttcgccgagatcggcccgcgcatggccgagttgagcggttcccggctggccgcgcagcaacagatggaaggcctcctggcgccgcaccggcccaaggagcccgcgtggttcctggccaccgtcggcgtctcgcccgaccaccagggcaagggtctgggcagcgccgtcgtgctccccggagtggaggcggccgagcgcgccggggtgcccgccttcctggagacctccgcgccccgcaacctccccttctacgagcggctcggcttcaccgtcaccgccgacgtcgaggtgcccgaaggaccgcgcacctggtgcatgacccgcaagcccggtgcctga

SEQ ID NO: 7183 - DNA, 2040 bp, Artificial Sequence
  Synthetic Polynucloetide
atggccttaccagtgaccgccttgctcctgccgctggccttgctgctccacgccgccaggccggaagtgcagctggttgaatctggcggaggactggttcaggctggcggatctctgagactgtcttgtgccgccagcggcagaacctttagcatgggctggtttagacaggcccctggcaaagagagagagttcgtcgccgccatcacatactctggcggcagcccttactacgccgactctgtgaagggcagattcaccatcagccgggacaacgccaagaacaccgtgtacctccagatgaacagcctgaagcctgaggacaccgccgtgtactactgcgccgccaatccaacatacggcagcgactggaacgccgagaattggggccagggaacccaagtgacagtgtctagcctcgaggacaaaactcacacatgcccaccgtgcccagcaggcagagccgattgcggctttaccagcgagagctaccagcagggcgtgctgagcgccaccatcctgtacgagatcctgctgggcaaggccaccctgtacgccgtgctggtgtctgccctggtgctgatggctatggtcaagcggaaggacagccggggaagggccaagcgatctggatctggagcaacaaacttctcactactcaaacaagcaggtgacgtggaggagaatcccgggcctactagtatggactggatttggcgcatccttttccttgtcggcgctgctaccggcgcgcattccttcgaacaactgcaactgcaagagtctggccctggcctggtcaagccttctgaaaccctgagcctgacctgtaccgtgtccggcggctctatcagcagcggcgattactactggggctggatcagacagcctccaggcaagggactcgaatggatcggcagcatcagctacagcggctccacctactacaacccaagcctgaagtccagagtgaccatcagcgtggacaccagcagaaaccagttctccctgaagctgagcagcgtgacagccgccgatacagccgtgtattattgcaccagagaggacagcagcaactggcggagtagaggacagggcacactggtcacagtgtcctctacgcgtgataaaactcatacctgtccgccatgcccggcaatccccgaggacacattcttcccaagccccgagagcagctgcgacgtgaagctggtggaaaagagcttcgagacagacaccaacctgaacttccagaacctgagcgtgatcggcttcagaatcctgctgctgaaagtggccggctttaacctgctgatgaccctgcggctgtggtccagccgcgccaagagaagcggatctggcgtgaagcagaccctgaatttcgacctgctgaagctggctggcgacgtggaatccaacccaggcccttctagaggccatatgaccgagtacaagcccacggtgcgcctcgccacccgcgacgacgtccccagggccgtacgcaccctcgccgccgcgttcgccgactaccccgccacgcgccacaccgtcgatccggaccgccacatcgagcgggtcaccgagctgcaagaactcttcctcacgcgcgtcgggctcgacatcggcaaggtgtgggtcgcggacgacggcgccgcggtggcggtctggaccacgccggagagcgtcgaagcgggggcggtgttcgccgagatcggcccgcgcatggccgagttgagcggttcccggctggccgcgcagcaacagatggaaggcctcctggcgccgcaccggcccaaggagcccgcgtggttcctggccaccgtcggcgtctcgcccgaccaccagggcaagggtctgggcagcgccgtcgtgctccccggagtggaggcggccgagcgcgccggggtgcccgccttcctggagacctccgcgccccgcaacctccccttctacgagcggctcggcttcaccgtcaccgccgacgtcgaggtgcccgaaggaccgcgcacctggtgcatgacccgcaagcccggtgcctga

SEQ ID NO: 7184 - DNA, 1338 bp, Artificial Sequence
  Synthetic Polynucloetide
atggccttaccagtgaccgccttgctcctgccgctggccttgctgctccacgccgccaggccggaagtgcagctggttgaatctggcggaggactggttcaggctggcggatctctgagactgtcttgtgccgccagcggcagaacctttagcatgggctggtttagacaggcccctggcaaagagagagagttcgtcgccgccatcacatactctggcggcagcccttactacgccgactctgtgaagggcagattcaccatcagccgggacaacgccaagaacaccgtgtacctccagatgaacagcctgaagcctgaggacaccgccgtgtactactgcgccgccaatccaacatacggcagcgactggaacgccgagaattggggccagggaacccaagtgacagtgtctagcctcgaggacaaaactcacacatgcccaccgtgcccagcaggcagagccgattgcggctttaccagcgagagctaccagcagggcgtgctgagcgccaccatcctgtacgagatcctgctgggcaaggccaccctgtacgccgtgctggtgtctgccctggtgctgatggctatggtcaagcggaaggacagccggggaagggccaagcgatctggatctggagcaacaaacttctcactactcaaacaagcaggtgacgtggaggagaatcccgggcctactagtatggactggatttggcgcatccttttccttgtcggcgctgctaccggcgcgcattccttcgaacaactgcaactgcaagagtctggccctggcctggtcaagccttctgaaaccctgagcctgacctgtaccgtgtccggcggctctatcagcagcggcgattactactggggctggatcagacagcctccaggcaagggactcgaatggatcggcagcatcagctacagcggctccacctactacaacccaagcctgaagtccagagtgaccatcagcgtggacaccagcagaaaccagttctccctgaagctgagcagcgtgacagccgccgatacagccgtgtattattgcaccagagaggacagcagcaactggcggagtagaggacagggcacactggtcacagtgtcctctacgcgtgataaaactcatacctgtccgccatgcccggcaatccccgaggacacattcttcccaagccccgagagcagctgcgacgtgaagctggtggaaaagagcttcgagacagacaccaacctgaacttccagaacctgagcgtgatcggcttcagaatcctgctgctgaaagtggccggctttaacctgctgatgaccctgcggctgtggtccagc

SEQ ID NO: 7185 - DNA, 1311 bp, Artificial Sequence
  Synthetic Polynucloetide
atggccttaccagtgaccgccttgctcctgccgctggccttgctgctccacgccgccaggccggaagtgcagctggttgaatctggcggaggactggttcaggctggcggatctctgagactgtcttgtgccgccagcggcagaacctttagcatgggctggtttagacaggcccctggcaaagagagagagttcgtcgccgccatcacatactctggcggcagcccttactacgccgactctgtgaagggcagattcaccatcagccgggacaacgccaagaacaccgtgtacctccagatgaacagcctgaagcctgaggacaccgccgtgtactactgcgccgccaatccaacatacggcagcgactggaacgccgagaattggggccagggaacccaagtgacagtgtctagcctcgagggatctggcagagccgattgcggctttaccagcgagagctaccagcagggcgtgctgagcgccaccatcctgtacgagatcctgctgggcaaggccaccctgtacgccgtgctggtgtctgccctggtgctgatggctatggtcaagcggaaggacagccggggaagggccaagcgatctggatctggagcaacaaacttctcactactcaaacaagcaggtgacgtggaggagaatcccgggcctactagtatggactggatttggcgcatccttttccttgtcggcgctgctaccggcgcgcattccttcgaacaactgcaactgcaagagtctggccctggcctggtcaagccttctgaaaccctgagcctgacctgtaccgtgtccggcggctctatcagcagcggcgattactactggggctggatcagacagcctccaggcaagggactcgaatggatcggcagcatcagctacagcggctccacctactacaacccaagcctgaagtccagagtgaccatcagcgtggacaccagcagaaaccagttctccctgaagctgagcagcgtgacagccgccgatacagccgtgtattattgcaccagagaggacagcagcaactggcggagtagaggacagggcacactggtcacagtgtcctctacgcgtgataaaactcatacctgtccgccatgcccggcaatccccgaggacacattcttcccaagccccgagagcagctgcgacgtgaagctggtggaaaagagcttcgagacagacaccaacctgaacttccagaacctgagcgtgatcggcttcagaatcctgctgctgaaagtggccggctttaacctgctgatgaccctgcggctgtggtccagc

SEQ ID NO: 7186 - DNA, 2667 bp, Artificial Sequence
  Synthetic Polynucloetide
atggccttaccagtgaccgccttgctcctgccgctggccttgctgctccacgccgccaggccggaagtgcagctggttgaatctggcggaggactggttcaggctggcggatctctgagactgtcttgtgccgccagcggcagaacctttagcatgggctggtttagacaggcccctggcaaagagagagagttcgtcgccgccatcacatactctggcggcagcccttactacgccgactctgtgaagggcagattcaccatcagccgggacaacgccaagaacaccgtgtacctccagatgaacagcctgaagcctgaggacaccgccgtgtactactgcgccgccaatccaacatacggcagcgactggaacgccgagaattggggccagggaacccaagtgacagtgtctagcctcgagggacagcctaaggccaatcctaccgtgacactgttccctccaagcagcgaagaactccaggccaacaaggccacacttgtgtgcctgatctccgacttctaccctggggctgtgacagtggcttggaaggccgatggatctcctgtgaaagccggcgtggaaaccaccaagccatccaagcagagcaacaacaaatacgccgccagctcctacctgagcctgacacctgagcagtggaagtcccacagatcctacagctgccaagtgacccacgaaggcagcaccgtggaaaagacagtggcccctacagagtgcagccccatcaagaccgatgtgattacaatggaccccaaggacaactgctccaaggacgccaacgataccctgctgctccagctgaccaacaccagcgcctactacatgtacttgttgctgctgctgaagtccgtggtgtacttcgccatcatcacatgctgcctgctgcggagaaccgccttctgctgcaacggcgagaagtctagggccaagcgatctggatctggagcaacaaacttctcactactcaaacaagcaggtgacgtggaggagaatcccgggcctactagtatggactggatttggcgcatccttttccttgtcggcgctgctaccggcgcgcattccttcgaacaactgcaactgcaagagtctggccctggcctggtcaagccttctgaaaccctgagcctgacctgtaccgtgtccggcggctctatcagcagcggcgattactactggggctggatcagacagcctccaggcaagggactcgaatggatcggcagcatcagctacagcggctccacctactacaacccaagcctgaagtccagagtgaccatcagcgtggacaccagcagaaaccagttctccctgaagctgagcagcgtgacagccgccgatacagccgtgtattattgcaccagagaggacagcagcaactggcggagtagaggacagggcacactggtcacagtgtcctctacgcgtgcctctacaaagggaccctccgtgtttcctctggctcccagcagcaagtctacaagcggaggaacagccgctctgggctgcctggtcaaggattactttcccgagcctgtgaccgtgtcctggaatagcggagcactgacaagcggcgtgcacacctttccagccgtgctgcaaagcagcggcctgtactctctgagcagcgtggtcacagtgcctagctctagcctgggcacccagacctacatctgcaatgtgaaccacaagcctagcaacaccaaggtggacaagagagtggaacccaagagctgtgaagtgaaaaccgactccaccgaccacgtgaagcccaaagagacagagaacaccaagcagcccagcaagagctgccacaagcccaaggccatcgtgcacaccgagaaagtgaacatgatgagcctgaccgtgctgggcctgcggatgctgttcgccaaaaccgtggccgtgaacttcctgctgaccgccaagctgttcttcctccgcgccaagagaagcggatctggcgtgaagcagaccctgaatttcgacctgctgaagctggctggcgacgtggaatccaacccaggcccttctagaggccatatgaccgagtacaagcccacggtgcgcctcgccacccgcgacgacgtccccagggccgtacgcaccctcgccgccgcgttcgccgactaccccgccacgcgccacaccgtcgatccggaccgccacatcgagcgggtcaccgagctgcaagaactcttcctcacgcgcgtcgggctcgacatcggcaaggtgtgggtcgcggacgacggcgccgcggtggcggtctggaccacgccggagagcgtcgaagcgggggcggtgttcgccgagatcggcccgcgcatggccgagttgagcggttcccggctggccgcgcagcaacagatggaaggcctcctggcgccgcaccggcccaaggagcccgcgtggttcctggccaccgtcggcgtctcgcccgaccaccagggcaagggtctgggcagcgccgtcgtgctccccggagtggaggcggccgagcgcgccggggtgcccgccttcctggagacctccgcgccccgcaacctccccttctacgagcggctcggcttcaccgtcaccgccgacgtcgaggtgcccgaaggaccgcgcacctggtgcatgacccgcaagcccggtgcctga

SEQ ID NO: 7187 - DNA, 1965 bp, Artificial Sequence; identical to SEQ ID NO: 7149
  Synthetic Polynucloetide

SEQ ID NO: 7188 - DNA, 2052 bp, Artificial Sequence
  Synthetic Polynucloetide
atggccttaccagtgaccgccttgctcctgccgctggccttgctgctccacgccgccaggccggaagtgcagctggttgaatctggcggaggactggttcaggctggcggatctctgagactgtcttgtgccgccagcggcagaacctttagcatgggctggtttagacaggcccctggcaaagagagagagttcgtcgccgccatcacatactctggcggcagcccttactacgccgactctgtgaagggcagattcaccatcagccgggacaacgccaagaacaccgtgtacctccagatgaacagcctgaagcctgaggacaccgccgtgtactactgcgccgccaatccaacatacggcagcgactggaacgccgagaattggggccagggaacccaagtgacagtgtctagcctcgagggatctcccatcaagaccgatgtgattacaatggaccccaaggacaactgctccaaggacgccaacgataccctgctgctccagctgaccaacaccagcgcctactacatgtacttgttgctgctgctgaagtccgtggtgtacttcgccatcatcacatgctgcctgctgcggagaaccgccttctgctgcaacggcgagaagtctagggccaagcgatctggatctggagcaacaaacttctcactactcaaacaagcaggtgacgtggaggagaatcccgggcctactagtatggactggatttggcgcatccttttccttgtcggcgctgctaccggcgcgcattccttcgaacaactgcaactgcaagagtctggccctggcctggtcaagccttctgaaaccctgagcctgacctgtaccgtgtccggcggctctatcagcagcggcgattactactggggctggatcagacagcctccaggcaagggactcgaatggatcggcagcatcagctacagcggctccacctactacaacccaagcctgaagtccagagtgaccatcagcgtggacaccagcagaaaccagttctccctgaagctgagcagcgtgacagccgccgatacagccgtgtattattgcaccagagaggacagcagcaactggcggagtagaggacagggcacactggtcacagtgtcctctacgcgtggcagcgaagtgaaaaccgactccaccgaccacgtgaagcccaaagagacagagaacaccaagcagcccagcaagagctgccacaagcccaaggccatcgtgcacaccgagaaagtgaacatgatgagcctgaccgtgctgggcctgcggatgctgttcgccaaaaccgtggccgtgaacttcctgctgaccgccaagctgttcttcctccgcgccaagagaagcggatctggcgtgaagcagaccctgaatttcgacctgctgaagctggctggcgacgtggaatccaacccaggcccttctagaggccatatgaccgagtacaagcccacggtgcgcctcgccacccgcgacgacgtccccagggccgtacgcaccctcgccgccgcgttcgccgactaccccgccacgcgccacaccgtcgatccggaccgccacatcgagcgggtcaccgagctgcaagaactcttcctcacgcgcgtcgggctcgacatcggcaaggtgtgggtcgcggacgacggcgccgcggtggcggtctggaccacgccggagagcgtcgaagcgggggcggtgttcgccgagatcggcccgcgcatggccgagttgagcggttcccggctggccgcgcagcaacagatggaaggcctcctggcgccgcaccggcccaaggagcccgcgtggttcctggccaccgtcggcgtctcgcccgaccaccagggcaagggtctgggcagcgccgtcgtgctccccggagtggaggcggccgagcgcgccggggtgcccgccttcctggagacctccgcgccccgcaacctccccttctacgagcggctcggcttcaccgtcaccgccgacgtcgaggtgcccgaaggaccgcgcacctggtgcatgacccgcaagcccggtgcctga

SEQ ID NO: 7189 - DNA, 1350 bp, Artificial Sequence
  Synthetic Polynucloetide
atggccttaccagtgaccgccttgctcctgccgctggccttgctgctccacgccgccaggccggaagtgcagctggttgaatctggcggaggactggttcaggctggcggatctctgagactgtcttgtgccgccagcggcagaacctttagcatgggctggtttagacaggcccctggcaaagagagagagttcgtcgccgccatcacatactctggcggcagcccttactacgccgactctgtgaagggcagattcaccatcagccgggacaacgccaagaacaccgtgtacctccagatgaacagcctgaagcctgaggacaccgccgtgtactactgcgccgccaatccaacatacggcagcgactggaacgccgagaattggggccagggaacccaagtgacagtgtctagcctcgagggatctcccatcaagaccgatgtgattacaatggaccccaaggacaactgctccaaggacgccaacgataccctgctgctccagctgaccaacaccagcgcctactacatgtacttgttgctgctgctgaagtccgtggtgtacttcgccatcatcacatgctgcctgctgcggagaaccgccttctgctgcaacggcgagaagtctagggccaagcgatctggatctggagcaacaaacttctcactactcaaacaagcaggtgacgtggaggagaatcccgggcctactagtatggactggatttggcgcatccttttccttgtcggcgctgctaccggcgcgcattccttcgaacaactgcaactgcaagagtctggccctggcctggtcaagccttctgaaaccctgagcctgacctgtaccgtgtccggcggctctatcagcagcggcgattactactggggctggatcagacagcctccaggcaagggactcgaatggatcggcagcatcagctacagcggctccacctactacaacccaagcctgaagtccagagtgaccatcagcgtggacaccagcagaaaccagttctccctgaagctgagcagcgtgacagccgccgatacagccgtgtattattgcaccagagaggacagcagcaactggcggagtagaggacagggcacactggtcacagtgtcctctacgcgtggcagcgaagtgaaaaccgactccaccgaccacgtgaagcccaaagagacagagaacaccaagcagcccagcaagagctgccacaagcccaaggccatcgtgcacaccgagaaagtgaacatgatgagcctgaccgtgctgggcctgcggatgctgttcgccaaaaccgtggccgtgaacttcctgctgaccgccaagctgttcttcctc

SEQ ID NO: 7190 - DNA, 2079 bp, Artificial Sequence
  Synthetic Polynucloetide
atggccttaccagtgaccgccttgctcctgccgctggccttgctgctccacgccgccaggccggaagtgcagctggttgaatctggcggaggactggttcaggctggcggatctctgagactgtcttgtgccgccagcggcagaacctttagcatgggctggtttagacaggcccctggcaaagagagagagttcgtcgccgccatcacatactctggcggcagcccttactacgccgactctgtgaagggcagattcaccatcagccgggacaacgccaagaacaccgtgtacctccagatgaacagcctgaagcctgaggacaccgccgtgtactactgcgccgccaatccaacatacggcagcgactggaacgccgagaattggggccagggaacccaagtgacagtgtctagcctcgaggacaaaactcacacatgcccaccgtgcccagcacccatcaagaccgatgtgattacaatggaccccaaggacaactgctccaaggacgccaacgataccctgctgctccagctgaccaacaccagcgcctactacatgtacttgttgctgctgctgaagtccgtggtgtacttcgccatcatcacatgctgcctgctgcggagaaccgccttctgctgcaacggcgagaagtctagggccaagcgatctggatctggagcaacaaacttctcactactcaaacaagcaggtgacgtggaggagaatcccgggcctactagtatggactggatttggcgcatccttttccttgtcggcgctgctaccggcgcgcattccttcgaacaactgcaactgcaagagtctggccctggcctggtcaagccttctgaaaccctgagcctgacctgtaccgtgtccggcggctctatcagcagcggcgattactactggggctggatcagacagcctccaggcaagggactcgaatggatcggcagcatcagctacagcggctccacctactacaacccaagcctgaagtccagagtgaccatcagcgtggacaccagcagaaaccagttctccctgaagctgagcagcgtgacagccgccgatacagccgtgtattattgcaccagagaggacagcagcaactggcggagtagaggacagggcacactggtcacagtgtcctctacgcgtggcagcgaagtgaaaaccgactccaccgaccacgtgaagcccaaagagacagagaacaccaagcagcccagcaagagctgccacaagcccaaggccatcgtgcacaccgagaaagtgaacatgatgagcctgaccgtgctgggcctgcggatgctgttcgccaaaaccgtggccgtgaacttcctgctgaccgccaagctgttcttcctccgcgccaagagaagcggatctggcgtgaagcagaccctgaatttcgacctgctgaagctggctggcgacgtggaatccaacccaggcccttctagaggccatatgaccgagtacaagcccacggtgcgcctcgccacccgcgacgacgtccccagggccgtacgcaccctcgccgccgcgttcgccgactaccccgccacgcgccacaccgtcgatccggaccgccacatcgagcgggtcaccgagctgcaagaactcttcctcacgcgcgtcgggctcgacatcggcaaggtgtgggtcgcggacgacggcgccgcggtggcggtctggaccacgccggagagcgtcgaagcgggggcggtgttcgccgagatcggcccgcgcatggccgagttgagcggttcccggctggccgcgcagcaacagatggaaggcctcctggcgccgcaccggcccaaggagcccgcgtggttcctggccaccgtcggcgtctcgcccgaccaccagggcaagggtctgggcagcgccgtcgtgctccccggagtggaggcggccgagcgcgccggggtgcccgccttcctggagacctccgcgccccgcaacctccccttctacgagcggctcggcttcaccgtcaccgccgacgtcgaggtgcccgaaggaccgcgcacctggtgcatgacccgcaagcccggtgcctga

SEQ ID NO: 7191 - DNA, 2079 bp, Artificial Sequence
  Synthetic Polynucloetide
atggccttaccagtgaccgccttgctcctgccgctggccttgctgctccacgccgccaggccggaagtgcagctggttgaatctggcggaggactggttcaggctggcggatctctgagactgtcttgtgccgccagcggcagaacctttagcatgggctggtttagacaggcccctggcaaagagagagagttcgtcgccgccatcacatactctggcggcagcccttactacgccgactctgtgaagggcagattcaccatcagccgggacaacgccaagaacaccgtgtacctccagatgaacagcctgaagcctgaggacaccgccgtgtactactgcgccgccaatccaacatacggcagcgactggaacgccgagaattggggccagggaacccaagtgacagtgtctagcctcgagggatctcccatcaagaccgatgtgattacaatggaccccaaggacaactgctccaaggacgccaacgataccctgctgctccagctgaccaacaccagcgcctactacatgtacttgttgctgctgctgaagtccgtggtgtacttcgccatcatcacatgctgcctgctgcggagaaccgccttctgctgcaacggcgagaagtctagggccaagcgatctggatctggagcaacaaacttctcactactcaaacaagcaggtgacgtggaggagaatcccgggcctactagtatggactggatttggcgcatccttttccttgtcggcgctgctaccggcgcgcattccttcgaacaactgcaactgcaagagtctggccctggcctggtcaagccttctgaaaccctgagcctgacctgtaccgtgtccggcggctctatcagcagcggcgattactactggggctggatcagacagcctccaggcaagggactcgaatggatcggcagcatcagctacagcggctccacctactacaacccaagcctgaagtccagagtgaccatcagcgtggacaccagcagaaaccagttctccctgaagctgagcagcgtgacagccgccgatacagccgtgtattattgcaccagagaggacagcagcaactggcggagtagaggacagggcacactggtcacagtgtcctctacgcgtgataaaactcatacctgtccgccatgcccggcagaagtgaaaaccgactccaccgaccacgtgaagcccaaagagacagagaacaccaagcagcccagcaagagctgccacaagcccaaggccatcgtgcacaccgagaaagtgaacatgatgagcctgaccgtgctgggcctgcggatgctgttcgccaaaaccgtggccgtgaacttcctgctgaccgccaagctgttcttcctccgcgccaagagaagcggatctggcgtgaagcagaccctgaatttcgacctgctgaagctggctggcgacgtggaatccaacccaggcccttctagaggccatatgaccgagtacaagcccacggtgcgcctcgccacccgcgacgacgtccccagggccgtacgcaccctcgccgccgcgttcgccgactaccccgccacgcgccacaccgtcgatccggaccgccacatcgagcgggtcaccgagctgcaagaactcttcctcacgcgcgtcgggctcgacatcggcaaggtgtgggtcgcggacgacggcgccgcggtggcggtctggaccacgccggagagcgtcgaagcgggggcggtgttcgccgagatcggcccgcgcatggccgagttgagcggttcccggctggccgcgcagcaacagatggaaggcctcctggcgccgcaccggcccaaggagcccgcgtggttcctggccaccgtcggcgtctcgcccgaccaccagggcaagggtctgggcagcgccgtcgtgctccccggagtggaggcggccgagcgcgccggggtgcccgccttcctggagacctccgcgccccgcaacctccccttctacgagcggctcggcttcaccgtcaccgccgacgtcgaggtgcccgaaggaccgcgcacctggtgcatgacccgcaagcccggtgcctga

SEQ ID NO: 7192 - DNA, 2106 bp, Artificial Sequence
  Synthetic Polynucloetide
atggccttaccagtgaccgccttgctcctgccgctggccttgctgctccacgccgccaggccggaagtgcagctggttgaatctggcggaggactggttcaggctggcggatctctgagactgtcttgtgccgccagcggcagaacctttagcatgggctggtttagacaggcccctggcaaagagagagagttcgtcgccgccatcacatactctggcggcagcccttactacgccgactctgtgaagggcagattcaccatcagccgggacaacgccaagaacaccgtgtacctccagatgaacagcctgaagcctgaggacaccgccgtgtactactgcgccgccaatccaacatacggcagcgactggaacgccgagaattggggccagggaacccaagtgacagtgtctagcctcgaggacaaaactcacacatgcccaccgtgcccagcacccatcaagaccgatgtgattacaatggaccccaaggacaactgctccaaggacgccaacgataccctgctgctccagctgaccaacaccagcgcctactacatgtacttgttgctgctgctgaagtccgtggtgtacttcgccatcatcacatgctgcctgctgcggagaaccgccttctgctgcaacggcgagaagtctagggccaagcgatctggatctggagcaacaaacttctcactactcaaacaagcaggtgacgtggaggagaatcccgggcctactagtatggactggatttggcgcatccttttccttgtcggcgctgctaccggcgcgcattccttcgaacaactgcaactgcaagagtctggccctggcctggtcaagccttctgaaaccctgagcctgacctgtaccgtgtccggcggctctatcagcagcggcgattactactggggctggatcagacagcctccaggcaagggactcgaatggatcggcagcatcagctacagcggctccacctactacaacccaagcctgaagtccagagtgaccatcagcgtggacaccagcagaaaccagttctccctgaagctgagcagcgtgacagccgccgatacagccgtgtattattgcaccagagaggacagcagcaactggcggagtagaggacagggcacactggtcacagtgtcctctacgcgtgataaaactcatacctgtccgccatgcccggcagaagtgaaaaccgactccaccgaccacgtgaagcccaaagagacagagaacaccaagcagcccagcaagagctgccacaagcccaaggccatcgtgcacaccgagaaagtgaacatgatgagcctgaccgtgctgggcctgcggatgctgttcgccaaaaccgtggccgtgaacttcctgctgaccgccaagctgttcttcctccgcgccaagagaagcggatctggcgtgaagcagaccctgaatttcgacctgctgaagctggctggcgacgtggaatccaacccaggcccttctagaggccatatgaccgagtacaagcccacggtgcgcctcgccacccgcgacgacgtccccagggccgtacgcaccctcgccgccgcgttcgccgactaccccgccacgcgccacaccgtcgatccggaccgccacatcgagcgggtcaccgagctgcaagaactcttcctcacgcgcgtcgggctcgacatcggcaaggtgtgggtcgcggacgacggcgccgcggtggcggtctggaccacgccggagagcgtcgaagcgggggcggtgttcgccgagatcggcccgcgcatggccgagttgagcggttcccggctggccgcgcagcaacagatggaaggcctcctggcgccgcaccggcccaaggagcccgcgtggttcctggccaccgtcggcgtctcgcccgaccaccagggcaagggtctgggcagcgccgtcgtgctccccggagtggaggcggccgagcgcgccggggtgcccgccttcctggagacctccgcgccccgcaacctccccttctacgagcggctcggcttcaccgtcaccgccgacgtcgaggtgcccgaaggaccgcgcacctggtgcatgacccgcaagcccggtgcctga

SEQ ID NO: 7193 - DNA, 1404 bp, Artificial Sequence
  Synthetic Polynucloetide
atggccttaccagtgaccgccttgctcctgccgctggccttgctgctccacgccgccaggccggaagtgcagctggttgaatctggcggaggactggttcaggctggcggatctctgagactgtcttgtgccgccagcggcagaacctttagcatgggctggtttagacaggcccctggcaaagagagagagttcgtcgccgccatcacatactctggcggcagcccttactacgccgactctgtgaagggcagattcaccatcagccgggacaacgccaagaacaccgtgtacctccagatgaacagcctgaagcctgaggacaccgccgtgtactactgcgccgccaatccaacatacggcagcgactggaacgccgagaattggggccagggaacccaagtgacagtgtctagcctcgaggacaaaactcacacatgcccaccgtgcccagcacccatcaagaccgatgtgattacaatggaccccaaggacaactgctccaaggacgccaacgataccctgctgctccagctgaccaacaccagcgcctactacatgtacttgttgctgctgctgaagtccgtggtgtacttcgccatcatcacatgctgcctgctgcggagaaccgccttctgctgcaacggcgagaagtctagggccaagcgatctggatctggagcaacaaacttctcactactcaaacaagcaggtgacgtggaggagaatcccgggcctactagtatggactggatttggcgcatccttttccttgtcggcgctgctaccggcgcgcattccttcgaacaactgcaactgcaagagtctggccctggcctggtcaagccttctgaaaccctgagcctgacctgtaccgtgtccggcggctctatcagcagcggcgattactactggggctggatcagacagcctccaggcaagggactcgaatggatcggcagcatcagctacagcggctccacctactacaacccaagcctgaagtccagagtgaccatcagcgtggacaccagcagaaaccagttctccctgaagctgagcagcgtgacagccgccgatacagccgtgtattattgcaccagagaggacagcagcaactggcggagtagaggacagggcacactggtcacagtgtcctctacgcgtgataaaactcatacctgtccgccatgcccggcagaagtgaaaaccgactccaccgaccacgtgaagcccaaagagacagagaacaccaagcagcccagcaagagctgccacaagcccaaggccatcgtgcacaccgagaaagtgaacatgatgagcctgaccgtgctgggcctgcggatgctgttcgccaaaaccgtggccgtgaacttcctgctgaccgccaagctgttcttcctc

SEQ ID NO: 7194 - DNA, 2181 bp, Artificial Sequence
  Synthetic Polynucloetide
atggccttaccagtgaccgccttgctcctgccgctggccttgctgctccacgccgccaggccgcaggtgcagctggttgaatctggcggaggactggttcagcctggcggatctctgagactgtcttgtgccgccagcggcttcaccttcaccaatcacgccatgagctgggtccgacaggcccctggaaaaggactggaactggtgtctagcatcagcggcaacggcagaaccacctactacgccgatagcgtgaagggcagattcaccatcagccgggacatcagcaagaacaccctggacctccagatgaacagcctgagagccgaggataccgccgtgtactactgtgccaaggatggcggagagacactggtggatagcagaggccagggcacactggtcacagtgtcatctctcgagagcggcggaggcggatctttcgaagtgcaggttttggagtctggcggaggactggttcagcctggcggatctctgagactgtcttgtgccgccagcggcttcaccttcagcaactttgccatgagctgggtccgacaggcccctggcaaaggacttgaatgggtgtccacaatcagcggcagcgccggcacaacagattacgccgattctgtgaagggcagattcaccatcagccgggacaacagcaagaaaaccctgtacctccagatgaacagcctgcgcgtggaagataccgccgtgtactactgtgccgatggcagaggccccttcttcgattatcgcggccagggcacactggtcaccgtttcttctacgcgtgagcagaaactgatctcggaagaggatctggcgaagcccaccacgacgccagcgccgcgaccaccaacaccggcgcccaccatcgcgtcgcagcccctgtccctgcgcccagaggcgtgccggccagcggcggggggcgcagtgcacacgagggggctggacttcgcctgtgacatctacatctgggcgcccttggccgggacttgtggggtccttctcctgtcactggttatcaccctttactgcaaacggggcagaaagaaactcctgtatatattcaaacaaccatttatgagaccagtacaaactactcaagaggaagatggctgtagctgccgatttccagaagaagaagaaggaggatgtgaactgagagtgaagttcagcaggagcgcagacgcccccgcgtaccagcagggccagaaccagctctataacgagctgaatctaggacgaagagaggagtacgatgttttggacaagagacgtggccgggaccctgagatggggggaaagccgagaaggaagaaccctcaggaaggcctgtacaatgaactgcagaaagataagatggcggaggcctacagtgagattgggatgaaaggcgagcgccggaggggcaaggggcacgatggcctttaccagggtctcagtacagccaccaaggacacctacgacgcccttcacatgcaggccctgccccctcgctctagtggctccggcgagggcagaggaagtctactaacctgcggagatgtggaagaaaatcctggcccacatatgaccgagtacaagcccacggtgcgcctcgccacccgcgacgacgtccccagggccgtacgcaccctcgccgccgcgttcgccgactaccccgccacgcgccacaccgtcgatccggaccgccacatcgagcgggtcaccgagctgcaagaactcttcctcacgcgcgtcgggctcgacatcggcaaggtgtgggtcgcggacgacggcgccgcggtggcggtctggaccacgccggagagcgtcgaagcgggggcggtgttcgccgagatcggcccgcgcatggccgagttgagcggttcccggctggccgcgcagcaacagatggaaggcctcctggcgccgcaccggcccaaggagcccgcgtggttcctggccaccgtcggcgtctcgcccgaccaccagggcaagggtctgggcagcgccgtcgtgctccccggagtggaggcggccgagcgcgccggggtgcccgccttcctggagacctccgcgccccgcaacctccccttctacgagcggctcggcttcaccgtcaccgccgacgtcgaggtgcccgaaggaccgcgcacctggtgcatgacccgcaagcccggtgcctga

SEQ ID NO: 7195 - DNA, 2163 bp, Artificial Sequence
  Synthetic Polynucloetide
atggccttaccagtgaccgccttgctcctgccgctggccttgctgctccacgccgccaggccgcaggtgcagctggttgaatctggcggaggactggttcagcctggcggatctctgagactgtcttgtgccgccagcggcttcaccttcaccaatcacgccatgagctgggtccgacaggcccctggaaaaggactggaactggtgtctagcatcagcggcaacggcagaaccacctactacgccgatagcgtgaagggcagattcaccatcagccgggacatcagcaagaacaccctggacctccagatgaacagcctgagagccgaggataccgccgtgtactactgtgccaaggatggcggagagacactggtggatagcagaggccagggcacactggtcacagtgtcatctctcgagagcggcggaggcggatctttcgaagtgcaggttttggagtctggcggaggactggttcagcctggcggatctctgagactgtcttgtgccgccagcggcttcaccttcagcaactttgccatgagctgggtccgacaggcccctggcaaaggacttgaatgggtgtccacaatcagcggcagcgccggcacaacagattacgccgattctgtgaagggcagattcaccatcagccgggacaacagcaagaaaaccctgtacctccagatgaacagcctgcgcgtggaagataccgccgtgtactactgtgccgatggcagaggccccttcttcgattatcgcggccagggcacactggtcaccgtttcttctacgcgtgagcagaaactgatctcggaagaggatctgaaaattgaagttatgtatcctcctccttacctagacaatgagaagagcaatggaaccattatccatgtgaaagggaaacacctttgtccaagtcccctatttcccggaccttctaagcccttttgggtgctggtggtggttgggggagtcctggcttgctatagcttgctagtaacagtggcctttattattttctgggtgaggagtaagaggagcaggctcctgcacagtgactacatgaacatgactccacgccgccccggacccacccgcaagcattaccagccctatgccccaccacgcgacttcgcagcctatcgctccagagtgaagttcagcaggagcgcagacgcccccgcgtaccagcagggccagaaccagctctataacgagctcaatctaggacgaagagaggagtacgatgttttggacaagagacgtggccgggaccctgagatggggggaaagccgagaaggaagaaccctcaggaaggcctgtacaatgaactgcagaaagataagatggcggaggcctacagtgagattgggatgaaaggcgagcgccggaggggcaaggggcacgatggcctttaccagggtctcagtacagccaccaaggacacctacgacgcccttcacatgcaggccctgccccctcgctctagtggctccggcgagggcagaggaagtctactaacctgcggagatgtggaagaaaatcctggcccacatatgaccgagtacaagcccacggtgcgcctcgccacccgcgacgacgtccccagggccgtacgcaccctcgccgccgcgttcgccgactaccccgccacgcgccacaccgtcgatccggaccgccacatcgagcgggtcaccgagctgcaagaactcttcctcacgcgcgtcgggctcgacatcggcaaggtgtgggtcgcggacgacggcgccgcggtggcggtctggaccacgccggagagcgtcgaagcgggggcggtgttcgccgagatcggcccgcgcatggccgagttgagcggttcccggctggccgcgcagcaacagatggaaggcctcctggcgccgcaccggcccaaggagcccgcgtggttcctggccaccgtcggcgtctcgcccgaccaccagggcaagggtctgggcagcgccgtcgtgctccccggagtggaggcggccgagcgcgccggggtgcccgccttcctggagacctccgcgccccgcaacctccccttctacgagcggctcggcttcaccgtcaccgccgacgtcgaggtgcccgaaggaccgcgcacctggtgcatgacccgcaagcccggtgcctga

SEQ ID NO: 7196 - DNA, 1491 bp, Artificial Sequence
  Synthetic Polynucloetide
atggccttaccagtgaccgccttgctcctgccgctggccttgctgctccacgccgccaggccgcaggtgcagctggttgaatctggcggaggactggttcagcctggcggatctctgagactgtcttgtgccgccagcggcttcaccttcaccaatcacgccatgagctgggtccgacaggcccctggaaaaggactggaactggtgtctagcatcagcggcaacggcagaaccacctactacgccgatagcgtgaagggcagattcaccatcagccgggacatcagcaagaacaccctggacctccagatgaacagcctgagagccgaggataccgccgtgtactactgtgccaaggatggcggagagacactggtggatagcagaggccagggcacactggtcacagtgtcatctctcgagagcggcggaggcggatctttcgaagtgcaggttttggagtctggcggaggactggttcagcctggcggatctctgagactgtcttgtgccgccagcggcttcaccttcagcaactttgccatgagctgggtccgacaggcccctggcaaaggacttgaatgggtgtccacaatcagcggcagcgccggcacaacagattacgccgattctgtgaagggcagattcaccatcagccgggacaacagcaagaaaaccctgtacctccagatgaacagcctgcgcgtggaagataccgccgtgtactactgtgccgatggcagaggccccttcttcgattatcgcggccagggcacactggtcaccgtttcttctacgcgtgagcagaaactgatctcggaagaggatctgaaaattgaagttatgtatcctcctccttacctagacaatgagaagagcaatggaaccattatccatgtgaaagggaaacacctttgtccaagtcccctatttcccggaccttctaagcccttttgggtgctggtggtggttgggggagtcctggcttgctatagcttgctagtaacagtggcctttattattttctgggtgaggagtaagaggagcaggctcctgcacagtgactacatgaacatgactccacgccgccccggacccacccgcaagcattaccagccctatgccccaccacgcgacttcgcagcctatcgctccagagtgaagttcagcaggagcgcagacgcccccgcgtaccagcagggccagaaccagctctataacgagctcaatctaggacgaagagaggagtacgatgttttggacaagagacgtggccgggaccctgagatggggggaaagccgagaaggaagaaccctcaggaaggcctgtacaatgaactgcagaaagataagatggcggaggcctacagtgagattgggatgaaaggcgagcgccggaggggcaaggggcacgatggcctttaccagggtctcagtacagccaccaaggacacctacgacgcccttcacatgcaggccctgccccctcgc

SEQ ID NO: 7197 - DNA, 1512 bp, Artificial Sequence
  Synthetic Polynucloetide
atggccttaccagtgaccgccttgctcctgccgctggccttgctgctccacgccgccaggccgcaggtgcagctggttgaatctggcggaggactggttcagcctggcggatctctgagactgtcttgtgccgccagcggcttcaccttcaccaatcacgccatgagctgggtccgacaggcccctggaaaaggactggaactggtgtctagcatcagcggcaacggcagaaccacctactacgccgatagcgtgaagggcagattcaccatcagccgggacatcagcaagaacaccctggacctccagatgaacagcctgagagccgaggataccgccgtgtactactgtgccaaggatggcggagagacactggtggatagcagaggccagggcacactggtcacagtgtcatctctcgagagcggcggaggcggatctttcgaagtgcaggttttggagtctggcggaggactggttcagcctggcggatctctgagactgtcttgtgccgccagcggcttcaccttcagcaactttgccatgagctgggtccgacaggcccctggcaaaggacttgaatgggtgtccacaatcagcggcagcgccggcacaacagattacgccgattctgtgaagggcagattcaccatcagccgggacaacagcaagaaaaccctgtacctccagatgaacagcctgcgcgtggaagataccgccgtgtactactgtgccgatggcagaggccccttcttcgattatcgcggccagggcacactggtcaccgtttcttctacgcgtgagcagaaactgatctcggaagaggatctggcgaagcccaccacgacgccagcgccgcgaccaccaacaccggcgcccaccatcgcgtcgcagcccctgtccctgcgcccagaggcgtgccggccagcggcggggggcgcagtgcacacgagggggctggacttcgcctgtgacatctacatctgggcgcccttggccgggacttgtggggtccttctcctgtcactggttatcaccctttactgcaaacggggcagaaagaaactcctgtatatattcaaacaaccatttatgagaccagtacaaactactcaagaggaagatggctgtagctgccgatttccagaagaagaagaaggaggatgtgaactgagagtgaagttcagcaggagcgcagacgcccccgcgtaccagcagggccagaaccagctctataacgagctgaatctaggacgaagagaggagtacgatgttttggacaagagacgtggccgggaccctgagatggggggaaagccgagaaggaagaaccctcaggaaggcctgtacaatgaactgcagaaagataagatggcggaggcctacagtgagattgggatgaaaggcgagcgccggaggggcaaggggcacgatggcctttaccagggtctcagtacagccaccaaggacacctacgacgcccttcacatgcaggccctgccccctcgctga

SEQ ID NO: 7198 - DNA, 1515 bp, Artificial Sequence
  Synthetic Polynucloetide
atggccttaccagtgaccgccttgctcctgccgctggccttgctgctccacgccgccaggccggaagtgcaggttttggagtctggcggaggactggttcagcctggcggatctctgagactgtcttgtgccgccagcggcttcaccttcagcaactttgccatgagctgggtccgacaggcccctggcaaaggacttgaatgggtgtccacaatcagcggcagcgccggcacaacagattacgccgattctgtgaagggcagattcaccatcagccgggacaacagcaagaaaaccctgtacctccagatgaacagcctgcgcgtggaagataccgccgtgtactactgtgccgatggcagaggccccttcttcgattatcgcggccagggcacactggtcaccgtttcttctctcgagagcggcggaggcggatctttcgaacaggtgcagctggttgaatctggcggaggactggttcagcctggcggatctctgagactgtcttgtgccgccagcggcttcaccttcaccaatcacgccatgagctgggtccgacaggcccctggaaaaggactggaactggtgtctagcatcagcggcaacggcagaaccacctactacgccgatagcgtgaagggcagattcaccatcagccgggacatcagcaagaacaccctggacctccagatgaacagcctgagagccgaggataccgccgtgtactactgtgccaaggatggcggagagacactggtggatagcagaggccagggcacactggtcacagtgtcatctacgcgtgagcagaaactgatctcggaagaggatctggcgaagcccaccacgacgccagcgccgcgaccaccaacaccggcgcccaccatcgcgtcgcagcccctgtccctgcgcccagaggcgtgccggccagcggcggggggcgcagtgcacacgagggggctggacttcgcctgtgacatctacatctgggcgcccttggccgggacttgtggggtccttctcctgtcactggttatcaccctttactgcaaacggggcagaaagaaactcctgtatatattcaaacaaccatttatgagaccagtacaaactactcaagaggaagatggctgtagctgccgatttccagaagaagaagaaggaggatgtgaactgagagtgaagttcagcaggagcgcagacgcccccgcgtaccagcagggccagaaccagctctataacgagctgaatctaggacgaagagaggagtacgatgttttggacaagagacgtggccgggaccctgagatggggggaaagccgagaaggaagaaccctcaggaaggcctgtacaatgaactgcagaaagataagatggcggaggcctacagtgagattgggatgaaaggcgagcgccggaggggcaaggggcacgatggcctttaccagggtctcagtacagccaccaaggacacctacgacgcccttcacatgcaggccctgccccctcgctga

SEQ ID NO: 7199 - DNA, 2751 bp, Artificial Sequence
  Synthetic Polynucloetide
atggccttaccagtgaccgccttgctcctgccgctggccttgctgctccacgccgccaggccgcaggtgcagctggttgaatctggcggaggactggttcagcctggcggatctctgagactgtcttgtgccgccagcggcttcaccttcaccaatcacgccatgagctgggtccgacaggcccctggaaaaggactggaactggtgtctagcatcagcggcaacggcagaaccacctactacgccgatagcgtgaagggcagattcaccatcagccgggacatcagcaagaacaccctggacctccagatgaacagcctgagagccgaggataccgccgtgtactactgtgccaaggatggcggagagacactggtggatagcagaggccagggcacactggtcacagtgtcatctctcgagagcggcggaggcggatctttcgaagtgcaggttttggagtctggcggaggactggttcagcctggcggatctctgagactgtcttgtgccgccagcggcttcaccttcagcaactttgccatgagctgggtccgacaggcccctggcaaaggacttgaatgggtgtccacaatcagcggcagcgccggcacaacagattacgccgattctgtgaagggcagattcaccatcagccgggacaacagcaagaaaaccctgtacctccagatgaacagcctgcgcgtggaagataccgccgtgtactactgtgccgatggcagaggccccttcttcgattatcgcggccagggcacactggtcaccgtttcttctacgcgtgagcagaaactgatctcggaagaggatctggcgaagcccaccacgacgccagcgccgcgaccaccaacaccggcgcccaccatcgcgtcgcagcccctgtccctgcgcccagaggcgtgccggccagcggcggggggcgcagtgcacacgagggggctggacttcgcctgtgacatctacatctgggcgcccttggccgggacttgtggggtccttctcctgtcactggttatcaccctttactgcgggcgcgccagagtgaagttcagcaggagcgcagacgcccccgcgtaccagcagggccagaaccagctctataacgagctgaatctaggacgaagagaggagtacgatgttttggacaagagacgtggccgggaccctgagatggggggaaagccgagaaggaagaaccctcaggaaggcctgtacaatgaactgcagaaagataagatggcggaggcctacagtgagattgggatgaaaggcgagcgccggaggggcaaggggcacgatggcctttaccagggtctcagtacagccaccaaggacacctacgacgcccttcacatgcaggccctgccccctcgctctagaggatctggagcaacaaacttctcactactcaaacaagcaggtgacgtggaggagaatcccgggcctgggatccacatggccacttacgaggttctctgtgaggtggcgcggaaactgggcacggatgacagggaagtggtattgttcctcctaaacgtgttcatacctcaacccacactggcccaattaattggagctcttagagctttaaaggaggagggcaggttaacgtttcccctgttagcggaatgtctgtttcgtgcaggtcgcagagacctcttgcgcgacctgcttcacttagacccgcgttttttagagcgccacctagcgggcacaatgagttatttcagcccttatcagctcactgttctccacgtagacggggagctgtgtgcgagggatattaggtctttgatatttttaagcaaggacactatagggtctcgcagcacaccacagacattcttacactgggtgtactgtatggaaaacttagacctactgggtcccactgacgtggatgccctaatgtcaatgcttagatctttgtcaagagtagacctacagcgccaagtgcaaaccctaatgggccttcacctttccggcccatcacactcccaacactatcgccatacaccactcgagaccgatttctacgactacaaggacgacgatgacaagactagtggctccggcgagggcagaggaagtctactaacctgcggagatgtggaagaaaatcctggcccacatatgaccgagtacaagcccacggtgcgcctcgccacccgcgacgacgtccccagggccgtacgcaccctcgccgccgcgttcgccgactaccccgccacgcgccacaccgtcgatccggaccgccacatcgagcgggtcaccgagctgcaagaactcttcctcacgcgcgtcgggctcgacatcggcaaggtgtgggtcgcggacgacggcgccgcggtggcggtctggaccacgccggagagcgtcgaagcgggggcggtgttcgccgagatcggcccgcgcatggccgagttgagcggttcccggctggccgcgcagcaacagatggaaggcctcctggcgccgcaccggcccaaggagcccgcgtggttcctggccaccgtcggcgtctcgcccgaccaccagggcaagggtctgggcagcgccgtcgtgctccccggagtggaggcggccgagcgcgccggggtgcccgccttcctggagacctccgcgccccgcaacctccccttctacgagcggctcggcttcaccgtcaccgccgacgtcgaggtgcccgaaggaccgcgcacctggtgcatgacccgcaagcccggtgcctga

SEQ ID NO: 7200 - DNA, 2586 bp, Artificial Sequence
  Synthetic Polynucloetide
atggccttaccagtgaccgccttgctcctgccgctggccttgctgctccacgccgccaggccgcaggtgcagctggttgaatctggcggaggactggttcagcctggcggatctctgagactgtcttgtgccgccagcggcttcaccttcaccaatcacgccatgagctgggtccgacaggcccctggaaaaggactggaactggtgtctagcatcagcggcaacggcagaaccacctactacgccgatagcgtgaagggcagattcaccatcagccgggacatcagcaagaacaccctggacctccagatgaacagcctgagagccgaggataccgccgtgtactactgtgccaaggatggcggagagacactggtggatagcagaggccagggcacactggtcacagtgtcatctctcgagatccagaaccctgatcctgccgtgtaccagctgcgggatagcaagagcagcgacaagagcgtgtgtctgttcaccgacttcgacagccagaccaacgtgtcccagagcaaggactccgacgtgtacatcaccgataagtgcgtgctggacatgcggagcatggacttcaagagcaactccgccgtggcctggtccaacaagtccgatttcgcctgcgccaacgccttcaacaacagcattatccccgaggacacattcttcccaagcagcgacgtgccctgcgacgtgaagctggtggaaaagagcttcgagacagacaccaacctgaacttccagaacctgagcgtgatcggcttcagaatcctgctgctgaaagtggccggctttaacctgctgatgaccctgcggctgtggtccagccgcgccaagagaagcggatctggcgtgaagcagaccctgaatttcgacctgctgaagctggctggcgacgtggaatccaacccaggccctactagtatggactggatttggcgcatccttttccttgtcggcgctgctaccggcgcgcattccttcgaagtgcaggttttggagtctggcggaggactggttcagcctggcggatctctgagactgtcttgtgccgccagcggcttcaccttcagcaactttgccatgagctgggtccgacaggcccctggcaaaggacttgaatgggtgtccacaatcagcggcagcgccggcacaacagattacgccgattctgtgaagggcagattcaccatcagccgggacaacagcaagaaaaccctgtacctccagatgaacagcctgcgcgtggaagataccgccgtgtactactgtgccgatggcagaggccccttcttcgattatcgcggccagggcacactggtcaccgtttcttctacgcgtgaggacctgaagaacgtgttcccacctgaggtggccgtgttcgagcctagcaaggccgagatcgcccacacccagaaagccaccctcgtgtgcctggctaccggcttctaccccgaccatgtggaactgtcttggtgggtcaacggcaaagaggtgcacagcggcgtgtgtaccgacccccagccactgaaagaacagcccgccctgaacgacagccggtactgcctgagcagcagactgagagtgtccgccaccttctggcagaacccccggaaccacttcagatgccaggtgcagttctacggcctgagcgagaacgacgagtggacccaggacagagccaagcccgtgacccagatcgtgtctgccgaagcctggggcagagccgattgcggcatcaccagcgccagctaccaccagggcgtgctgagcgccaccatcctgtacgagatcctgctgggcaaggccaccctgtacgccgtgctggtgtctgccctggtgctgatggctatggtcaagcggaaggacagccggggaagggccaagcgatctggatctggagcaacaaacttctcactactcaaacaagcaggtgacgtggaggagaatcccgggccttctagaggccatatgaccgagtacaagcccacggtgcgcctcgccacccgcgacgacgtccccagggccgtacgcaccctcgccgccgcgttcgccgactaccccgccacgcgccacaccgtcgatccggaccgccacatcgagcgggtcaccgagctgcaagaactcttcctcacgcgcgtcgggctcgacatcggcaaggtgtgggtcgcggacgacggcgccgcggtggcggtctggaccacgccggagagcgtcgaagcgggggcggtgttcgccgagatcggcccgcgcatggccgagttgagcggttcccggctggccgcgcagcaacagatggaaggcctcctggcgccgcaccggcccaaggagcccgcgtggttcctggccaccgtcggcgtctcgcccgaccaccagggcaagggtctgggcagcgccgtcgtgctccccggagtggaggcggccgagcgcgccggggtgcccgccttcctggagacctccgcgccccgcaacctccccttctacgagcggctcggcttcaccgtcaccgccgacgtcgaggtgcccgaaggaccgcgcacctggtgcatgacccgcaagcccggtgcctga

SEQ ID NO: 7201 - DNA, 2583 bp, Artificial Sequence
  Synthetic Polynucloetide
atggccttaccagtgaccgccttgctcctgccgctggccttgctgctccacgccgccaggccgcaggtgcagctggttgaatctggcggaggactggttcagcctggcggatctctgagactgtcttgtgccgccagcggcttcaccttcaccaatcacgccatgagctgggtccgacaggcccctggaaaaggactggaactggtgtctagcatcagcggcaacggcagaaccacctactacgccgatagcgtgaagggcagattcaccatcagccgggacatcagcaagaacaccctggacctccagatgaacagcctgagagccgaggataccgccgtgtactactgtgccaaggatggcggagagacactggtggatagcagaggccagggcacactggtcacagtgtcatctctcgaggacctgaagaacgtgttcccacctgaggtggccgtgttcgagcctagcaaggccgagatcgcccacacccagaaagccaccctcgtgtgcctggctaccggcttctaccccgaccatgtggaactgtcttggtgggtcaacggcaaagaggtgcacagcggcgtgtgtaccgacccccagccactgaaagaacagcccgccctgaacgacagccggtactgcctgagcagcagactgagagtgtccgccaccttctggcagaacccccggaaccacttcagatgccaggtgcagttctacggcctgagcgagaacgacgagtggacccaggacagagccaagcccgtgacccagatcgtgtctgccgaagcctggggcagagccgattgcggcatcaccagcgccagctaccaccagggcgtgctgagcgccaccatcctgtacgagatcctgctgggcaaggccaccctgtacgccgtgctggtgtctgccctggtgctgatggctatggtcaagcggaaggacagccggggaagggccaagcgatctggatctggagcaacaaacttctcactactcaaacaagcaggtgacgtggaggagaatcccgggcctactagtatggactggatttggcgcatccttttccttgtcggcgctgctaccggcgcgcattccttcgaagtgcaggttttggagtctggcggaggactggttcagcctggcggatctctgagactgtcttgtgccgccagcggcttcaccttcagcaactttgccatgagctgggtccgacaggcccctggcaaaggacttgaatgggtgtccacaatcagcggcagcgccggcacaacagattacgccgattctgtgaagggcagattcaccatcagccgggacaacagcaagaaaaccctgtacctccagatgaacagcctgcgcgtggaagataccgccgtgtactactgtgccgatggcagaggccccttcttcgattatcgcggccagggcacactggtcaccgtttcttctacgcgtatccagaaccctgatcctgccgtgtaccagctgcgggatagcaagagcagcgacaagagcgtgtgtctgttcaccgacttcgacagccagaccaacgtgtcccagagcaaggactccgacgtgtacatcaccgataagtgcgtgctggacatgcggagcatggacttcaagagcaactccgccgtggcctggtccaacaagtccgatttcgcctgcgccaacgccttcaacaacagcattatccccgaggacacattcttcccaagcagcgacgtgccctgcgacgtgaagctggtggaaaagagcttcgagacagacaccaacctgaacttccagaacctgagcgtgatcggcttcagaatcctgctgctgaaagtggccggctttaacctgctgatgaccctgcggctgtggtccagccgcgccaagagaagcggatctggcgtgaagcagaccctgaatttcgacctgctgaagctggctggcgacgtggaatccaacccaggcccttctagaggccatatgaccgagtacaagcccacggtgcgcctcgccacccgcgacgacgtccccagggccgtacgcaccctcgccgccgcgttcgccgactaccccgccacgcgccacaccgtcgatccggaccgccacatcgagcgggtcaccgagctgcaagaactcttcctcacgcgcgtcgggctcgacatcggcaaggtgtgggtcgcggacgacggcgccgcggtggcggtctggaccacgccggagagcgtcgaagcgggggcggtgttcgccgagatcggcccgcgcatggccgagttgagcggttcccggctggccgcgcagcaacagatggaaggcctcctggcgccgcaccggcccaaggagcccgcgtggttcctggccaccgtcggcgtctcgcccgaccaccagggcaagggtctgggcagcgccgtcgtgctccccggagtggaggcggccgagcgcgccggggtgcccgccttcctggagacctccgcgccccgcaacctccccttctacgagcggctcggcttcaccgtcaccgccgacgtcgaggtgcccgaaggaccgcgcacctggtgcatgacccgcaagcccggtgcctga

SEQ ID NO: 7202 - DNA, 1881 bp, Artificial Sequence
  Synthetic Polynucloetide
atggccttaccagtgaccgccttgctcctgccgctggccttgctgctccacgccgccaggccgcaggtgcagctggttgaatctggcggaggactggttcagcctggcggatctctgagactgtcttgtgccgccagcggcttcaccttcaccaatcacgccatgagctgggtccgacaggcccctggaaaaggactggaactggtgtctagcatcagcggcaacggcagaaccacctactacgccgatagcgtgaagggcagattcaccatcagccgggacatcagcaagaacaccctggacctccagatgaacagcctgagagccgaggataccgccgtgtactactgtgccaaggatggcggagagacactggtggatagcagaggccagggcacactggtcacagtgtcatctctcgaggacctgaagaacgtgttcccacctgaggtggccgtgttcgagcctagcgaggccgagatcagccacacccagaaagccaccctcgtgtgcctggctaccggcttctaccccgaccatgtggaactgtcttggtgggtcaacggcaaagaggtgcacagcggcgtgtgtaccgacccccagccactgaaagaacagcccgccctgaacgacagccggtactgcctgagcagcagactgagagtgtccgccaccttctggcagaacccccggaaccacttcagatgccaggtgcagttctacggcctgagcgagaacgacgagtggacccaggacagagccaagcccgtgacccagatcgtgtctgccgaagcctggggcagagccgattgcggctttaccagcgagagctaccagcagggcgtgctgagcgccaccatcctgtacgagatcctgctgggcaaggccaccctgtacgccgtgctggtgtctgccctggtgctgatggctatggtcaagcggaaggacagccggggaagggccaagcgatctggatctggagcaacaaacttctcactactcaaacaagcaggtgacgtggaggagaatcccgggcctactagtatggactggatttggcgcatccttttccttgtcggcgctgctaccggcgcgcattccttcgaagtgcaggttttggagtctggcggaggactggttcagcctggcggatctctgagactgtcttgtgccgccagcggcttcaccttcagcaactttgccatgagctgggtccgacaggcccctggcaaaggacttgaatgggtgtccacaatcagcggcagcgccggcacaacagattacgccgattctgtgaagggcagattcaccatcagccgggacaacagcaagaaaaccctgtacctccagatgaacagcctgcgcgtggaagataccgccgtgtactactgtgccgatggcagaggccccttcttcgattatcgcggccagggcacactggtcaccgtttcttctacgcgtatccagaaccctgatcctgccgtgtaccagctgcgggatagcaagagcagcgacaagagcgtgtgtctgttcaccgacttcgacagccagaccaacgtgtcccagagcaaggactccgacgtgtacatcaccgataagtgcgtgctggacatgcggagcatggacttcaagagcaactccgccgtggcctggtccaacaagtccgatttcgcctgcgccaacgccttcaacaacagcattatccccgaggacacattcttcccaagccccgagagcagctgcgacgtgaagctggtggaaaagagcttcgagacagacaccaacctgaacttccagaacctgagcgtgatcggcttcagaatcctgctgctgaaagtggccggctttaacctgctgatgaccctgcggctgtggtccagc

SEQ ID NO: 7203 - DNA, 2556 bp, Artificial Sequence
  Synthetic Polynucloetide
atggccttaccagtgaccgccttgctcctgccgctggccttgctgctccacgccgccaggccgcaggtgcagctggttgaatctggcggaggactggttcagcctggcggatctctgagactgtcttgtgccgccagcggcttcaccttcaccaatcacgccatgagctgggtccgacaggcccctggaaaaggactggaactggtgtctagcatcagcggcaacggcagaaccacctactacgccgatagcgtgaagggcagattcaccatcagccgggacatcagcaagaacaccctggacctccagatgaacagcctgagagccgaggataccgccgtgtactactgtgccaaggatggcggagagacactggtggatagcagaggccagggcacactggtcacagtgtcatctctcgaggacctgaagaacgtgttcccacctgaggtggccgtgttcgagcctagcgaggccgagatcagccacacccagaaagccaccctcgtgtgcctggctaccggcttctaccccgaccatgtggaactgtcttggtgggtcaacggcaaagaggtgcacagcggcgtgtgtaccgacccccagccactgaaagaacagcccgccctgaacgacagccggtactgcctgagcagcagactgagagtgtccgccaccttctggcagaacccccggaaccacttcagatgccaggtgcagttctacggcctgagcgagaacgacgagtggacccaggacagagccaagcccgtgacccagatcgtgtctgccgaagcctggggcagagccgattgcggctttaccagcgagagctaccagcagggcgtgctgagcgccaccatcctgtacgagatcctgctgggcaaggccaccctgtacgccgtgctggtgtctgccctggtgctgatggctatggtcaagcggaaggacagccggggaagggccaagcgatctggatctggagcaacaaacttctcactactcaaacaagcaggtgacgtggaggagaatcccgggcctactagtatggactggatttggcgcatccttttccttgtcggcgctgctaccggcgcgcattccttcgaagtgcaggttttggagtctggcggaggactggttcagcctggcggatctctgagactgtcttgtgccgccagcggcttcaccttcagcaactttgccatgagctgggtccgacaggcccctggcaaaggacttgaatgggtgtccacaatcagcggcagcgccggcacaacagattacgccgattctgtgaagggcagattcaccatcagccgggacaacagcaagaaaaccctgtacctccagatgaacagcctgcgcgtggaagataccgccgtgtactactgtgccgatggcagaggccccttcttcgattatcgcggccagggcacactggtcaccgtttcttctacgcgtatccagaaccctgatcctgccgtgtaccagctgcgggatagcaagagcagcgacaagagcgtgtgtctgttcaccgacttcgacagccagaccaacgtgtcccagagcaaggactccgacgtgtacatcaccgataagtgcgtgctggacatgcggagcatggacttcaagagcaactccgccgtggcctggtccaacaagtccgatttcgcctgcgccaacgccttcaacaacagcattatccccgaggacacattcttcccaagccccgagagcagctgcgacgtgaagctggtggaaaagagcttcgagacagacaccaacctgaacttccagaacctgagcgtgatcggcttcagaatcctgctgctgaaagtggccggctttaacctgctgatgaccctgcggctgtggtccagccgcgccaagagaagcggatctggcgtgaagcagaccctgaatttcgacctgctgaagctggctggcgacgtggaatccaacccaggcccttctagaggcgggatccacaccatggctacctacgaggtgctgtgcgaggtggcaagaaagctgggcaccgacgacagagaagtggtgctgttcctgctgaacgtgttcatccctcagcctacactggcccagctgatcggtgcactgagagccctgaaagaggaaggccggctgacctttcctctgctggccgaatgcctgttcagagccggaagaagggatctgctgcgggacctgctgcatctggaccccagatttctggaaagacacctggccggcaccatgagctacttcagcccttaccagctgaccgtgctgcacgttgacggcgaactgtgcgccagagatattcggagcctgatcttcctgagcaaggacaccatcggcagccggtctacccctcagacatttctgcactgggtgtactgcatggaaaacctggacctgctcggccccacagatgtggatgccctgatgtccatgctgagaagcctgagcagagtggacctccagagacaggtgcagacactgatgggactgcacctgagcggacctagccacagccagcactacagacacacccct

SEQ ID NO: 7204 - DNA, 1893 bp, Artificial Sequence
  Synthetic Polynucloetide
atggccttaccagtgaccgccttgctcctgccgctggccttgctgctccacgccgccaggccgcaggtgcagctggttgaatctggcggaggactggttcagcctggcggatctctgagactgtcttgtgccgccagcggcttcaccttcaccaatcacgccatgagctgggtccgacaggcccctggaaaaggactggaactggtgtctagcatcagcggcaacggcagaaccacctactacgccgatagcgtgaagggcagattcaccatcagccgggacatcagcaagaacaccctggacctccagatgaacagcctgagagccgaggataccgccgtgtactactgtgccaaggatggcggagagacactggtggatagcagaggccagggcacactggtcacagtgtcatctctcgagatccagaaccctgatcctgccgtgtaccagctgcgggatagcaagagcagcgacaagagcgtgtgtctgttcaccgacttcgacagccagaccaacgtgtcccagagcaaggactccgacgtgtacatcaccgataagtgcgtgctggacatgcggagcatggacttcaagagcaactccgccgtggcctggtccaacaagtccgatttcgcctgcgccaacgccttcaacaacagcattatccccgaggacacattcttcccaagccccgagagcagctgcgacgtgaagctggtggaaaagagcttcgagacagacaccaacctgaacttccagaacctgagcgtgatcggcttcagaatcctgctgctgaaagtggccggctttaacctgctgatgaccctgcggctgtggtccagccgcgccaagagaagcggatctggcgtgaagcagaccctgaatttcgacctgctgaagctggctggcgacgtggaatccaacccaggccctactagtatggactggatttggcgcatccttttccttgtcggcgctgctaccggcgcgcattccttcgaagtgcaggttttggagtctggcggaggactggttcagcctggcggatctctgagactgtcttgtgccgccagcggcttcaccttcagcaactttgccatgagctgggtccgacaggcccctggcaaaggacttgaatgggtgtccacaatcagcggcagcgccggcacaacagattacgccgattctgtgaagggcagattcaccatcagccgggacaacagcaagaaaaccctgtacctccagatgaacagcctgcgcgtggaagataccgccgtgtactactgtgccgatggcagaggccccttcttcgattatcgcggccagggcacactggtcaccgtttcttctacgcgtgaggacctgaagaacgtgttcccacctgaggtggccgtgttcgagcctagcgaggccgagatcagccacacccagaaagccaccctcgtgtgcctggctaccggcttctaccccgaccatgtggaactgtcttggtgggtcaacggcaaagaggtgcacagcggcgtgtgtaccgacccccagccactgaaagaacagcccgccctgaacgacagccggtactgcctgagcagcagactgagagtgtccgccaccttctggcagaacccccggaaccacttcagatgccaggtgcagttctacggcctgagcgagaacgacgagtggacccaggacagagccaagcccgtgacccagatcgtgtctgccgaagcctggggcagagccgattgcggctttaccagcgagagctaccagcagggcgtgctgagcgccaccatcctgtacgagatcctgctgggcaaggccaccctgtacgccgtgctggtgtctgccctggtgctgatggctatggtcaagcggaaggacagccgggga

SEQ ID NO: 7205 - DNA, 2559 bp, Artificial Sequence
  Synthetic Polynucloetide
atggccttaccagtgaccgccttgctcctgccgctggccttgctgctccacgccgccaggccgcaggtgcagctggttgaatctggcggaggactggttcagcctggcggatctctgagactgtcttgtgccgccagcggcttcaccttcaccaatcacgccatgagctgggtccgacaggcccctggaaaaggactggaactggtgtctagcatcagcggcaacggcagaaccacctactacgccgatagcgtgaagggcagattcaccatcagccgggacatcagcaagaacaccctggacctccagatgaacagcctgagagccgaggataccgccgtgtactactgtgccaaggatggcggagagacactggtggatagcagaggccagggcacactggtcacagtgtcatctctcgagatccagaaccctgatcctgccgtgtaccagctgcgggatagcaagagcagcgacaagagcgtgtgtctgttcaccgacttcgacagccagaccaacgtgtcccagagcaaggactccgacgtgtacatcaccgataagtgcgtgctggacatgcggagcatggacttcaagagcaactccgccgtggcctggtccaacaagtccgatttcgcctgcgccaacgccttcaacaacagcattatccccgaggacacattcttcccaagccccgagagcagctgcgacgtgaagctggtggaaaagagcttcgagacagacaccaacctgaacttccagaacctgagcgtgatcggcttcagaatcctgctgctgaaagtggccggctttaacctgctgatgaccctgcggctgtggtccagccgcgccaagagaagcggatctggcgtgaagcagaccctgaatttcgacctgctgaagctggctggcgacgtggaatccaacccaggccctactagtatggactggatttggcgcatccttttccttgtcggcgctgctaccggcgcgcattccttcgaagtgcaggttttggagtctggcggaggactggttcagcctggcggatctctgagactgtcttgtgccgccagcggcttcaccttcagcaactttgccatgagctgggtccgacaggcccctggcaaaggacttgaatgggtgtccacaatcagcggcagcgccggcacaacagattacgccgattctgtgaagggcagattcaccatcagccgggacaacagcaagaaaaccctgtacctccagatgaacagcctgcgcgtggaagataccgccgtgtactactgtgccgatggcagaggccccttcttcgattatcgcggccagggcacactggtcaccgtttcttctacgcgtgaggacctgaagaacgtgttcccacctgaggtggccgtgttcgagcctagcgaggccgagatcagccacacccagaaagccaccctcgtgtgcctggctaccggcttctaccccgaccatgtggaactgtcttggtgggtcaacggcaaagaggtgcacagcggcgtgtgtaccgacccccagccactgaaagaacagcccgccctgaacgacagccggtactgcctgagcagcagactgagagtgtccgccaccttctggcagaacccccggaaccacttcagatgccaggtgcagttctacggcctgagcgagaacgacgagtggacccaggacagagccaagcccgtgacccagatcgtgtctgccgaagcctggggcagagccgattgcggctttaccagcgagagctaccagcagggcgtgctgagcgccaccatcctgtacgagatcctgctgggcaaggccaccctgtacgccgtgctggtgtctgccctggtgctgatggctatggtcaagcggaaggacagccggggaagggccaagcgatctggatctggagcaacaaacttctcactactcaaacaagcaggtgacgtggaggagaatcccgggccttctagaggcgggatccacaccatggctacctacgaggtgctgtgcgaggtggcaagaaagctgggcaccgacgacagagaagtggtgctgttcctgctgaacgtgttcatccctcagcctacactggcccagctgatcggtgcactgagagccctgaaagaggaaggccggctgacctttcctctgctggccgaatgcctgttcagagccggaagaagggatctgctgcgggacctgctgcatctggaccccagatttctggaaagacacctggccggcaccatgagctacttcagcccttaccagctgaccgtgctgcacgttgacggcgaactgtgcgccagagatattcggagcctgatcttcctgagcaaggacaccatcggcagccggtctacccctcagacatttctgcactgggtgtactgcatggaaaacctggacctgctcggccccacagatgtggatgccctgatgtccatgctgagaagcctgagcagagtggacctccagagacaggtgcagacactgatgggactgcacctgagcggacctagccacagccagcactacagacacacccct

SEQ ID NO: 7206 - DNA, 2703 bp, Artificial Sequence
  Synthetic Polynucloetide
atggccttaccagtgaccgccttgctcctgccgctggccttgctgctccacgccgccaggccgctcgaggggaaaccaattcccaaccctcttctgggactggattcaaccggcagcggcgaggacctgaagaacgtgttcccacctgaggtggccgtgttcgagcctagcaaggccgagatcgcccacacccagaaagccaccctcgtgtgcctggctaccggcttctaccccgaccatgtggaactgtcttggtgggtcaacggcaaagaggtgcacagcggcgtgtgtaccgacccccagccactgaaagaacagcccgccctgaacgacagccggtactgcctgagcagcagactgagagtgtccgccaccttctggcagaacccccggaaccacttcagatgccaggtgcagttctacggcctgagcgagaacgacgagtggacccaggacagagccaagcccgtgacccagatcgtgtctgccgaagcctggggcagagccgattgcggcatcaccagcgccagctaccaccagggcgtgctgagcgccaccatcctgtacgagatcctgctgggcaaggccaccctgtacgccgtgctggtgtctgccctggtgctgatggctatggtcaagcggaaggacagccggggaagggccaagcgatctggatctggagcaacaaacttctcactactcaaacaagcaggtgacgtggaggagaatcccgggcctactagcatggccttaccagtgaccgccttgctcctgccgctggccttgctgctccacgccgccaggccgcaggtgcagctggttgaatctggcggaggactggttcagcctggcggatctctgagactgtcttgtgccgccagcggcttcaccttcaccaatcacgccatgagctgggtccgacaggcccctggaaaaggactggaactggtgtctagcatcagcggcaacggcagaaccacctactacgccgatagcgtgaagggcagattcaccatcagccgggacatcagcaagaacaccctggacctccagatgaacagcctgagagccgaggataccgccgtgtactactgtgccaaggatggcggagagacactggtggatagcagaggccagggcacactggtcacagtgtcatctctcgagagcggcggaggcggatctttcgaagtgcaggttttggagtctggcggaggactggttcagcctggcggatctctgagactgtcttgtgccgccagcggcttcaccttcagcaactttgccatgagctgggtccgacaggcccctggcaaaggacttgaatgggtgtccacaatcagcggcagcgccggcacaacagattacgccgattctgtgaagggcagattcaccatcagccgggacaacagcaagaaaaccctgtacctccagatgaacagcctgcgcgtggaagataccgccgtgtactactgtgccgatggcagaggccccttcttcgattatcgcggccagggcacactggtcaccgtttcttctacgcgtgagcagaaactgatctcggaagaggatgggagcggcatccagaaccctgatcctgccgtgtaccagctgcgggatagcaagagcagcgacaagagcgtgtgtctgttcaccgacttcgacagccagaccaacgtgtcccagagcaaggactccgacgtgtacatcaccgataagtgcgtgctggacatgcggagcatggacttcaagagcaactccgccgtggcctggtccaacaagtccgatttcgcctgcgccaacgccttcaacaacagcattatccccgaggacacattcttcccaagcagcgacgtgccctgcgacgtgaagctggtggaaaagagcttcgagacagacaccaacctgaacttccagaacctgagcgtgatcggcttcagaatcctgctgctgaaagtggccggctttaacctgctgatgaccctgcggctgtggtccagccgcgccaagagaagcggatctggcgtgaagcagaccctgaatttcgacctgctgaagctggctggcgacgtggaatccaacccaggcccttctagaggccatatgaccgagtacaagcccacggtgcgcctcgccacccgcgacgacgtccccagggccgtacgcaccctcgccgccgcgttcgccgactaccccgccacgcgccacaccgtcgatccggaccgccacatcgagcgggtcaccgagctgcaagaactcttcctcacgcgcgtcgggctcgacatcggcaaggtgtgggtcgcggacgacggcgccgcggtggcggtctggaccacgccggagagcgtcgaagcgggggcggtgttcgccgagatcggcccgcgcatggccgagttgagcggttcccggctggccgcgcagcaacagatggaaggcctcctggcgccgcaccggcccaaggagcccgcgtggttcctggccaccgtcggcgtctcgcccgaccaccagggcaagggtctgggcagcgccgtcgtgctccccggagtggaggcggccgagcgcgccggggtgcccgccttcctggagacctccgcgccccgcaacctccccttctacgagcggctcggcttcaccgtcaccgccgacgtcgaggtgcccgaaggaccgcgcacctggtgcatgacccgcaagcccggtgcctga

SEQ ID NO: 7207 - DNA, 2706 bp, Artificial Sequence
  Synthetic Polynucloetide
atggccttaccagtgaccgccttgctcctgccgctggccttgctgctccacgccgccaggccgctcgagcagaaactgatctcggaagaggatctgggctccggcgatcgccctgatcctgccgtgtaccagctgcgggatagcaagagcagcgacaagagcgtgtgtctgttcaccgacttcgacagccagaccaacgtgtcccagagcaaggactccgacgtgtacatcaccgataagtgcgtgctggacatgcggagcatggacttcaagagcaactccgccgtggcctggtccaacaagtccgatttcgcctgcgccaacgccttcaacaacagcattatccccgaggacacattcttcccaagccccgagagcagctgcgacgtgaagctggtggaaaagagcttcgagacagacaccaacctgaacttccagaacctgagcgtgatcggcttcagaatcctgctgctgaaagtggccggctttaacctgctgatgaccctgcggctgtggtccagctctagtcgcgccaagagaagcggatctggcgtgaagcagaccctgaatttcgacctgctgaagctggctggcgacgtggaatccaacccaggccccactagcatggccttaccagtgaccgccttgctcctgccgctggccttgctgctccacgccgccaggccgcaggtgcagctggttgaatctggcggaggactggttcagcctggcggatctctgagactgtcttgtgccgccagcggcttcaccttcaccaatcacgccatgagctgggtccgacaggcccctggaaaaggactggaactggtgtctagcatcagcggcaacggcagaaccacctactacgccgatagcgtgaagggcagattcaccatcagccgggacatcagcaagaacaccctggacctccagatgaacagcctgagagccgaggataccgccgtgtactactgtgccaaggatggcggagagacactggtggatagcagaggccagggcacactggtcacagtgtcatctctcgagagcggcggaggcggatctttcgaagtgcaggttttggagtctggcggaggactggttcagcctggcggatctctgagactgtcttgtgccgccagcggcttcaccttcagcaactttgccatgagctgggtccgacaggcccctggcaaaggacttgaatgggtgtccacaatcagcggcagcgccggcacaacagattacgccgattctgtgaagggcagattcaccatcagccgggacaacagcaagaaaaccctgtacctccagatgaacagcctgcgcgtggaagataccgccgtgtactactgtgccgatggcagaggccccttcttcgattatcgcggccagggcacactggtcaccgtttcttctacgcgtgggaaaccaattcccaaccctcttctgggactggattcaaccggcagcggcgaggacctgaagaacgtgttcccacctgaggtggccgtgttcgagcctagcgaggccgagatcagccacacccagaaagccaccctcgtgtgcctggctaccggcttctaccccgaccatgtggaactgtcttggtgggtcaacggcaaagaggtgcacagcggcgtgtgtaccgacccccagccactgaaagaacagcccgccctgaacgacagccggtactgcctgagcagcagactgagagtgtccgccaccttctggcagaacccccggaaccacttcagatgccaggtgcagttctacggcctgagcgagaacgacgagtggacccaggacagagccaagcccgtgacccagatcgtgtctgccgaagcctggggcagagccgattgcggctttaccagcgagagctaccagcagggcgtgctgagcgccaccatcctgtacgagatcctgctgggcaaggccaccctgtacgccgtgctggtgtctgccctggtgctgatggctatggtcaagcggaaggacagccggggaagggccaagcgatctggatctggagcaacaaacttctcactactcaaacaagcaggtgacgtggaggagaatcccgggccttctagaggccatatgaccgagtacaagcccacggtgcgcctcgccacccgcgacgacgtccccagggccgtacgcaccctcgccgccgcgttcgccgactaccccgccacgcgccacaccgtcgatccggaccgccacatcgagcgggtcaccgagctgcaagaactcttcctcacgcgcgtcgggctcgacatcggcaaggtgtgggtcgcggacgacggcgccgcggtggcggtctggaccacgccggagagcgtcgaagcgggggcggtgttcgccgagatcggcccgcgcatggccgagttgagcggttcccggctggccgcgcagcaacagatggaaggcctcctggcgccgcaccggcccaaggagcccgcgtggttcctggccaccgtcggcgtctcgcccgaccaccagggcaagggtctgggcagcgccgtcgtgctccccggagtggaggcggccgagcgcgccggggtgcccgccttcctggagacctccgcgccccgcaacctccccttctacgagcggctcggcttcaccgtcaccgccgacgtcgaggtgcccgaaggaccgcgcacctggtgcatgacccgcaagcccggtgcctga

SEQ ID NO: 7208 - DNA, 2583 bp, Artificial Sequence
  Synthetic Polynucloetide
atggccttaccagtgaccgccttgctcctgccgctggccttgctgctccacgccgccaggccgcaggtgcagctggttgaatctggcggaggactggttcagcctggcggatctctgagactgtcttgtgccgccagcggcttcaccttcaccaatcacgccatgagctgggtccgacaggcccctggaaaaggactggaactggtgtctagcatcagcggcaacggcagaaccacctactacgccgatagcgtgaagggcagattcaccatcagccgggacatcagcaagaacaccctggacctccagatgaacagcctgagagccgaggataccgccgtgtactactgtgccaaggatggcggagagacactggtggatagcagaggccagggcacactggtcacagtgtcatctctcgaggacctgaagaacgtgttcccacctgaggtggccgtgttcgagcctagcgaggccgagatcagccacacccagaaagccaccctcgtgtgcctggctaccggcttctaccccgaccatgtggaactgtcttggtgggtcaacggcaaagaggtgcacagcggcgtgtctaccgacccccagccactgaaagaacagcccgccctgaacgacagccggtactgcctgagcagcagactgagagtgtccgccaccttctggcagaacccccggaaccacttcagatgccaggtgcagttctacggcctgagcgagaacgacgagtggacccaggacagagccaagcccgtgacccagatcgtgtctgccgaagcctggggcagagccgattgcggctttaccagcgagagctaccagcagggcgtgctgagcgccaccatcctgtacgagatcctgctgggcaaggccaccctgtacgccgtgctggtgtctgccctggtgctgatggctatggtcaagcggaaggacagccggggaagggccaagcgatctggatctggagcaacaaacttctcactactcaaacaagcaggtgacgtggaggagaatcccgggcctactagtatggactggatttggcgcatccttttccttgtcggcgctgctaccggcgcgcattccttcgaagtgcaggttttggagtctggcggaggactggttcagcctggcggatctctgagactgtcttgtgccgccagcggcttcaccttcagcaactttgccatgagctgggtccgacaggcccctggcaaaggacttgaatgggtgtccacaatcagcggcagcgccggcacaacagattacgccgattctgtgaagggcagattcaccatcagccgggacaacagcaagaaaaccctgtacctccagatgaacagcctgcgcgtggaagataccgccgtgtactactgtgccgatggcagaggccccttcttcgattatcgcggccagggcacactggtcaccgtttcttctacgcgtatccagaaccctgatcctgccgtgtaccagctgcgggatagcaagagcagcgacaagagcgtgtgtctgttcaccgacttcgacagccagaccaacgtgtcccagagcaaggactccgacgtgtacatcaccgataagaccgtgctggacatgcggagcatggacttcaagagcaactccgccgtggcctggtccaacaagtccgatttcgcctgcgccaacgccttcaacaacagcattatccccgaggacacattcttcccaagccccgagagcagctgcgacgtgaagctggtggaaaagagcttcgagacagacaccaacctgaacttccagaacctgagcgtgatcggcttcagaatcctgctgctgaaagtggccggctttaacctgctgatgaccctgcggctgtggtccagccgcgccaagagaagcggatctggcgtgaagcagaccctgaatttcgacctgctgaagctggctggcgacgtggaatccaacccaggcccttctagaggccatatgaccgagtacaagcccacggtgcgcctcgccacccgcgacgacgtccccagggccgtacgcaccctcgccgccgcgttcgccgactaccccgccacgcgccacaccgtcgatccggaccgccacatcgagcgggtcaccgagctgcaagaactcttcctcacgcgcgtcgggctcgacatcggcaaggtgtgggtcgcggacgacggcgccgcggtggcggtctggaccacgccggagagcgtcgaagcgggggcggtgttcgccgagatcggcccgcgcatggccgagttgagcggttcccggctggccgcgcagcaacagatggaaggcctcctggcgccgcaccggcccaaggagcccgcgtggttcctggccaccgtcggcgtctcgcccgaccaccagggcaagggtctgggcagcgccgtcgtgctccccggagtggaggcggccgagcgcgccggggtgcccgccttcctggagacctccgcgccccgcaacctccccttctacgagcggctcggcttcaccgtcaccgccgacgtcgaggtgcccgaaggaccgcgcacctggtgcatgacccgcaagcccggtgcctga

SEQ ID NO: 7209 - DNA, 2829 bp, Artificial Sequence
  Synthetic Polynucloetide
atggccttaccagtgaccgccttgctcctgccgctggccttgctgctccacgccgccaggccgcaggtgcagctggttgaatctggcggaggactggttcagcctggcggatctctgagactgtcttgtgccgccagcggcttcaccttcaccaatcacgccatgagctgggtccgacaggcccctggaaaaggactggaactggtgtctagcatcagcggcaacggcagaaccacctactacgccgatagcgtgaagggcagattcaccatcagccgggacatcagcaagaacaccctggacctccagatgaacagcctgagagccgaggataccgccgtgtactactgtgccaaggatggcggagagacactggtggatagcagaggccagggcacactggtcacagtgtcatctctcgaggacctgaagaacgtgttcccacctgaggtggccgtgttcgagcctagcgaggccgagatcagccacacccagaaagccaccctcgtgtgcctggctaccggcttctaccccgaccatgtggaactgtcttggtgggtcaacggcaaagaggtgcacagcggcgtgtctaccgacccccagccactgaaagaacagcccgccctgaacgacagccggtactgcctgagcagcagactgagagtgtccgccaccttctggcagaacccccggaaccacttcagatgccaggtgcagttctacggcctgagcgagaacgacgagtggacccaggacagagccaagcccgtgacccagatcgtgtctgccgaagcctggggcagagccgattgcggctttaccagcgagagctaccagcagggcgtgctgagcgccaccatcctgtacgagatcctgctgggcaaggccaccctgtacgccgtgctggtgtctgccctggtgctgatggctatggtcaagcggaaggacagccggggaagggccaagcgatctggatctggagcaacaaacttctcactactcaaacaagcaggtgacgtggaggagaatcccgggcctactagtatggactggatttggcgcatccttttccttgtcggcgctgctaccggcgcgcattccttcgaagtgcaggttttggagtctggcggaggactggttcagcctggcggatctctgagactgtcttgtgccgccagcggcttcaccttcagcaactttgccatgagctgggtccgacaggcccctggcaaaggacttgaatgggtgtccacaatcagcggcagcgccggcacaacagattacgccgattctgtgaagggcagattcaccatcagccgggacaacagcaagaaaaccctgtacctccagatgaacagcctgcgcgtggaagataccgccgtgtactactgtgccgatggcagaggccccttcttcgattatcgcggccagggcacactggtcaccgtttcttctacgcgtgagcagaaactgatctcggaagaggatgggagcggcaccccattcccttctctggcccctcccatcatgctgctggtggacggcaagcagcagatggtggtcgtgtgcctggtgctggatgtggccccacctggactggacagccccatctggtttagcgccggcaatggctctgccctggacgcctttacctacggcccaagccctgccaccgatggcacctggacaaatctggcccacctgagcctgcccagcgaggaactggcttcttgggagcctctcgtgtgccacacaggacctggcgctgagggacacagcagatccacccagcctatgcacctgtctggcgaggccagcaccgccagaacctgtcctcaggaacctctgagaggcacccctggcggagcactgtggctgggagtgctgagactgctgctgttcaagctgctgctgtttgacctgctgctgacctgctcctgtctgtgcgatcctgccggccctctgccttctcctgccaccaccacaagactgagagccctgggcagccacagactgcaccctgccacagagacaggcggcagagaggccacaagcagccctagaccccagcccagagacagaagatggggcgataccccccctggcagaaagcctggatctccagtccgcgccaagagaagcggatctggcgtgaagcagaccctgaatttcgacctgctgaagctggctggcgacgtggaatccaacccaggcccttctagaggccatatgaccgagtacaagcccacggtgcgcctcgccacccgcgacgacgtccccagggccgtacgcaccctcgccgccgcgttcgccgactaccccgccacgcgccacaccgtcgatccggaccgccacatcgagcgggtcaccgagctgcaagaactcttcctcacgcgcgtcgggctcgacatcggcaaggtgtgggtcgcggacgacggcgccgcggtggcggtctggaccacgccggagagcgtcgaagcgggggcggtgttcgccgagatcggcccgcgcatggccgagttgagcggttcccggctggccgcgcagcaacagatggaaggcctcctggcgccgcaccggcccaaggagcccgcgtggttcctggccaccgtcggcgtctcgcccgaccaccagggcaagggtctgggcagcgccgtcgtgctccccggagtggaggcggccgagcgcgccggggtgcccgccttcctggagacctccgcgccccgcaacctccccttctacgagcggctcggcttcaccgtcaccgccgacgtcgaggtgcccgaaggaccgcgcacctggtgcatgacccgcaagcccggtgcctga

SEQ ID NO: 7210 - DNA, 2868 bp, Artificial Sequence
  Synthetic Polynucloetide
atggccttaccagtgaccgccttgctcctgccgctggccttgctgctccacgccgccaggccgctcgaggacctgaagaacgtgttcccacctgaggtggccgtgttcgagcctagcgaggccgagatcagccacacccagaaagccaccctcgtgtgcctggctaccggcttctaccccgaccatgtggaactgtcttggtgggtcaacggcaaagaggtgcacagcggcgtgtctaccgacccccagccactgaaagaacagcccgccctgaacgacagccggtactgcctgagcagcagactgagagtgtccgccaccttctggcagaacccccggaaccacttcagatgccaggtgcagttctacggcctgagcgagaacgacgagtggacccaggacagagccaagcccgtgacccagatcgtgtctgccgaagcctggggcagagccgattgcggctttaccagcgagagctaccagcagggcgtgctgagcgccaccatcctgtacgagatcctgctgggcaaggccaccctgtacgccgtgctggtgtctgccctggtgctgatggctatggtcaagcggaaggacagccggggaagggccaagcgatctggatctggagcaacaaacttctcactactcaaacaagcaggtgacgtggaggagaatcccgggcctactagcatggccttaccagtgaccgccttgctcctgccgctggccttgctgctccacgccgccaggccgcaggtgcagctggttgaatctggcggaggactggttcagcctggcggatctctgagactgtcttgtgccgccagcggcttcaccttcaccaatcacgccatgagctgggtccgacaggcccctggaaaaggactggaactggtgtctagcatcagcggcaacggcagaaccacctactacgccgatagcgtgaagggcagattcaccatcagccgggacatcagcaagaacaccctggacctccagatgaacagcctgagagccgaggataccgccgtgtactactgtgccaaggatggcggagagacactggtggatagcagaggccagggcacactggtcacagtgtcatctctcgagagcggcggaggcggatctttcgaagtgcaggttttggagtctggcggaggactggttcagcctggcggatctctgagactgtcttgtgccgccagcggcttcaccttcagcaactttgccatgagctgggtccgacaggcccctggcaaaggacttgaatgggtgtccacaatcagcggcagcgccggcacaacagattacgccgattctgtgaagggcagattcaccatcagccgggacaacagcaagaaaaccctgtacctccagatgaacagcctgcgcgtggaagataccgccgtgtactactgtgccgatggcagaggccccttcttcgattatcgcggccagggcacactggtcaccgtttcttctacgcgtgagcagaaactgatctcggaagaggatctggggagcggcaccccattcccttctctggcccctcccatcatgctgctggtggacggcaagcagcagatggtggtcgtgtgcctggtgctggatgtggccccacctggactggacagccccatctggtttagcgccggcaatggctctgccctggacgcctttacctacggcccaagccctgccaccgatggcacctggacaaatctggcccacctgagcctgcccagcgaggaactggcttcttgggagcctctcgtgtgccacacaggacctggcgctgagggacacagcagatccacccagcctatgcacctgtctggcgaggccagcaccgccagaacctgtcctcaggaacctctgagaggcacccctggcggagcactgtggctgggagtgctgagactgctgctgttcaagctgctgctgtttgacctgctgctgacctgctcctgtctgtgcgatcctgccggccctctgccttctcctgccaccaccacaagactgagagccctgggcagccacagactgcaccctgccacagagacaggcggcagagaggccacaagcagccctagaccccagcccagagacagaagatggggcgataccccccctggcagaaagcctggatctccagtccgcgccaagagaagcggatctggcgtgaagcagaccctgaatttcgacctgctgaagctggctggcgacgtggaatccaacccaggcccttctagatctagaggccatatgaccgagtacaagcccacggtgcgcctcgccacccgcgacgacgtccccagggccgtacgcaccctcgccgccgcgttcgccgactaccccgccacgcgccacaccgtcgatccggaccgccacatcgagcgggtcaccgagctgcaagaactcttcctcacgcgcgtcgggctcgacatcggcaaggtgtgggtcgcggacgacggcgccgcggtggcggtctggaccacgccggagagcgtcgaagcgggggcggtgttcgccgagatcggcccgcgcatggccgagttgagcggttcccggctggccgcgcagcaacagatggaaggcctcctggcgccgcaccggcccaaggagcccgcgtggttcctggccaccgtcggcgtctcgcccgaccaccagggcaagggtctgggcagcgccgtcgtgctccccggagtggaggcggccgagcgcgccggggtgcccgccttcctggagacctccgcgccccgcaacctccccttctacgagcggctcggcttcaccgtcaccgccgacgtcgaggtgcccgaaggaccgcgcacctggtgcatgacccgcaagcccggtgcctga

SEQ ID NO: 7211 - DNA, 2694 bp, Artificial Sequence
  Synthetic Polynucloetide
atggccttaccagtgaccgccttgctcctgccgctggccttgctgctccacgccgccaggccgcaggtgcagctggttgaatctggcggaggactggttcagcctggcggatctctgagactgtcttgtgccgccagcggcttcaccttcaccaatcacgccatgagctgggtccgacaggcccctggaaaaggactggaactggtgtctagcatcagcggcaacggcagaaccacctactacgccgatagcgtgaagggcagattcaccatcagccgggacatcagcaagaacaccctggacctccagatgaacagcctgagagccgaggataccgccgtgtactactgtgccaaggatggcggagagacactggtggatagcagaggccagggcacactggtcacagtgtcatctctcgaggggaaaccaattcccaaccctcttctgggactggattcaaccggcagcggcgacaagcagctggacgccgacgtgtcccccaagcctaccatcttcctgccctctatcgccgagacaaagctccagaaggccggcacctacctgtgcctgctggaaaagttcttcccagatgtgattaagatccactggcaggaaaagaagtccaacaccatcctgggcagccaggaaggcaacaccatgaagaccaacgacacctacatgaagttcagctggctgaccgtgcccgagaagtccctggacaaagaacacagatgcatcgtgcggcacgaaaacaacaagaacggcgtggaccaggaaatcatcttcccacccatcaagaccgatgtgattacaatggaccccaaggacaactgctccaaggacgccaacgataccctgctgctccagctgaccaacaccagcgcctactacatgtacttgttgctgctgctgaagtccgtggtgtacttcgccatcatcacatgctgcctgctgcggagaaccgccttctgctgcaacggcgagaagtctagggccaagcgatctggatctggagcaacaaacttctcactactcaaacaagcaggtgacgtggaggagaatcccgggcctactagtatggactggatttggcgcatccttttccttgtcggcgctgctaccggcgcgcattccttcgaagtgcaggttttggagtctggcggaggactggttcagcctggcggatctctgagactgtcttgtgccgccagcggcttcaccttcagcaactttgccatgagctgggtccgacaggcccctggcaaaggacttgaatgggtgtccacaatcagcggcagcgccggcacaacagattacgccgattctgtgaagggcagattcaccatcagccgggacaacagcaagaaaaccctgtacctccagatgaacagcctgcgcgtggaagataccgccgtgtactactgtgccgatggcagaggccccttcttcgattatcgcggccagggcacactggtcaccgtttcttctacgcgtgagcagaaactgatctcggaagaggatgggagcggcagccagcctcacaccaagcccagcgtgttcgtgatgaagaacggcaccaacgtggcctgcctcgtgaaagagttctaccccaaggacatcaggatcaacctggtgtccagcaagaagatcaccgagttcgaccccgccatcgtgatctcccccagcggcaagtacaacgccgtgaagctggggaagtacgaggacagcaacagcgtgacctgctccgtgcagcacgacaacaagaccgtgcacagcaccgactttgaagtgaaaaccgactccaccgaccacgtgaagcccaaagagacagagaacaccaagcagcccagcaagagctgccacaagcccaaggccatcgtgcacaccgagaaagtgaacatgatgagcctgaccgtgctgggcctgcggatgctgttcgccaaaaccgtggccgtgaacttcctgctgaccgccaagctgttcttcctccgcgccaagagaagcggatctggcgtgaagcagaccctgaatttcgacctgctgaagctggctggcgacgtggaatccaacccaggcccttctagaggccatatgaccgagtacaagcccacggtgcgcctcgccacccgcgacgacgtccccagggccgtacgcaccctcgccgccgcgttcgccgactaccccgccacgcgccacaccgtcgatccggaccgccacatcgagcgggtcaccgagctgcaagaactcttcctcacgcgcgtcgggctcgacatcggcaaggtgtgggtcgcggacgacggcgccgcggtggcggtctggaccacgccggagagcgtcgaagcgggggcggtgttcgccgagatcggcccgcgcatggccgagttgagcggttcccggctggccgcgcagcaacagatggaaggcctcctggcgccgcaccggcccaaggagcccgcgtggttcctggccaccgtcggcgtctcgcccgaccaccagggcaagggtctgggcagcgccgtcgtgctccccggagtggaggcggccgagcgcgccggggtgcccgccttcctggagacctccgcgccccgcaacctccccttctacgagcggctcggcttcaccgtcaccgccgacgtcgaggtgcccgaaggaccgcgcacctggtgcatgacccgcaagcccggtgcctga

SEQ ID NO: 7212 - DNA, 1905 bp, Artificial Sequence
  Synthetic Polynucloetide
atggccttaccagtgaccgccttgctcctgccgctggccttgctgctccacgccgccaggccgcaggtgcagctggttgaatctggcggaggactggttcagcctggcggatctctgagactgtcttgtgccgccagcggcttcaccttcaccaatcacgccatgagctgggtccgacaggcccctggaaaaggactggaactggtgtctagcatcagcggcaacggcagaaccacctactacgccgatagcgtgaagggcagattcaccatcagccgggacatcagcaagaacaccctggacctccagatgaacagcctgagagccgaggataccgccgtgtactactgtgccaaggatggcggagagacactggtggatagcagaggccagggcacactggtcacagtgtcatctctcgagagccagcctcacaccaagcccagcgtgttcgtgatgaagaacggcaccaacgtggcctgcctcgtgaaagagttctaccccaaggacatcaggatcaacctggtgtccagcaagaagatcaccgagttcgaccccgccatcgtgatctcccccagcggcaagtacaacgccgtgaagctggggaagtacgaggacagcaacagcgtgacctgctccgtgcagcacgacaacaagaccgtgcacagcaccgactttgaagtgaaaaccgactccaccgaccacgtgaagcccaaagagacagagaacaccaagcagcccagcaagagctgccacaagcccaaggccatcgtgcacaccgagaaagtgaacatgatgagcctgaccgtgctgggcctgcggatgctgttcgccaaaaccgtggccgtgaacttcctgctgaccgccaagctgttcttcctcagggccaagcgatctggatctggagcaacaaacttctcactactcaaacaagcaggtgacgtggaggagaatcccgggcctactagtatggactggatttggcgcatccttttccttgtcggcgctgctaccggcgcgcattccttcgaagtgcaggttttggagtctggcggaggactggttcagcctggcggatctctgagactgtcttgtgccgccagcggcttcaccttcagcaactttgccatgagctgggtccgacaggcccctggcaaaggacttgaatgggtgtccacaatcagcggcagcgccggcacaacagattacgccgattctgtgaagggcagattcaccatcagccgggacaacagcaagaaaaccctgtacctccagatgaacagcctgcgcgtggaagataccgccgtgtactactgtgccgatggcagaggccccttcttcgattatcgcggccagggcacactggtcaccgtttcttctacgcgtgacaagcagctggacgccgacgtgtcccccaagcctaccatcttcctgccctctatcgccgagacaaagctccagaaggccggcacctacctgtgcctgctggaaaagttcttcccagatgtgattaagatccactggcaggaaaagaagtccaacaccatcctgggcagccaggaaggcaacaccatgaagaccaacgacacctacatgaagttcagctggctgaccgtgcccgagaagtccctggacaaagaacacagatgcatcgtgcggcacgaaaacaacaagaacggcgtggaccaggaaatcatcttcccacccatcaagaccgatgtgattacaatggaccccaaggacaactgctccaaggacgccaacgataccctgctgctccagctgaccaacaccagcgcctactacatgtacttgttgctgctgctgaagtccgtggtgtacttcgccatcatcacatgctgcctgctgcggagaaccgccttctgctgcaacggcgagaagtct

SEQ ID NO: 7213 - DNA, 2724 bp, Artificial Sequence
  Synthetic Polynucloetide
atggccttaccagtgaccgccttgctcctgccgctggccttgctgctccacgccgccaggccgctcgaggggaaaccaattcccaaccctcttctgggactggattcaaccggcagcggcgacaagcagctggacgccgacgtgtcccccaagcctaccatcttcctgccctctatcgccgagacaaagctccagaaggccggcacctacctgtgcctgctggaaaagttcttcccagatgtgattaagatccactggcaggaaaagaagtccaacaccatcctgggcagccaggaaggcaacaccatgaagaccaacgacacctacatgaagttcagctggctgaccgtgcccgagaagtccctggacaaagaacacagatgcatcgtgcggcacgaaaacaacaagaacggcgtggaccaggaaatcatcttcccacccatcaagaccgatgtgattacaatggaccccaaggacaactgctccaaggacgccaacgataccctgctgctccagctgaccaacaccagcgcctactacatgtacttgttgctgctgctgaagtccgtggtgtacttcgccatcatcacatgctgcctgctgcggagaaccgccttctgctgcaacggcgagaagtctagggccaagcgatctggatctggagcaacaaacttctcactactcaaacaagcaggtgacgtggaggagaatcccgggcctactagcatggccttaccagtgaccgccttgctcctgccgctggccttgctgctccacgccgccaggccgcaggtgcagctggttgaatctggcggaggactggttcagcctggcggatctctgagactgtcttgtgccgccagcggcttcaccttcaccaatcacgccatgagctgggtccgacaggcccctggaaaaggactggaactggtgtctagcatcagcggcaacggcagaaccacctactacgccgatagcgtgaagggcagattcaccatcagccgggacatcagcaagaacaccctggacctccagatgaacagcctgagagccgaggataccgccgtgtactactgtgccaaggatggcggagagacactggtggatagcagaggccagggcacactggtcacagtgtcatctctcgagagcggcggaggcggatctttcgaagtgcaggttttggagtctggcggaggactggttcagcctggcggatctctgagactgtcttgtgccgccagcggcttcaccttcagcaactttgccatgagctgggtccgacaggcccctggcaaaggacttgaatgggtgtccacaatcagcggcagcgccggcacaacagattacgccgattctgtgaagggcagattcaccatcagccgggacaacagcaagaaaaccctgtacctccagatgaacagcctgcgcgtggaagataccgccgtgtactactgtgccgatggcagaggccccttcttcgattatcgcggccagggcacactggtcaccgtttcttctacgcgtgagcagaaactgatctcggaagaggatgggagcggcagccagcctcacaccaagcccagcgtgttcgtgatgaagaacggcaccaacgtggcctgcctcgtgaaagagttctaccccaaggacatcaggatcaacctggtgtccagcaagaagatcaccgagttcgaccccgccatcgtgatctcccccagcggcaagtacaacgccgtgaagctggggaagtacgaggacagcaacagcgtgacctgctccgtgcagcacgacaacaagaccgtgcacagcaccgactttgaagtgaaaaccgactccaccgaccacgtgaagcccaaagagacagagaacaccaagcagcccagcaagagctgccacaagcccaaggccatcgtgcacaccgagaaagtgaacatgatgagcctgaccgtgctgggcctgcggatgctgttcgccaaaaccgtggccgtgaacttcctgctgaccgccaagctgttcttcctccgcgccaagagaagcggatctggcgtgaagcagaccctgaatttcgacctgctgaagctggctggcgacgtggaatccaacccaggcccttctagaggccatatgaccgagtacaagcccacggtgcgcctcgccacccgcgacgacgtccccagggccgtacgcaccctcgccgccgcgttcgccgactaccccgccacgcgccacaccgtcgatccggaccgccacatcgagcgggtcaccgagctgcaagaactcttcctcacgcgcgtcgggctcgacatcggcaaggtgtgggtcgcggacgacggcgccgcggtggcggtctggaccacgccggagagcgtcgaagcgggggcggtgttcgccgagatcggcccgcgcatggccgagttgagcggttcccggctggccgcgcagcaacagatggaaggcctcctggcgccgcaccggcccaaggagcccgcgtggttcctggccaccgtcggcgtctcgcccgaccaccagggcaagggtctgggcagcgccgtcgtgctccccggagtggaggcggccgagcgcgccggggtgcccgccttcctggagacctccgcgccccgcaacctccccttctacgagcggctcggcttcaccgtcaccgccgacgtcgaggtgcccgaaggaccgcgcacctggtgcatgacccgcaagcccggtgcctga

SEQ ID NO: 7214 - DNA, 3114 bp, Artificial Sequence
  Synthetic Polynucloetide
atggccttaccagtgaccgccttgctcctgccgctggccttgctgctccacgccgccaggccgcaggtgcagctggttgaatctggcggaggactggttcagcctggcggatctctgagactgtcttgtgccgccagcggcttcaccttcaccaatcacgccatgagctgggtccgacaggcccctggaaaaggactggaactggtgtctagcatcagcggcaacggcagaaccacctactacgccgatagcgtgaagggcagattcaccatcagccgggacatcagcaagaacaccctggacctccagatgaacagcctgagagccgaggataccgccgtgtactactgtgccaaggatggcggagagacactggtggatagcagaggccagggcacactggtcacagtgtcatctggacagcctaaggccaatcctaccgtgacactgttccctccaagcagcgaagaactccaggccaacaaggccacacttgtgtgcctgatctccgacttctaccctggggctgtgacagtggcttggaaggccgatggatctcctgtgaaagccggcgtggaaaccaccaagccatccaagcagagcaacaacaaatacgccgccagctcctacctgagcctgacacctgagcagtggaagtcccacagatcctacagctgccaagtgacccacgaaggcagcaccgtggaaaagacagtggcccctacagagtgcagcggatcccagagcttcggcctgctggaccccaagctgtgctacctgctggatggcatcctgttcatctacggcgtgatcctgaccgccctgttcctgagagtgaagttcagcagaagcgccgacgcccctgcctaccagcagggacagaaccaactgtacaacgagctgaacctgggcagacgggaagagtacgacgtgctggacaagcggagaggcagggaccctgagatgggcggaaagccccagcggagaaagaacccccaggaaggactgtataacgaactccagaaagacaagatggccgaagcctacagcgagatcggcatgaagggcgagcggagaagaggcaagggccacgatggcctgtaccagggcctgagcaccgccaccaaggacacctatgacgccctgcacatgcaggccctgcctccaagaagggccaagcgatctggatctggagcaacaaacttctcactactcaaacaagcaggtgacgtggaggagaatcccgggcctactagtatggactggatttggcgcatccttttccttgtcggcgctgctaccggcgcgcattccttcgaagtgcaggttttggagtctggcggaggactggttcagcctggcggatctctgagactgtcttgtgccgccagcggcttcaccttcagcaactttgccatgagctgggtccgacaggcccctggcaaaggacttgaatgggtgtccacaatcagcggcagcgccggcacaacagattacgccgattctgtgaagggcagattcaccatcagccgggacaacagcaagaaaaccctgtacctccagatgaacagcctgcgcgtggaagataccgccgtgtactactgtgccgatggcagaggccccttcttcgattatcgcggccagggcacactggtcaccgtttcttctgcctctacaaagggaccctccgtgtttcctctggctcccagcagcaagtctacaagcggaggaacagccgctctgggctgcctggtcaaggattactttcccgagcctgtgaccgtgtcctggaatagcggagcactgacaagcggcgtgcacacctttccagccgtgctgcaaagcagcggcctgtactctctgagcagcgtggtcacagtgcctagctctagcctgggcacccagacctacatctgcaatgtgaaccacaagcctagcaacaccaaggtggacaagagagtggaacccaagagctgtggtacccagagttttgggttgttggaccctaaattgtgctatctgttggacggaatcctgttcatttacggagtgatcctgaccgcattgttcctgcgggttaagttttccagatccgcagacgcacccgcttaccaacaagggcagaaccaactctacaatgaacttaatttggggcggagggaagagtacgacgttctggacaaaaggaggggacgagatcccgagatgggcggaaagcctcagcgaaggaagaatccgcaagaggggctttataacgaactccagaaagataaaatggcagaagcctatagtgagattgggatgaagggagaaaggaggaggggtaaaggtcacgatgggttgtaccaaggattgagcacagccactaaagatacctatgatgcgctccacatgcaggccctgccgccaagacgcgccaagagaagcggatctggcgtgaagcagaccctgaatttcgacctgctgaagctggctggcgacgtggaatccaacccaggcccttctagaggccatatgaccgagtacaagcccacggtgcgcctcgccacccgcgacgacgtccccagggccgtacgcaccctcgccgccgcgttcgccgactaccccgccacgcgccacaccgtcgatccggaccgccacatcgagcgggtcaccgagctgcaagaactcttcctcacgcgcgtcgggctcgacatcggcaaggtgtgggtcgcggacgacggcgccgcggtggcggtctggaccacgccggagagcgtcgaagcgggggcggtgttcgccgagatcggcccgcgcatggccgagttgagcggttcccggctggccgcgcagcaacagatggaaggcctcctggcgccgcaccggcccaaggagcccgcgtggttcctggccaccgtcggcgtctcgcccgaccaccagggcaagggtctgggcagcgccgtcgtgctccccggagtggaggcggccgagcgcgccggggtgcccgccttcctggagacctccgcgccccgcaacctccccttctacgagcggctcggcttcaccgtcaccgccgacgtcgaggtgcccgaaggaccgcgcacctggtgcatgacccgcaagcccggtgcctga

SEQ ID NO: 7215 - DNA, 2469 bp, Artificial Sequence
  Synthetic Polynucloetide
atggccttaccagtgaccgccttgctcctgccgctggccttgctgctccacgccgccaggccgcaggtgcagctggttgaatctggcggaggactggttcagcctggcggatctctgagactgtcttgtgccgccagcggcttcaccttcaccaatcacgccatgagctgggtccgacaggcccctggaaaaggactggaactggtgtctagcatcagcggcaacggcagaaccacctactacgccgatagcgtgaagggcagattcaccatcagccgggacatcagcaagaacaccctggacctccagatgaacagcctgagagccgaggataccgccgtgtactactgtgccaaggatggcggagagacactggtggatagcagaggccagggcacactggtcacagtgtcatctctcgaggacctgaagaacgtgttcccacctgaggtggccgtgttcgagcctagcgaggccgagatcagccacacccagaaagccaccctcgtgtgcctggctaccggcttctaccccgaccatgtggaactgtcttggtgggtcaacggcaaagaggtgcacagcggcgtgtctaccgacccccagccactgaaagaacagcccgccctgaacgacagccggtactgcctgagcagcagactgagagtgtccgccaccttctggcagaacccccggaaccacttcagatgccaggtgcagttctacggcctgagcgagaacgacgagtggacccaggacagagccaagcccgtgacccagatcgtgtctgccgaagcctggggcagagccgattgcggatcccagagcttcggcctgctggaccccaagctgtgctacctgctggatggcatcctgttcatctacggcgtgatcctgaccgccctgttcctgagagtgaagttcagcagaagcgccgacgcccctgcctaccagcagggacagaaccaactgtacaacgagctgaacctgggcagacgggaagagtacgacgtgctggacaagcggagaggcagggaccctgagatgggcggaaagccccagcggagaaagaacccccaggaaggactgtataacgaactccagaaagacaagatggccgaagcctacagcgagatcggcatgaagggcgagcggagaagaggcaagggccacgatggcctgtaccagggcctgagcaccgccaccaaggacacctatgacgccctgcacatgcaggccctgcctccaagaagggccaagcgatctggatctggagcaacaaacttctcactactcaaacaagcaggtgacgtggaggagaatcccgggcctactagtatggactggatttggcgcatccttttccttgtcggcgctgctaccggcgcgcattccttcgaagtgcaggttttggagtctggcggaggactggttcagcctggcggatctctgagactgtcttgtgccgccagcggcttcaccttcagcaactttgccatgagctgggtccgacaggcccctggcaaaggacttgaatgggtgtccacaatcagcggcagcgccggcacaacagattacgccgattctgtgaagggcagattcaccatcagccgggacaacagcaagaaaaccctgtacctccagatgaacagcctgcgcgtggaagataccgccgtgtactactgtgccgatggcagaggccccttcttcgattatcgcggccagggcacactggtcaccgtttcttctacgcgtatccagaaccctgatcctgccgtgtaccagctgcgggatagcaagagcagcgacaagagcgtgtgtctgttcaccgacttcgacagccagaccaacgtgtcccagagcaaggactccgacgtgtacatcaccgataagaccgtgctggacatgcggagcatggacttcaagagcaactccgccgtggcctggtccaacaagtccgatttcgcctgcgccaacgccttcaacaacagcattatccccgaggacacattcttcccaagccccgagagcagctgcggtacccagagttttgggttgttggaccctaaattgtgctatctgttggacggaatcctgttcatttacggagtgatcctgaccgcattgttcctgcgggttaagttttccagatccgcagacgcacccgcttaccaacaagggcagaaccaactctacaatgaacttaatttggggcggagggaagagtacgacgttctggacaaaaggaggggacgagatcccgagatgggcggaaagcctcagcgaaggaagaatccgcaagaggggctttataacgaactccagaaagataaaatggcagaagcctatagtgagattgggatgaagggagaaaggaggaggggtaaaggtcacgatgggttgtaccaaggattgagcacagccactaaagatacctatgatgcgctccacatgcaggccctgccgccaaga

SEQ ID NO: 7216 - DNA, 2469 bp, Artificial Sequence
  Synthetic Polynucloetide
atggccttaccagtgaccgccttgctcctgccgctggccttgctgctccacgccgccaggccgcaggtgcagctggttgaatctggcggaggactggttcagcctggcggatctctgagactgtcttgtgccgccagcggcttcaccttcaccaatcacgccatgagctgggtccgacaggcccctggaaaaggactggaactggtgtctagcatcagcggcaacggcagaaccacctactacgccgatagcgtgaagggcagattcaccatcagccgggacatcagcaagaacaccctggacctccagatgaacagcctgagagccgaggataccgccgtgtactactgtgccaaggatggcggagagacactggtggatagcagaggccagggcacactggtcacagtgtcatctctcgaggacctgaagaacgtgttcccacctgaggtggccgtgttcgagcctagcaaggccgagatcgcccacacccagaaagccaccctcgtgtgcctggctaccggcttctaccccgaccatgtggaactgtcttggtgggtcaacggcaaagaggtgcacagcggcgtgtgtaccgacccccagccactgaaagaacagcccgccctgaacgacagccggtactgcctgagcagcagactgagagtgtccgccaccttctggcagaacccccggaaccacttcagatgccaggtgcagttctacggcctgagcgagaacgacgagtggacccaggacagagccaagcccgtgacccagatcgtgtctgccgaagcctggggcagagccgattgcggatcccagagcttcggcctgctggaccccaagctgtgctacctgctggatggcatcctgttcatctacggcgtgatcctgaccgccctgttcctgagagtgaagttcagcagaagcgccgacgcccctgcctaccagcagggacagaaccaactgtacaacgagctgaacctgggcagacgggaagagtacgacgtgctggacaagcggagaggcagggaccctgagatgggcggaaagccccagcggagaaagaacccccaggaaggactgtataacgaactccagaaagacaagatggccgaagcctacagcgagatcggcatgaagggcgagcggagaagaggcaagggccacgatggcctgtaccagggcctgagcaccgccaccaaggacacctatgacgccctgcacatgcaggccctgcctccaagaagggccaagcgatctggatctggagcaacaaacttctcactactcaaacaagcaggtgacgtggaggagaatcccgggcctactagtatggactggatttggcgcatccttttccttgtcggcgctgctaccggcgcgcattccttcgaagtgcaggttttggagtctggcggaggactggttcagcctggcggatctctgagactgtcttgtgccgccagcggcttcaccttcagcaactttgccatgagctgggtccgacaggcccctggcaaaggacttgaatgggtgtccacaatcagcggcagcgccggcacaacagattacgccgattctgtgaagggcagattcaccatcagccgggacaacagcaagaaaaccctgtacctccagatgaacagcctgcgcgtggaagataccgccgtgtactactgtgccgatggcagaggccccttcttcgattatcgcggccagggcacactggtcaccgtttcttctacgcgtatccagaaccctgatcctgccgtgtaccagctgcgggatagcaagagcagcgacaagagcgtgtgtctgttcaccgacttcgacagccagaccaacgtgtcccagagcaaggactccgacgtgtacatcaccgataagtgcgtgctggacatgcggagcatggacttcaagagcaactccgccgtggcctggtccaacaagtccgatttcgcctgcgccaacgccttcaacaacagcattatccccgaggacacattcttcccaagcagcgacgtgccctgcggtacccagagttttgggttgttggaccctaaattgtgctatctgttggacggaatcctgttcatttacggagtgatcctgaccgcattgttcctgcgggttaagttttccagatccgcagacgcacccgcttaccaacaagggcagaaccaactctacaatgaacttaatttggggcggagggaagagtacgacgttctggacaaaaggaggggacgagatcccgagatgggcggaaagcctcagcgaaggaagaatccgcaagaggggctttataacgaactccagaaagataaaatggcagaagcctatagtgagattgggatgaagggagaaaggaggaggggtaaaggtcacgatgggttgtaccaaggattgagcacagccactaaagatacctatgatgcgctccacatgcaggccctgccgccaaga

SEQ ID NO: 7217 - DNA, 2682 bp, Artificial Sequence
  Synthetic Polynucloetide
atggccttaccagtgaccgccttgctcctgccgctggccttgctgctccacgccgccaggccgcaggtgcagctggttgaatctggcggaggactggttcagcctggcggatctctgagactgtcttgtgccgccagcggcttcaccttcaccaatcacgccatgagctgggtccgacaggcccctggaaaaggactggaactggtgtctagcatcagcggcaacggcagaaccacctactacgccgatagcgtgaagggcagattcaccatcagccgggacatcagcaagaacaccctggacctccagatgaacagcctgagagccgaggataccgccgtgtactactgtgccaaggatggcggagagacactggtggatagcagaggccagggcacactggtcacagtgtcatctctcgaggggaaaccaattcccaaccctcttctgggactggattcaaccggcagcggcgaggacctgaagaacgtgttcccacctgaggtggccgtgttcgagcctagcgaggccgagatcagccacacccagaaagccaccctcgtgtgcctggctaccggcttctaccccgaccatgtggaactgtcttggtgggtcaacggcaaagaggtgcacagcggcgtgtctaccgacccccagccactgaaagaacagcccgccctgaacgacagccggtactgcctgagcagcagactgagagtgtccgccaccttctggcagaacccccggaaccacttcagatgccaggtgcagttctacggcctgagcgagaacgacgagtggacccaggacagagccaagcccgtgacccagatcgtgtctgccgaagcctggggcagagccgattgcggatcccagagcttcggcctgctggaccccaagctgtgctacctgctggatggcatcctgttcatctacggcgtgatcctgaccgccctgttcctgagagtgaagttcagcagaagcgccgacgcccctgcctaccagcagggacagaaccaactgtacaacgagctgaacctgggcagacgggaagagtacgacgtgctggacaagcggagaggcagggaccctgagatgggcggaaagccccagcggagaaagaacccccaggaaggactgtataacgaactccagaaagacaagatggccgaagcctacagcgagatcggcatgaagggcgagcggagaagaggcaagggccacgatggcctgtaccagggcctgagcaccgccaccaaggacacctatgacgccctgcacatgcaggccctgcctccaagaagggccaagcgatctggatctggagcaacaaacttctcactactcaaacaagcaggtgacgtggaggagaatcccgggcctactagtatggactggatttggcgcatccttttccttgtcggcgctgctaccggcgcgcattccttcgaagtgcaggttttggagtctggcggaggactggttcagcctggcggatctctgagactgtcttgtgccgccagcggcttcaccttcagcaactttgccatgagctgggtccgacaggcccctggcaaaggacttgaatgggtgtccacaatcagcggcagcgccggcacaacagattacgccgattctgtgaagggcagattcaccatcagccgggacaacagcaagaaaaccctgtacctccagatgaacagcctgcgcgtggaagataccgccgtgtactactgtgccgatggcagaggccccttcttcgattatcgcggccagggcacactggtcaccgtttcttctacgcgtgagcagaaactgatctcggaagaggatgggagcggcatccagaaccctgatcctgccgtgtaccagctgcgggatagcaagagcagcgacaagagcgtgtgtctgttcaccgacttcgacagccagaccaacgtgtcccagagcaaggactccgacgtgtacatcaccgataagaccgtgctggacatgcggagcatggacttcaagagcaactccgccgtggcctggtccaacaagtccgatttcgcctgcgccaacgccttcaacaacagcattatccccgaggacacattcttcccaagccccgagagcagctgcggtacccagagttttgggttgttggaccctaaattgtgctatctgttggacggaatcctgttcatttacggagtgatcctgaccgcattgttcctgaggagcaagcggtcacggctgctccacagcgattacatgaatatgacaccacgaagaccgggtcctactcgcaaacactaccaaccctacgcacctccccgcgactttgcagcgtaccgatctcgggttaagttttccagatccgcagacgcacccgcttaccaacaagggcagaaccaactctacaatgaacttaatttggggcggagggaagagtacgacgttctggacaaaaggaggggacgagatcccgagatgggcggaaagcctcagcgaaggaagaatccgcaagaggggctttataacgaactccagaaagataaaatggcagaagcctatagtgagattgggatgaagggagaaaggaggaggggtaaaggtcacgatgggttgtaccaaggattgagcacagccactaaagatacctatgatgcgctccacatgcaggccctgccgccaaga

SEQ ID NO: 7218 - DNA, 2805 bp, Artificial Sequence
  Synthetic Polynucloetide
atggccttaccagtgaccgccttgctcctgccgctggccttgctgctccacgccgccaggccgcaggtgcagctggttgaatctggcggaggactggttcagcctggcggatctctgagactgtcttgtgccgccagcggcttcaccttcaccaatcacgccatgagctgggtccgacaggcccctggaaaaggactggaactggtgtctagcatcagcggcaacggcagaaccacctactacgccgatagcgtgaagggcagattcaccatcagccgggacatcagcaagaacaccctggacctccagatgaacagcctgagagccgaggataccgccgtgtactactgtgccaaggatggcggagagacactggtggatagcagaggccagggcacactggtcacagtgtcatctctcgaggggaaaccaattcccaaccctcttctgggactggattcaaccggcagcggcgaggacctgaagaacgtgttcccacctgaggtggccgtgttcgagcctagcgaggccgagatcagccacacccagaaagccaccctcgtgtgcctggctaccggcttctaccccgaccatgtggaactgtcttggtgggtcaacggcaaagaggtgcacagcggcgtgtctaccgacccccagccactgaaagaacagcccgccctgaacgacagccggtactgcctgagcagcagactgagagtgtccgccaccttctggcagaacccccggaaccacttcagatgccaggtgcagttctacggcctgagcgagaacgacgagtggacccaggacagagccaagcccgtgacccagatcgtgtctgccgaagcctggggcagagccgattgcggatcccagagcttcggcctgctggaccccaagctgtgctacctgctggatggcatcctgttcatctacggcgtgatcctgaccgccctgttcctgaggagtaagaggagcaggctcctgcacagtgactacatgaacatgactccacgccgccccggacccacccgcaagcattaccagccctatgccccaccacgcgacttcgcagcctatcgctccagagtgaagttcagcagaagcgccgacgcccctgcctaccagcagggacagaaccaactgtacaacgagctgaacctgggcagacgggaagagtacgacgtgctggacaagcggagaggcagggaccctgagatgggcggaaagccccagcggagaaagaacccccaggaaggactgtataacgaactccagaaagacaagatggccgaagcctacagcgagatcggcatgaagggcgagcggagaagaggcaagggccacgatggcctgtaccagggcctgagcaccgccaccaaggacacctatgacgccctgcacatgcaggccctgcctccaagaagggccaagcgatctggatctggagcaacaaacttctcactactcaaacaagcaggtgacgtggaggagaatcccgggcctactagtatggactggatttggcgcatccttttccttgtcggcgctgctaccggcgcgcattccttcgaagtgcaggttttggagtctggcggaggactggttcagcctggcggatctctgagactgtcttgtgccgccagcggcttcaccttcagcaactttgccatgagctgggtccgacaggcccctggcaaaggacttgaatgggtgtccacaatcagcggcagcgccggcacaacagattacgccgattctgtgaagggcagattcaccatcagccgggacaacagcaagaaaaccctgtacctccagatgaacagcctgcgcgtggaagataccgccgtgtactactgtgccgatggcagaggccccttcttcgattatcgcggccagggcacactggtcaccgtttcttctacgcgtgagcagaaactgatctcggaagaggatgggagcggcatccagaaccctgatcctgccgtgtaccagctgcgggatagcaagagcagcgacaagagcgtgtgtctgttcaccgacttcgacagccagaccaacgtgtcccagagcaaggactccgacgtgtacatcaccgataagaccgtgctggacatgcggagcatggacttcaagagcaactccgccgtggcctggtccaacaagtccgatttcgcctgcgccaacgccttcaacaacagcattatccccgaggacacattcttcccaagccccgagagcagctgcggtacccagagttttgggttgttggaccctaaattgtgctatctgttggacggaatcctgttcatttacggagtgatcctgaccgcattgttcctgaggagcaagcggtcacggctgctccacagcgattacatgaatatgacaccacgaagaccgggtcctactcgcaaacactaccaaccctacgcacctccccgcgactttgcagcgtaccgatctcgggttaagttttccagatccgcagacgcacccgcttaccaacaagggcagaaccaactctacaatgaacttaatttggggcggagggaagagtacgacgttctggacaaaaggaggggacgagatcccgagatgggcggaaagcctcagcgaaggaagaatccgcaagaggggctttataacgaactccagaaagataaaatggcagaagcctatagtgagattgggatgaagggagaaaggaggaggggtaaaggtcacgatgggttgtaccaaggattgagcacagccactaaagatacctatgatgcgctccacatgcaggccctgccgccaaga

SEQ ID NO: 7219 - DNA, 2688 bp, Artificial Sequence
  Synthetic Polynucloetide
atggccttaccagtgaccgccttgctcctgccgctggccttgctgctccacgccgccaggccgcaggtgcagctggttgaatctggcggaggactggttcagcctggcggatctctgagactgtcttgtgccgccagcggcttcaccttcaccaatcacgccatgagctgggtccgacaggcccctggaaaaggactggaactggtgtctagcatcagcggcaacggcagaaccacctactacgccgatagcgtgaagggcagattcaccatcagccgggacatcagcaagaacaccctggacctccagatgaacagcctgagagccgaggataccgccgtgtactactgtgccaaggatggcggagagacactggtggatagcagaggccagggcacactggtcacagtgtcatctctcgaggggaaaccaattcccaaccctcttctgggactggattcaaccggcagcggcgaggacctgaagaacgtgttcccacctgaggtggccgtgttcgagcctagcgaggccgagatcagccacacccagaaagccaccctcgtgtgcctggctaccggcttctaccccgaccatgtggaactgtcttggtgggtcaacggcaaagaggtgcacagcggcgtgtctaccgacccccagccactgaaagaacagcccgccctgaacgacagccggtactgcctgagcagcagactgagagtgtccgccaccttctggcagaacccccggaaccacttcagatgccaggtgcagttctacggcctgagcgagaacgacgagtggacccaggacagagccaagcccgtgacccagatcgtgtctgccgaagcctggggcagagccgattgcggatcccagagcttcggcctgctggaccccaagctgtgctacctgctggatggcatcctgttcatctacggcgtgatcctgaccgccctgttcctgagagtgaagttcagcagaagcgccgacgcccctgcctaccagcagggacagaaccaactgtacaacgagctgaacctgggcagacgggaagagtacgacgtgctggacaagcggagaggcagggaccctgagatgggcggaaagccccagcggagaaagaacccccaggaaggactgtataacgaactccagaaagacaagatggccgaagcctacagcgagatcggcatgaagggcgagcggagaagaggcaagggccacgatggcctgtaccagggcctgagcaccgccaccaaggacacctatgacgccctgcacatgcaggccctgcctccaagaagggccaagcgatctggatctggagcaacaaacttctcactactcaaacaagcaggtgacgtggaggagaatcccgggcctactagtatggactggatttggcgcatccttttccttgtcggcgctgctaccggcgcgcattccttcgaagtgcaggttttggagtctggcggaggactggttcagcctggcggatctctgagactgtcttgtgccgccagcggcttcaccttcagcaactttgccatgagctgggtccgacaggcccctggcaaaggacttgaatgggtgtccacaatcagcggcagcgccggcacaacagattacgccgattctgtgaagggcagattcaccatcagccgggacaacagcaagaaaaccctgtacctccagatgaacagcctgcgcgtggaagataccgccgtgtactactgtgccgatggcagaggccccttcttcgattatcgcggccagggcacactggtcaccgtttcttctacgcgtgagcagaaactgatctcggaagaggatctggggagcggcatccagaaccctgatcctgccgtgtaccagctgcgggatagcaagagcagcgacaagagcgtgtgtctgttcaccgacttcgacagccagaccaacgtgtcccagagcaaggactccgacgtgtacatcaccgataagaccgtgctggacatgcggagcatggacttcaagagcaactccgccgtggcctggtccaacaagtccgatttcgcctgcgccaacgccttcaacaacagcattatccccgaggacacattcttcccaagccccgagagcagctgcggtacccagagttttgggttgttggaccctaaattgtgctatctgttggacggaatcctgttcatttacggagtgatcctgaccgcattgttcctgaagagaggccggaagaagctgctgtacatcttcaagcagcctttcatgcggcccgtgcagaccacccaggaagaggacggctgctcctgccggttccccgaggaagaagaaggcggctgcgagctgcgggttaagttttccagatccgcagacgcacccgcttaccaacaagggcagaaccaactctacaatgaacttaatttggggcggagggaagagtacgacgttctggacaaaaggaggggacgagatcccgagatgggcggaaagcctcagcgaaggaagaatccgcaagaggggctttataacgaactccagaaagataaaatggcagaagcctatagtgagattgggatgaagggagaaaggaggaggggtaaaggtcacgatgggttgtaccaaggattgagcacagccactaaagatacctatgatgcgctccacatgcaggccctgccgccaaga

SEQ ID NO: 7220 - DNA, 2814 bp, Artificial Sequence
  Synthetic Polynucloetide
atggccttaccagtgaccgccttgctcctgccgctggccttgctgctccacgccgccaggccgcaggtgcagctggttgaatctggcggaggactggttcagcctggcggatctctgagactgtcttgtgccgccagcggcttcaccttcaccaatcacgccatgagctgggtccgacaggcccctggaaaaggactggaactggtgtctagcatcagcggcaacggcagaaccacctactacgccgatagcgtgaagggcagattcaccatcagccgggacatcagcaagaacaccctggacctccagatgaacagcctgagagccgaggataccgccgtgtactactgtgccaaggatggcggagagacactggtggatagcagaggccagggcacactggtcacagtgtcatctctcgaggggaaaccaattcccaaccctcttctgggactggattcaaccggcagcggcgaggacctgaagaacgtgttcccacctgaggtggccgtgttcgagcctagcgaggccgagatcagccacacccagaaagccaccctcgtgtgcctggctaccggcttctaccccgaccatgtggaactgtcttggtgggtcaacggcaaagaggtgcacagcggcgtgtctaccgacccccagccactgaaagaacagcccgccctgaacgacagccggtactgcctgagcagcagactgagagtgtccgccaccttctggcagaacccccggaaccacttcagatgccaggtgcagttctacggcctgagcgagaacgacgagtggacccaggacagagccaagcccgtgacccagatcgtgtctgccgaagcctggggcagagccgattgcggatcccagagcttcggcctgctggaccccaagctgtgctacctgctggatggcatcctgttcatctacggcgtgatcctgaccgccctgttcctgaaacggggcagaaagaaactcctgtatatattcaaacaaccatttatgagaccagtacaaactactcaagaggaagatggctgtagctgccgatttccagaagaagaagaaggaggatgtgaactgagagtgaagttcagcagaagcgccgacgcccctgcctaccagcagggacagaaccaactgtacaacgagctgaacctgggcagacgggaagagtacgacgtgctggacaagcggagaggcagggaccctgagatgggcggaaagccccagcggagaaagaacccccaggaaggactgtataacgaactccagaaagacaagatggccgaagcctacagcgagatcggcatgaagggcgagcggagaagaggcaagggccacgatggcctgtaccagggcctgagcaccgccaccaaggacacctatgacgccctgcacatgcaggccctgcctccaagaagggccaagcgatctggatctggagcaacaaacttctcactactcaaacaagcaggtgacgtggaggagaatcccgggcctactagtatggactggatttggcgcatccttttccttgtcggcgctgctaccggcgcgcattccttcgaagtgcaggttttggagtctggcggaggactggttcagcctggcggatctctgagactgtcttgtgccgccagcggcttcaccttcagcaactttgccatgagctgggtccgacaggcccctggcaaaggacttgaatgggtgtccacaatcagcggcagcgccggcacaacagattacgccgattctgtgaagggcagattcaccatcagccgggacaacagcaagaaaaccctgtacctccagatgaacagcctgcgcgtggaagataccgccgtgtactactgtgccgatggcagaggccccttcttcgattatcgcggccagggcacactggtcaccgtttcttctacgcgtgagcagaaactgatctcggaagaggatctggggagcggcatccagaaccctgatcctgccgtgtaccagctgcgggatagcaagagcagcgacaagagcgtgtgtctgttcaccgacttcgacagccagaccaacgtgtcccagagcaaggactccgacgtgtacatcaccgataagaccgtgctggacatgcggagcatggacttcaagagcaactccgccgtggcctggtccaacaagtccgatttcgcctgcgccaacgccttcaacaacagcattatccccgaggacacattcttcccaagccccgagagcagctgcggtacccagagttttgggttgttggaccctaaattgtgctatctgttggacggaatcctgttcatttacggagtgatcctgaccgcattgttcctgaagagaggccggaagaagctgctgtacatcttcaagcagcctttcatgcggcccgtgcagaccacccaggaagaggacggctgctcctgccggttccccgaggaagaagaaggcggctgcgagctgcgggttaagttttccagatccgcagacgcacccgcttaccaacaagggcagaaccaactctacaatgaacttaatttggggcggagggaagagtacgacgttctggacaaaaggaggggacgagatcccgagatgggcggaaagcctcagcgaaggaagaatccgcaagaggggctttataacgaactccagaaagataaaatggcagaagcctatagtgagattgggatgaagggagaaaggaggaggggtaaaggtcacgatgggttgtaccaaggattgagcacagccactaaagatacctatgatgcgctccacatgcaggccctgccgccaaga

SEQ ID NO: 7221 - DNA, 2487 bp, Artificial Sequence
  Synthetic Polynucloetide
atggccttaccagtgaccgccttgctcctgccgctggccttgctgctccacgccgccaggccgcaggtgcagctggttgaatctggcggaggactggttcagcctggcggatctctgagactgtcttgtgccgccagcggcttcaccttcaccaatcacgccatgagctgggtccgacaggcccctggaaaaggactggaactggtgtctagcatcagcggcaacggcagaaccacctactacgccgatagcgtgaagggcagattcaccatcagccgggacatcagcaagaacaccctggacctccagatgaacagcctgagagccgaggataccgccgtgtactactgtgccaaggatggcggagagacactggtggatagcagaggccagggcacactggtcacagtgtcatctctcgagcagagcttcggcctgctggaccccaagctgtgctacctgctggatggcatcctgttcatctacggcgtgatcctgaccgccctgttcctgagagtgaagttcagcagaagcgccgacgcccctgcctaccagcagggacagaaccaactgtacaacgagctgaacctgggcagacgggaagagtacgacgtgctggacaagcggagaggcagggaccctgagatgggcggaaagccccagcggagaaagaacccccaggaaggactgtataacgaactccagaaagacaagatggccgaagcctacagcgagatcggcatgaagggcgagcggagaagaggcaagggccacgatggcctgtaccagggcctgagcaccgccaccaaggacacctatgacgccctgcacatgcaggccctgcctccaagaagggccaagcgatctggatctggagcaacaaacttctcactactcaaacaagcaggtgacgtggaggagaatcccgggcctactagtatggactggatttggcgcatccttttccttgtcggcgctgctaccggcgcgcattccttcgaagtgcaggttttggagtctggcggaggactggttcagcctggcggatctctgagactgtcttgtgccgccagcggcttcaccttcagcaactttgccatgagctgggtccgacaggcccctggcaaaggacttgaatgggtgtccacaatcagcggcagcgccggcacaacagattacgccgattctgtgaagggcagattcaccatcagccgggacaacagcaagaaaaccctgtacctccagatgaacagcctgcgcgtggaagataccgccgtgtactactgtgccgatggcagaggccccttcttcgattatcgcggccagggcacactggtcaccgtttcttctacgcgtcagagttttgggttgttggaccctaaattgtgctatctgttggacggaatcctgttcatttacggagtgatcctgaccgcattgttcctgcgggttaagttttccagatccgcagacgcacccgcttaccaacaagggcagaaccaactctacaatgaacttaatttggggcggagggaagagtacgacgttctggacaaaaggaggggacgagatcccgagatgggcggaaagcctcagcgaaggaagaatccgcaagaggggctttataacgaactccagaaagataaaatggcagaagcctatagtgagattgggatgaagggagaaaggaggaggggtaaaggtcacgatgggttgtaccaaggattgagcacagccactaaagatacctatgatgcgctccacatgcaggccctgccgccaagacgcgccaagagaagcggatctggcgtgaagcagaccctgaatttcgacctgctgaagctggctggcgacgtggaatccaacccaggcccttctagaggccatatgaccgagtacaagcccacggtgcgcctcgccacccgcgacgacgtccccagggccgtacgcaccctcgccgccgcgttcgccgactaccccgccacgcgccacaccgtcgatccggaccgccacatcgagcgggtcaccgagctgcaagaactcttcctcacgcgcgtcgggctcgacatcggcaaggtgtgggtcgcggacgacggcgccgcggtggcggtctggaccacgccggagagcgtcgaagcgggggcggtgttcgccgagatcggcccgcgcatggccgagttgagcggttcccggctggccgcgcagcaacagatggaaggcctcctggcgccgcaccggcccaaggagcccgcgtggttcctggccaccgtcggcgtctcgcccgaccaccagggcaagggtctgggcagcgccgtcgtgctccccggagtggaggcggccgagcgcgccggggtgcccgccttcctggagacctccgcgccccgcaacctccccttctacgagcggctcggcttcaccgtcaccgccgacgtcgaggtgcccgaaggaccgcgcacctggtgcatgacccgcaagcccggtgcctga

SEQ ID NO: 7222 - DNA, 1959 bp, Artificial Sequence
  Synthetic Polynucloetide
atggccttaccagtgaccgccttgctcctgccgctggccttgctgctccacgccgccaggccgcaggtgcagctggttgaatctggcggaggactggttcagcctggcggatctctgagactgtcttgtgccgccagcggcttcaccttcaccaatcacgccatgagctgggtccgacaggcccctggaaaaggactggaactggtgtctagcatcagcggcaacggcagaaccacctactacgccgatagcgtgaagggcagattcaccatcagccgggacatcagcaagaacaccctggacctccagatgaacagcctgagagccgaggataccgccgtgtactactgtgccaaggatggcggagagacactggtggatagcagaggccagggcacactggtcacagtgtcatctctcgagggacagcctaaggccaatcctaccgtgacactgttccctccaagcagcgaagaactccaggccaacaaggccacacttgtgtgcctgatctccgacttctaccctggggctgtgacagtggcttggaaggccgatggatctcctgtgaaagccggcgtggaaaccaccaagccatccaagcagagcaacaacaaatacgccgccagctcctacctgagcctgacacctgagcagtggaagtcccacagatcctacagctgccaagtgacccacgaaggcagcaccgtggaaaagacagtggcccctacagagtgcagccccatcaagaccgatgtgattacaatggaccccaaggacaactgctccaaggacgccaacgataccctgctgctccagctgaccaacaccagcgcctactacatgtacttgttgctgctgctgaagtccgtggtgtacttcgccatcatcacatgctgcctgctgcggagaaccgccttctgctgcaacggcgagaagtctagggccaagcgatctggatctggagcaacaaacttctcactactcaaacaagcaggtgacgtggaggagaatcccgggcctactagtatggactggatttggcgcatccttttccttgtcggcgctgctaccggcgcgcattccttcgaagtgcaggttttggagtctggcggaggactggttcagcctggcggatctctgagactgtcttgtgccgccagcggcttcaccttcagcaactttgccatgagctgggtccgacaggcccctggcaaaggacttgaatgggtgtccacaatcagcggcagcgccggcacaacagattacgccgattctgtgaagggcagattcaccatcagccgggacaacagcaagaaaaccctgtacctccagatgaacagcctgcgcgtggaagataccgccgtgtactactgtgccgatggcagaggccccttcttcgattatcgcggccagggcacactggtcaccgtttcttctacgcgtgcctctacaaagggaccctccgtgtttcctctggctcccagcagcaagtctacaagcggaggaacagccgctctgggctgcctggtcaaggattactttcccgagcctgtgaccgtgtcctggaatagcggagcactgacaagcggcgtgcacacctttccagccgtgctgcaaagcagcggcctgtactctctgagcagcgtggtcacagtgcctagctctagcctgggcacccagacctacatctgcaatgtgaaccacaagcctagcaacaccaaggtggacaagagagtggaacccaagagctgtgaagtgaaaaccgactccaccgaccacgtgaagcccaaagagacagagaacaccaagcagcccagcaagagctgccacaagcccaaggccatcgtgcacaccgagaaagtgaacatgatgagcctgaccgtgctgggcctgcggatgctgttcgccaaaaccgtggccgtgaacttcctgctgaccgccaagctgttcttcctc

SEQ ID NO: 7223 - DNA, 1893 bp, Artificial Sequence
  Synthetic Polynucloetide
atggccttaccagtgaccgccttgctcctgccgctggccttgctgctccacgccgccaggccgcaggtgcagctggttgaatctggcggaggactggttcagcctggcggatctctgagactgtcttgtgccgccagcggcttcaccttcaccaatcacgccatgagctgggtccgacaggcccctggaaaaggactggaactggtgtctagcatcagcggcaacggcagaaccacctactacgccgatagcgtgaagggcagattcaccatcagccgggacatcagcaagaacaccctggacctccagatgaacagcctgagagccgaggataccgccgtgtactactgtgccaaggatggcggagagacactggtggatagcagaggccagggcacactggtcacagtgtcatctctcgagggacagcctaaggccaatcctaccgtgacactgttccctccaagcagcgaagaactccaggccaacaaggccacacttgtgtgcctgatctccgacttctaccctggggctgtgacagtggcttggaaggccgatggatctcctgtgaaagccggcgtggaaaccaccaagccatccaagcagagcaacaacaaatacgccgccagctcctacctgagcctgacacctgagcagtggaagtcccacagatcctacagctgccaagtgacccacgaaggcagcaccgtggaaaagacagtggcccctacagagtgcagcggcagagccgattgcggcatcaccagcgccagctaccaccagggcgtgctgagcgccaccatcctgtacgagatcctgctgggcaaggccaccctgtacgccgtgctggtgtctgccctggtgctgatggctatggtcaagcggaaggacagccggggaagggccaagcgatctggatctggagcaacaaacttctcactactcaaacaagcaggtgacgtggaggagaatcccgggcctactagtatggactggatttggcgcatccttttccttgtcggcgctgctaccggcgcgcattccttcgaagtgcaggttttggagtctggcggaggactggttcagcctggcggatctctgagactgtcttgtgccgccagcggcttcaccttcagcaactttgccatgagctgggtccgacaggcccctggcaaaggacttgaatgggtgtccacaatcagcggcagcgccggcacaacagattacgccgattctgtgaagggcagattcaccatcagccgggacaacagcaagaaaaccctgtacctccagatgaacagcctgcgcgtggaagataccgccgtgtactactgtgccgatggcagaggccccttcttcgattatcgcggccagggcacactggtcaccgtttcttctacgcgtgcctctacaaagggaccctccgtgtttcctctggctcccagcagcaagtctacaagcggaggaacagccgctctgggctgcctggtcaaggattactttcccgagcctgtgaccgtgtcctggaatagcggagcactgacaagcggcgtgcacacctttccagccgtgctgcaaagcagcggcctgtactctctgagcagcgtggtcacagtgcctagctctagcctgggcacccagacctacatctgcaatgtgaaccacaagcctagcaacaccaaggtggacaagagagtggaacccaagagctgtatccccgaggacacattcttcccaagcagcgacgtgccctgcgacgtgaagctggtggaaaagagcttcgagacagacaccaacctgaacttccagaacctgagcgtgatcggcttcagaatcctgctgctgaaagtggccggctttaacctgctgatgaccctgcggctgtggtccagc

SEQ ID NO: 7224 - DNA, 1893 bp, Artificial Sequence
  Synthetic Polynucloetide
atggccttaccagtgaccgccttgctcctgccgctggccttgctgctccacgccgccaggccgcaggtgcagctggttgaatctggcggaggactggttcagcctggcggatctctgagactgtcttgtgccgccagcggcttcaccttcaccaatcacgccatgagctgggtccgacaggcccctggaaaaggactggaactggtgtctagcatcagcggcaacggcagaaccacctactacgccgatagcgtgaagggcagattcaccatcagccgggacatcagcaagaacaccctggacctccagatgaacagcctgagagccgaggataccgccgtgtactactgtgccaaggatggcggagagacactggtggatagcagaggccagggcacactggtcacagtgtcatctctcgagggacagcctaaggccaatcctaccgtgacactgttccctccaagcagcgaagaactccaggccaacaaggccacacttgtgtgcctgatctccgacttctaccctggggctgtgacagtggcttggaaggccgatggatctcctgtgaaagccggcgtggaaaccaccaagccatccaagcagagcaacaacaaatacgccgccagctcctacctgagcctgacacctgagcagtggaagtcccacagatcctacagctgccaagtgacccacgaaggcagcaccgtggaaaagacagtggcccctacagagtgcagcggcagagccgattgcggctttaccagcgagagctaccagcagggcgtgctgagcgccaccatcctgtacgagatcctgctgggcaaggccaccctgtacgccgtgctggtgtctgccctggtgctgatggctatggtcaagcggaaggacagccggggaagggccaagcgatctggatctggagcaacaaacttctcactactcaaacaagcaggtgacgtggaggagaatcccgggcctactagtatggactggatttggcgcatccttttccttgtcggcgctgctaccggcgcgcattccttcgaagtgcaggttttggagtctggcggaggactggttcagcctggcggatctctgagactgtcttgtgccgccagcggcttcaccttcagcaactttgccatgagctgggtccgacaggcccctggcaaaggacttgaatgggtgtccacaatcagcggcagcgccggcacaacagattacgccgattctgtgaagggcagattcaccatcagccgggacaacagcaagaaaaccctgtacctccagatgaacagcctgcgcgtggaagataccgccgtgtactactgtgccgatggcagaggccccttcttcgattatcgcggccagggcacactggtcaccgtttcttctacgcgtgcctctacaaagggaccctccgtgtttcctctggctcccagcagcaagtctacaagcggaggaacagccgctctgggctgcctggtcaaggattactttcccgagcctgtgaccgtgtcctggaatagcggagcactgacaagcggcgtgcacacctttccagccgtgctgcaaagcagcggcctgtactctctgagcagcgtggtcacagtgcctagctctagcctgggcacccagacctacatctgcaatgtgaaccacaagcctagcaacaccaaggtggacaagagagtggaacccaagagctgtatccccgaggacacattcttcccaagccccgagagcagctgcgacgtgaagctggtggaaaagagcttcgagacagacaccaacctgaacttccagaacctgagcgtgatcggcttcagaatcctgctgctgaaagtggccggctttaacctgctgatgaccctgcggctgtggtccagc

SEQ ID NO: 7225 - DNA, 1356 bp, Artificial Sequence
  Synthetic Polynucloetide
atggccttaccagtgaccgccttgctcctgccgctggccttgctgctccacgccgccaggccgcaggtgcagctggttgaatctggcggaggactggttcagcctggcggatctctgagactgtcttgtgccgccagcggcttcaccttcaccaatcacgccatgagctgggtccgacaggcccctggaaaaggactggaactggtgtctagcatcagcggcaacggcagaaccacctactacgccgatagcgtgaagggcagattcaccatcagccgggacatcagcaagaacaccctggacctccagatgaacagcctgagagccgaggataccgccgtgtactactgtgccaaggatggcggagagacactggtggatagcagaggccagggcacactggtcacagtgtcatctctcgagagcggcggaggcggatctttcgaagtgcaggttttggagtctggcggaggactggttcagcctggcggatctctgagactgtcttgtgccgccagcggcttcaccttcagcaactttgccatgagctgggtccgacaggcccctggcaaaggacttgaatgggtgtccacaatcagcggcagcgccggcacaacagattacgccgattctgtgaagggcagattcaccatcagccgggacaacagcaagaaaaccctgtacctccagatgaacagcctgcgcgtggaagataccgccgtgtactactgtgccgatggcagaggccccttcttcgattatcgcggccagggcacactggtcaccgtttcttctacgcgtgacggtaacgaggagatgggaggaatcactcaaaccccttacaaagtctcaatttcaggaacaactgttatccttacatgtccccagtatcctggcagcgagatcctttggcagcataacgacaagaatatagggggagatgaagacgataagaatatcggatctgacgaggatcacttgagcctgaaagagttctccgagcttgaacaaagcggatattatgtgtgctatccgcgcgggtcaaagccggaagacgctaacttttacctttatctccgagccagagtgtgcgaaaattgcatggaaatggacgttatgtccgttgctacaatagttatcgtagatatatgcatcacgggtggactgcttctgctggtttattattggtccaagaatagaaaggccaaagctaaacccgtgaccagaggcgctggcgcaggcggaaggcaaaggggacaaaacaaagaacggccaccaccagtgccaaatccagattatgagcctattcggaaaggacagagggacctgtactctggcctgaatcagagaagaatc

SEQ ID NO: 7226 - DNA, 1251 bp, Artificial Sequence
  Synthetic Polynucloetide
atggccttaccagtgaccgccttgctcctgccgctggccttgctgctccacgccgccaggccgcaggtgcagctggttgaatctggcggaggactggttcagcctggcggatctctgagactgtcttgtgccgccagcggcttcaccttcaccaatcacgccatgagctgggtccgacaggcccctggaaaaggactggaactggtgtctagcatcagcggcaacggcagaaccacctactacgccgatagcgtgaagggcagattcaccatcagccgggacatcagcaagaacaccctggacctccagatgaacagcctgagagccgaggataccgccgtgtactactgtgccaaggatggcggagagacactggtggatagcagaggccagggcacactggtcacagtgtcatctctcgagagcggcggaggcggatctttcgaagtgcaggttttggagtctggcggaggactggttcagcctggcggatctctgagactgtcttgtgccgccagcggcttcaccttcagcaactttgccatgagctgggtccgacaggcccctggcaaaggacttgaatgggtgtccacaatcagcggcagcgccggcacaacagattacgccgattctgtgaagggcagattcaccatcagccgggacaacagcaagaaaaccctgtacctccagatgaacagcctgcgcgtggaagataccgccgtgtactactgtgccgatggcagaggccccttcttcgattatcgcggccagggcacactggtcaccgtttcttctacgcgtttcaagatccccatcgaggaactggaagatcgggtgttcgtgaactgcaacacctctatcacctgggtggaaggcaccgtgggaacactgctgagcgacatcaccagactggacctcggcaagcggattctggaccctcggggcatctacagatgcaacggcaccgacatctacaaggacaaagaaagcaccgtgcaggtccactacagaatgtgccagtcctgcgtggaactggaccctgctacagtggccggcatcatcgtgaccgatgtgatcgctactctgctgctggctctgggagtgttctgcttcgccggacacgaaacaggcagactgtctggcgctgccgatacacaggccctgctgagaaacgaccaagtgtatcagcccctgcgcgacagagatgatgcccagtattctcacctcggcggcaactgggctagaaacaag

SEQ ID NO: 7227 - DNA, 1281 bp, Artificial Sequence
  Synthetic Polynucloetide
atggccttaccagtgaccgccttgctcctgccgctggccttgctgctccacgccgccaggccgcaggtgcagctggttgaatctggcggaggactggttcagcctggcggatctctgagactgtcttgtgccgccagcggcttcaccttcaccaatcacgccatgagctgggtccgacaggcccctggaaaaggactggaactggtgtctagcatcagcggcaacggcagaaccacctactacgccgatagcgtgaagggcagattcaccatcagccgggacatcagcaagaacaccctggacctccagatgaacagcctgagagccgaggataccgccgtgtactactgtgccaaggatggcggagagacactggtggatagcagaggccagggcacactggtcacagtgtcatctctcgagagcggcggaggcggatctttcgaagtgcaggttttggagtctggcggaggactggttcagcctggcggatctctgagactgtcttgtgccgccagcggcttcaccttcagcaactttgccatgagctgggtccgacaggcccctggcaaaggacttgaatgggtgtccacaatcagcggcagcgccggcacaacagattacgccgattctgtgaagggcagattcaccatcagccgggacaacagcaagaaaaccctgtacctccagatgaacagcctgcgcgtggaagataccgccgtgtactactgtgccgatggcagaggccccttcttcgattatcgcggccagggcacactggtcaccgtttcttctacgcgtcagagcatcaagggcaaccacctggtcaaggtgtacgactaccaagaggacggcagcgtgctgctgacatgtgatgccgaggccaagaacatcacctggtttaaggacggcaagatgatcggcttcctgaccgaggacaagaagaagtggaacctgggcagcaacgctaaggaccccagaggcatgtatcagtgcaagggcagccagaacaagagcaagcccctccaggtgtactaccggatgtgccagaactgcatcgagctgaacgccgctaccatcagcggctttctgttcgccgagatcgtgtccatcttcgtgctggccgtgggcgtgtactttatcgctggacaggatggcgtgcggcagagcagagcttccgataagcaaaccctgctgcctaacgaccagctgtaccagcctctgaaggacagagaggacgaccagtacagccacctccagggcaatcagctgagaagaaac

SEQ ID NO: 7228 - DNA, 1230 bp, Artificial Sequence
  Synthetic Polynucloetide
atggccttaccagtgaccgccttgctcctgccgctggccttgctgctccacgccgccaggccgcaggtgcagctggttgaatctggcggaggactggttcagcctggcggatctctgagactgtcttgtgccgccagcggcttcaccttcaccaatcacgccatgagctgggtccgacaggcccctggaaaaggactggaactggtgtctagcatcagcggcaacggcagaaccacctactacgccgatagcgtgaagggcagattcaccatcagccgggacatcagcaagaacaccctggacctccagatgaacagcctgagagccgaggataccgccgtgtactactgtgccaaggatggcggagagacactggtggatagcagaggccagggcacactggtcacagtgtcatctctcgagagcggcggaggcggatctttcgaagtgcaggttttggagtctggcggaggactggttcagcctggcggatctctgagactgtcttgtgccgccagcggcttcaccttcagcaactttgccatgagctgggtccgacaggcccctggcaaaggacttgaatgggtgtccacaatcagcggcagcgccggcacaacagattacgccgattctgtgaagggcagattcaccatcagccgggacaacagcaagaaaaccctgtacctccagatgaacagcctgcgcgtggaagataccgccgtgtactactgtgccgatggcagaggccccttcttcgattatcgcggccagggcacactggtcaccgtttcttctacgcgtcagagttttgggttgttggaccctaaattgtgctatctgttggacggaatcctgttcatttacggagtgatcctgaccgcattgttcctgcgggttaagttttccagatccgcagacgcacccgcttaccaacaagggcagaaccaactctacaatgaacttaatttggggcggagggaagagtacgacgttctggacaaaaggaggggacgagatcccgagatgggcggaaagcctcagcgaaggaagaatccgcaagaggggctttataacgaactccagaaagataaaatggcagaagcctatagtgagattgggatgaagggagaaaggaggaggggtaaaggtcacgatgggttgtaccaaggattgagcacagccactaaagatacctatgatgcgctccacatgcaggccctgccgccaaga

SEQ ID NO: 7229 - DNA, 1359 bp, Artificial Sequence
  Synthetic Polynucloetide
atggccttaccagtgaccgccttgctcctgccgctggccttgctgctccacgccgccaggccggaagtgcaggttttggagtctggcggaggactggttcagcctggcggatctctgagactgtcttgtgccgccagcggcttcaccttcagcaactttgccatgagctgggtccgacaggcccctggcaaaggacttgaatgggtgtccacaatcagcggcagcgccggcacaacagattacgccgattctgtgaagggcagattcaccatcagccgggacaacagcaagaaaaccctgtacctccagatgaacagcctgcgcgtggaagataccgccgtgtactactgtgccgatggcagaggccccttcttcgattatcgcggccagggcacactggtcaccgtttcttctctcgagagcggcggaggcggatctttcgaacaggtgcagctggttgaatctggcggaggactggttcagcctggcggatctctgagactgtcttgtgccgccagcggcttcaccttcaccaatcacgccatgagctgggtccgacaggcccctggaaaaggactggaactggtgtctagcatcagcggcaacggcagaaccacctactacgccgatagcgtgaagggcagattcaccatcagccgggacatcagcaagaacaccctggacctccagatgaacagcctgagagccgaggataccgccgtgtactactgtgccaaggatggcggagagacactggtggatagcagaggccagggcacactggtcacagtgtcatctacgcgtgacggtaacgaggagatgggaggaatcactcaaaccccttacaaagtctcaatttcaggaacaactgttatccttacatgtccccagtatcctggcagcgagatcctttggcagcataacgacaagaatatagggggagatgaagacgataagaatatcggatctgacgaggatcacttgagcctgaaagagttctccgagcttgaacaaagcggatattatgtgtgctatccgcgcgggtcaaagccggaagacgctaacttttacctttatctccgagccagagtgtgcgaaaattgcatggaaatggacgttatgtccgttgctacaatagttatcgtagatatatgcatcacgggtggactgcttctgctggtttattattggtccaagaatagaaaggccaaagctaaacccgtgaccagaggcgctggcgcaggcggaaggcaaaggggacaaaacaaagaacggccaccaccagtgccaaatccagattatgagcctattcggaaaggacagagggacctgtactctggcctgaatcagagaagaatc

SEQ ID NO: 7230 - DNA, 1254 bp, Artificial Sequence
  Synthetic Polynucloetide
atggccttaccagtgaccgccttgctcctgccgctggccttgctgctccacgccgccaggccggaagtgcaggttttggagtctggcggaggactggttcagcctggcggatctctgagactgtcttgtgccgccagcggcttcaccttcagcaactttgccatgagctgggtccgacaggcccctggcaaaggacttgaatgggtgtccacaatcagcggcagcgccggcacaacagattacgccgattctgtgaagggcagattcaccatcagccgggacaacagcaagaaaaccctgtacctccagatgaacagcctgcgcgtggaagataccgccgtgtactactgtgccgatggcagaggccccttcttcgattatcgcggccagggcacactggtcaccgtttcttctctcgagagcggcggaggcggatctttcgaacaggtgcagctggttgaatctggcggaggactggttcagcctggcggatctctgagactgtcttgtgccgccagcggcttcaccttcaccaatcacgccatgagctgggtccgacaggcccctggaaaaggactggaactggtgtctagcatcagcggcaacggcagaaccacctactacgccgatagcgtgaagggcagattcaccatcagccgggacatcagcaagaacaccctggacctccagatgaacagcctgagagccgaggataccgccgtgtactactgtgccaaggatggcggagagacactggtggatagcagaggccagggcacactggtcacagtgtcatctacgcgtttcaagatccccatcgaggaactggaagatcgggtgttcgtgaactgcaacacctctatcacctgggtggaaggcaccgtgggaacactgctgagcgacatcaccagactggacctcggcaagcggattctggaccctcggggcatctacagatgcaacggcaccgacatctacaaggacaaagaaagcaccgtgcaggtccactacagaatgtgccagtcctgcgtggaactggaccctgctacagtggccggcatcatcgtgaccgatgtgatcgctactctgctgctggctctgggagtgttctgcttcgccggacacgaaacaggcagactgtctggcgctgccgatacacaggccctgctgagaaacgaccaagtgtatcagcccctgcgcgacagagatgatgcccagtattctcacctcggcggcaactgggctagaaacaag

SEQ ID NO: 7231 - DNA, 1284 bp, Artificial Sequence
  Synthetic Polynucloetide
atggccttaccagtgaccgccttgctcctgccgctggccttgctgctccacgccgccaggccggaagtgcaggttttggagtctggcggaggactggttcagcctggcggatctctgagactgtcttgtgccgccagcggcttcaccttcagcaactttgccatgagctgggtccgacaggcccctggcaaaggacttgaatgggtgtccacaatcagcggcagcgccggcacaacagattacgccgattctgtgaagggcagattcaccatcagccgggacaacagcaagaaaaccctgtacctccagatgaacagcctgcgcgtggaagataccgccgtgtactactgtgccgatggcagaggccccttcttcgattatcgcggccagggcacactggtcaccgtttcttctctcgagagcggcggaggcggatctttcgaacaggtgcagctggttgaatctggcggaggactggttcagcctggcggatctctgagactgtcttgtgccgccagcggcttcaccttcaccaatcacgccatgagctgggtccgacaggcccctggaaaaggactggaactggtgtctagcatcagcggcaacggcagaaccacctactacgccgatagcgtgaagggcagattcaccatcagccgggacatcagcaagaacaccctggacctccagatgaacagcctgagagccgaggataccgccgtgtactactgtgccaaggatggcggagagacactggtggatagcagaggccagggcacactggtcacagtgtcatctacgcgtcagagcatcaagggcaaccacctggtcaaggtgtacgactaccaagaggacggcagcgtgctgctgacatgtgatgccgaggccaagaacatcacctggtttaaggacggcaagatgatcggcttcctgaccgaggacaagaagaagtggaacctgggcagcaacgctaaggaccccagaggcatgtatcagtgcaagggcagccagaacaagagcaagcccctccaggtgtactaccggatgtgccagaactgcatcgagctgaacgccgctaccatcagcggctttctgttcgccgagatcgtgtccatcttcgtgctggccgtgggcgtgtactttatcgctggacaggatggcgtgcggcagagcagagcttccgataagcaaaccctgctgcctaacgaccagctgtaccagcctctgaaggacagagaggacgaccagtacagccacctccagggcaatcagctgagaagaaac

SEQ ID NO: 7232 - DNA, 1233 bp, Artificial Sequence
  Synthetic Polynucloetide
atggccttaccagtgaccgccttgctcctgccgctggccttgctgctccacgccgccaggccggaagtgcaggttttggagtctggcggaggactggttcagcctggcggatctctgagactgtcttgtgccgccagcggcttcaccttcagcaactttgccatgagctgggtccgacaggcccctggcaaaggacttgaatgggtgtccacaatcagcggcagcgccggcacaacagattacgccgattctgtgaagggcagattcaccatcagccgggacaacagcaagaaaaccctgtacctccagatgaacagcctgcgcgtggaagataccgccgtgtactactgtgccgatggcagaggccccttcttcgattatcgcggccagggcacactggtcaccgtttcttctctcgagagcggcggaggcggatctttcgaacaggtgcagctggttgaatctggcggaggactggttcagcctggcggatctctgagactgtcttgtgccgccagcggcttcaccttcaccaatcacgccatgagctgggtccgacaggcccctggaaaaggactggaactggtgtctagcatcagcggcaacggcagaaccacctactacgccgatagcgtgaagggcagattcaccatcagccgggacatcagcaagaacaccctggacctccagatgaacagcctgagagccgaggataccgccgtgtactactgtgccaaggatggcggagagacactggtggatagcagaggccagggcacactggtcacagtgtcatctacgcgtcagagttttgggttgttggaccctaaattgtgctatctgttggacggaatcctgttcatttacggagtgatcctgaccgcattgttcctgcgggttaagttttccagatccgcagacgcacccgcttaccaacaagggcagaaccaactctacaatgaacttaatttggggcggagggaagagtacgacgttctggacaaaaggaggggacgagatcccgagatgggcggaaagcctcagcgaaggaagaatccgcaagaggggctttataacgaactccagaaagataaaatggcagaagcctatagtgagattgggatgaagggagaaaggaggaggggtaaaggtcacgatgggttgtaccaaggattgagcacagccactaaagatacctatgatgcgctccacatgcaggccctgccgccaaga

SEQ ID NO: 7233 - DNA, 1932 bp, Artificial Sequence
  Synthetic Polynucloetide
atggccttaccagtgaccgccttgctcctgccgctggccttgctgctccacgccgccaggccgcaggtgcagctggttgaatctggcggaggactggttcagcctggcggatctctgagactgtcttgtgccgccagcggcttcaccttcaccaatcacgccatgagctgggtccgacaggcccctggaaaaggactggaactggtgtctagcatcagcggcaacggcagaaccacctactacgccgatagcgtgaagggcagattcaccatcagccgggacatcagcaagaacaccctggacctccagatgaacagcctgagagccgaggataccgccgtgtactactgtgccaaggatggcggagagacactggtggatagcagaggccagggcacactggtcacagtgtcatctctcgagagcggcggaggcggatctttcgaagtgcaggttttggagtctggcggaggactggttcagcctggcggatctctgagactgtcttgtgccgccagcggcttcaccttcagcaactttgccatgagctgggtccgacaggcccctggcaaaggacttgaatgggtgtccacaatcagcggcagcgccggcacaacagattacgccgattctgtgaagggcagattcaccatcagccgggacaacagcaagaaaaccctgtacctccagatgaacagcctgcgcgtggaagataccgccgtgtactactgtgccgatggcagaggccccttcttcgattatcgcggccagggcacactggtcaccgtttcttctacgcgtgggagcggcatccagaaccctgatcctgccgtgtaccagctgcgggatagcaagagcagcgacaagagcgtgtgtctgttcaccgacttcgacagccagaccaacgtgtcccagagcaaggactccgacgtgtacatcaccgataagaccgtgctggacatgcggagcatggacttcaagagcaactccgccgtggcctggtccaacaagtccgatttcgcctgcgccaacgccttcaacaacagcattatccccgaggacacattcttcccaagccccgagagcagctgcgacgtgaagctggtggaaaagagcttcgagacagacaccaacctgaacttccagaacctgagcgtgatcggcttcagaatcctgctgctgaaagtggccggctttaacctgctgatgaccctgcggctgtggtccagccgcgccaagagaagcggatctggcgtgaagcagaccctgaatttcgacctgctgaagctggctggcgacgtggaatccaacccaggcccttctagaggccatatgaccgagtacaagcccacggtgcgcctcgccacccgcgacgacgtccccagggccgtacgcaccctcgccgccgcgttcgccgactaccccgccacgcgccacaccgtcgatccggaccgccacatcgagcgggtcaccgagctgcaagaactcttcctcacgcgcgtcgggctcgacatcggcaaggtgtgggtcgcggacgacggcgccgcggtggcggtctggaccacgccggagagcgtcgaagcgggggcggtgttcgccgagatcggcccgcgcatggccgagttgagcggttcccggctggccgcgcagcaacagatggaaggcctcctggcgccgcaccggcccaaggagcccgcgtggttcctggccaccgtcggcgtctcgcccgaccaccagggcaagggtctgggcagcgccgtcgtgctccccggagtggaggcggccgagcgcgccggggtgcccgccttcctggagacctccgcgccccgcaacctccccttctacgagcggctcggcttcaccgtcaccgccgacgtcgaggtgcccgaaggaccgcgcacctggtgcatgacccgcaagcccggtgcctga

SEQ ID NO: 7234 - DNA, 2028 bp, Artificial Sequence
  Synthetic Polynucloetide
atggccttaccagtgaccgccttgctcctgccgctggccttgctgctccacgccgccaggccgcaggtgcagctggttgaatctggcggaggactggttcagcctggcggatctctgagactgtcttgtgccgccagcggcttcaccttcaccaatcacgccatgagctgggtccgacaggcccctggaaaaggactggaactggtgtctagcatcagcggcaacggcagaaccacctactacgccgatagcgtgaagggcagattcaccatcagccgggacatcagcaagaacaccctggacctccagatgaacagcctgagagccgaggataccgccgtgtactactgtgccaaggatggcggagagacactggtggatagcagaggccagggcacactggtcacagtgtcatctctcgagagcggcggaggcggatctttcgaagtgcaggttttggagtctggcggaggactggttcagcctggcggatctctgagactgtcttgtgccgccagcggcttcaccttcagcaactttgccatgagctgggtccgacaggcccctggcaaaggacttgaatgggtgtccacaatcagcggcagcgccggcacaacagattacgccgattctgtgaagggcagattcaccatcagccgggacaacagcaagaaaaccctgtacctccagatgaacagcctgcgcgtggaagataccgccgtgtactactgtgccgatggcagaggccccttcttcgattatcgcggccagggcacactggtcaccgtttcttctctcgaggacctgaagaacgtgttcccacctgaggtggccgtgttcgagcctagcgaggccgagatcagccacacccagaaagccaccctcgtgtgcctggctaccggcttctaccccgaccatgtggaactgtcttggtgggtcaacggcaaagaggtgcacagcggcgtgtctaccgacccccagccactgaaagaacagcccgccctgaacgacagccggtactgcctgagcagcagactgagagtgtccgccaccttctggcagaacccccggaaccacttcagatgccaggtgcagttctacggcctgagcgagaacgacgagtggacccaggacagagccaagcccgtgacccagatcgtgtctgccgaagcctggggcagagccgattgcggctttaccagcgagagctaccagcagggcgtgctgagcgccaccatcctgtacgagatcctgctgggcaaggccaccctgtacgccgtgctggtgtctgccctggtgctgatggctatggtcaagcggaaggacagccggggaagggccaagcgatctggatctggagcaacaaacttctcactactcaaacaagcaggtgacgtggaggagaatcccgggcctactagaggccatatgaccgagtacaagcccacggtgcgcctcgccacccgcgacgacgtccccagggccgtacgcaccctcgccgccgcgttcgccgactaccccgccacgcgccacaccgtcgatccggaccgccacatcgagcgggtcaccgagctgcaagaactcttcctcacgcgcgtcgggctcgacatcggcaaggtgtgggtcgcggacgacggcgccgcggtggcggtctggaccacgccggagagcgtcgaagcgggggcggtgttcgccgagatcggcccgcgcatggccgagttgagcggttcccggctggccgcgcagcaacagatggaaggcctcctggcgccgcaccggcccaaggagcccgcgtggttcctggccaccgtcggcgtctcgcccgaccaccagggcaagggtctgggcagcgccgtcgtgctccccggagtggaggcggccgagcgcgccggggtgcccgccttcctggagacctccgcgccccgcaacctccccttctacgagcggctcggcttcaccgtcaccgccgacgtcgaggtgcccgaaggaccgcgcacctggtgcatgacccgcaagcccggtgcctga

SEQ ID NO: 7235 - DNA, 2178 bp, Artificial Sequence
  Synthetic Polynucloetide
atggccttaccagtgaccgccttgctcctgccgctggccttgctgctccacgccgccaggccgcaggtgcagctggttgaatctggcggaggactggttcagcctggcggatctctgagactgtcttgtgccgccagcggcttcaccttcaccaatcacgccatgagctgggtccgacaggcccctggaaaaggactggaactggtgtctagcatcagcggcaacggcagaaccacctactacgccgatagcgtgaagggcagattcaccatcagccgggacatcagcaagaacaccctggacctccagatgaacagcctgagagccgaggataccgccgtgtactactgtgccaaggatggcggagagacactggtggatagcagaggccagggcacactggtcacagtgtcatctctcgagagcggcggaggcggatctttcgaagtgcaggttttggagtctggcggaggactggttcagcctggcggatctctgagactgtcttgtgccgccagcggcttcaccttcagcaactttgccatgagctgggtccgacaggcccctggcaaaggacttgaatgggtgtccacaatcagcggcagcgccggcacaacagattacgccgattctgtgaagggcagattcaccatcagccgggacaacagcaagaaaaccctgtacctccagatgaacagcctgcgcgtggaagataccgccgtgtactactgtgccgatggcagaggccccttcttcgattatcgcggccagggcacactggtcaccgtttcttctacgcgtgagcagaaactgatctcggaagaggatctggggagcggcaccccattcccttctctggcccctcccatcatgctgctggtggacggcaagcagcagatggtggtcgtgtgcctggtgctggatgtggccccacctggactggacagccccatctggtttagcgccggcaatggctctgccctggacgcctttacctacggcccaagccctgccaccgatggcacctggacaaatctggcccacctgagcctgcccagcgaggaactggcttcttgggagcctctcgtgtgccacacaggacctggcgctgagggacacagcagatccacccagcctatgcacctgtctggcgaggccagcaccgccagaacctgtcctcaggaacctctgagaggcacccctggcggagcactgtggctgggagtgctgagactgctgctgttcaagctgctgctgtttgacctgctgctgacctgctcctgtctgtgcgatcctgccggccctctgccttctcctgccaccaccacaagactgagagccctgggcagccacagactgcaccctgccacagagacaggcggcagagaggccacaagcagccctagaccccagcccagagacagaagatggggcgataccccccctggcagaaagcctggatctccagtccgcgccaagagaagcggatctggcgtgaagcagaccctgaatttcgacctgctgaagctggctggcgacgtggaatccaacccaggcccttctagatctagaggccatatgaccgagtacaagcccacggtgcgcctcgccacccgcgacgacgtccccagggccgtacgcaccctcgccgccgcgttcgccgactaccccgccacgcgccacaccgtcgatccggaccgccacatcgagcgggtcaccgagctgcaagaactcttcctcacgcgcgtcgggctcgacatcggcaaggtgtgggtcgcggacgacggcgccgcggtggcggtctggaccacgccggagagcgtcgaagcgggggcggtgttcgccgagatcggcccgcgcatggccgagttgagcggttcccggctggccgcgcagcaacagatggaaggcctcctggcgccgcaccggcccaaggagcccgcgtggttcctggccaccgtcggcgtctcgcccgaccaccagggcaagggtctgggcagcgccgtcgtgctccccggagtggaggcggccgagcgcgccggggtgcccgccttcctggagacctccgcgccccgcaacctccccttctacgagcggctcggcttcaccgtcaccgccgacgtcgaggtgcccgaaggaccgcgcacctggtgcatgacccgcaagcccggtgcctga

SEQ ID NO: 7236 - DNA, 1650 bp, Artificial Sequence; identical to SEQ ID NO: 7090
  Synthetic Polynucloetide

SEQ ID NO: 7237 - DNA, 957 bp, Artificial Sequence; identical to SEQ ID NO: 7091
  Synthetic Polynucloetide

SEQ ID NO: 7238 - DNA, 1338 bp, Artificial Sequence
  Synthetic Polynucloetide
atggactggatttggcgcatccttttccttgtcggcgctgctaccggcgcgcattccttcgaagtgcaggttttggagtctggcggaggactggttcagcctggcggatctctgagactgtcttgtgccgccagcggcttcaccttcagcaactttgccatgagctgggtccgacaggcccctggcaaaggacttgaatgggtgtccacaatcagcggcagcgccggcacaacagattacgccgattctgtgaagggcagattcaccatcagccgggacaacagcaagaaaaccctgtacctccagatgaacagcctgcgcgtggaagataccgccgtgtactactgtgccgatggcagaggccccttcttcgattatcgcggccagggcacactggtcaccgtttcttctacgcgtatccagaaccctgatcctgccgtgtaccagctgcgggatagcaagagcagcgacaagagcgtgtgtctgttcaccgacttcgacagccagaccaacgtgtcccagagcaaggactccgacgtgtacatcaccgataagaccgtgctggacatgcggagcatggacttcaagagcaactccgccgtggcctggtccaacaagtccgatttcgcctgcgccaacgccttcaacaacagcattatccccgaggacacattcttcccaagccccgagagcagctgcgacgtgaagctggtggaaaagagcttcgagacagacaccaacctgaacttccagaacctgagcgtgatcggcttcagaatcctgctgctgaaagtggccggctttaacctgctgatgaccctgcggctgtggtccagccgcgccaagagaagcggatctggcgtgaagcagaccctgaatttcgacctgctgaagctggctggcgacgtggaatccaacccaggcccttctagaggccatatggccaagcctttgtctcaagaagaatccaccctcattgaaagagcaacggctacaatcaacagcatccccatctctgaagactacagcgtcgccagcgcagctctctctagcgacggccgcatcttcactggtgtcaatgtatatcattttactgggggaccttgtgcagaactcgtggtgctgggcactgctgctgctgcggcagctggcaacctgacttgtatcgtcgcgatcggaaatgagaacaggggcatcttgagcccctgcggacggtgccgacaggtgcttctcgatctgcatcctgggatcaaagccatagtgaaggacagtgatggacagccgacggcagttgggattcgtgaattgctgccctctggttatgtgtgggagggctga

SEQ ID NO: 7239 - DNA, 837 bp, Artificial Sequence
  Synthetic Polynucloetide
atggactggatttggcgcatccttttccttgtcggcgctgctaccggcgcgcattccttcgaagtgcaggttttggagtctggcggaggactggttcagcctggcggatctctgagactgtcttgtgccgccagcggcttcaccttcagcaactttgccatgagctgggtccgacaggcccctggcaaaggacttgaatgggtgtccacaatcagcggcagcgccggcacaacagattacgccgattctgtgaagggcagattcaccatcagccgggacaacagcaagaaaaccctgtacctccagatgaacagcctgcgcgtggaagataccgccgtgtactactgtgccgatggcagaggccccttcttcgattatcgcggccagggcacactggtcaccgtttcttctacgcgtatccagaaccctgatcctgccgtgtaccagctgcgggatagcaagagcagcgacaagagcgtgtgtctgttcaccgacttcgacagccagaccaacgtgtcccagagcaaggactccgacgtgtacatcaccgataagaccgtgctggacatgcggagcatggacttcaagagcaactccgccgtggcctggtccaacaagtccgatttcgcctgcgccaacgccttcaacaacagcattatccccgaggacacattcttcccaagccccgagagcagctgcgacgtgaagctggtggaaaagagcttcgagacagacaccaacctgaacttccagaacctgagcgtgatcggcttcagaatcctgctgctgaaagtggccggctttaacctgctgatgaccctgcggctgtggtccagc

SEQ ID NO: 7240 - DNA, 1704 bp, Artificial Sequence; identical to SEQ ID NO: 7094
  Synthetic Polynucloetide

SEQ ID NO: 7241 - DNA, 1014 bp, Artificial Sequence; identical to SEQ ID NO: 7095
  Synthetic Polynucloetide

SEQ ID NO: 7242 - DNA, 1374 bp, Artificial Sequence
  Synthetic Polynucloetide
atggactggatttggcgcatccttttccttgtcggcgctgctaccggcgcgcattccttcgaagtgcaggttttggagtctggcggaggactggttcagcctggcggatctctgagactgtcttgtgccgccagcggcttcaccttcagcaactttgccatgagctgggtccgacaggcccctggcaaaggacttgaatgggtgtccacaatcagcggcagcgccggcacaacagattacgccgattctgtgaagggcagattcaccatcagccgggacaacagcaagaaaaccctgtacctccagatgaacagcctgcgcgtggaagataccgccgtgtactactgtgccgatggcagaggccccttcttcgattatcgcggccagggcacactggtcaccgtttcttctacgcgtgagcagaaactgatctcggaagaggatgggagcggcatccagaaccctgatcctgccgtgtaccagctgcgggatagcaagagcagcgacaagagcgtgtgtctgttcaccgacttcgacagccagaccaacgtgtcccagagcaaggactccgacgtgtacatcaccgataagtgcgtgctggacatgcggagcatggacttcaagagcaactccgccgtggcctggtccaacaagtccgatttcgcctgcgccaacgccttcaacaacagcattatccccgaggacacattcttcccaagccccgagagcagctgcgacgtgaagctggtggaaaagagcttcgagacagacaccaacctgaacttccagaacctgagcgtgatcggcttcagaatcctgctgctgaaagtggccggctttaacctgctgatgaccctgcggctgtggtccagccgcgccaagagaagcggatctggcgtgaagcagaccctgaatttcgacctgctgaagctggctggcgacgtggaatccaacccaggcccttctagaggccatatggccaagcctttgtctcaagaagaatccaccctcattgaaagagcaacggctacaatcaacagcatccccatctctgaagactacagcgtcgccagcgcagctctctctagcgacggccgcatcttcactggtgtcaatgtatatcattttactgggggaccttgtgcagaactcgtggtgctgggcactgctgctgctgcggcagctggcaacctgacttgtatcgtcgcgatcggaaatgagaacaggggcatcttgagcccctgcggacggtgccgacaggtgcttctcgatctgcatcctgggatcaaagccatagtgaaggacagtgatggacagccgacggcagttgggattcgtgaattgctgccctctggttatgtgtgggagggctga

SEQ ID NO: 7243 - DNA, 876 bp, Artificial Sequence
  Synthetic Polynucloetide
atggactggatttggcgcatccttttccttgtcggcgctgctaccggcgcgcattccttcgaagtgcaggttttggagtctggcggaggactggttcagcctggcggatctctgagactgtcttgtgccgccagcggcttcaccttcagcaactttgccatgagctgggtccgacaggcccctggcaaaggacttgaatgggtgtccacaatcagcggcagcgccggcacaacagattacgccgattctgtgaagggcagattcaccatcagccgggacaacagcaagaaaaccctgtacctccagatgaacagcctgcgcgtggaagataccgccgtgtactactgtgccgatggcagaggccccttcttcgattatcgcggccagggcacactggtcaccgtttcttctacgcgtgagcagaaactgatctcggaagaggatgggagcggcatccagaaccctgatcctgccgtgtaccagctgcgggatagcaagagcagcgacaagagcgtgtgtctgttcaccgacttcgacagccagaccaacgtgtcccagagcaaggactccgacgtgtacatcaccgataagtgcgtgctggacatgcggagcatggacttcaagagcaactccgccgtggcctggtccaacaagtccgatttcgcctgcgccaacgccttcaacaacagcattatccccgaggacacattcttcccaagccccgagagcagctgcgacgtgaagctggtggaaaagagcttcgagacagacaccaacctgaacttccagaacctgagcgtgatcggcttcagaatcctgctgctgaaagtggccggctttaacctgctgatgaccctgcggctgtggtccagctga

SEQ ID NO: 7244 - DNA, 1932 bp, Artificial Sequence
  Synthetic Polynucloetide
atggccttaccagtgaccgccttgctcctgccgctggccttgctgctccacgccgccaggccgcaggtgcagctggttgaatctggcggaggactggttcagcctggcggatctctgagactgtcttgtgccgccagcggcttcaccttcaccaatcacgccatgagctgggtccgacaggcccctggaaaaggactggaactggtgtctagcatcagcggcaacggcagaaccacctactacgccgatagcgtgaagggcagattcaccatcagccgggacatcagcaagaacaccctggacctccagatgaacagcctgagagccgaggataccgccgtgtactactgtgccaaggatggcggagagacactggtggatagcagaggccagggcacactggtcacagtgtcatctctcgagagcggcggaggcggatctttcgaagtgcaggttttggagtctggcggaggactggttcagcctggcggatctctgagactgtcttgtgccgccagcggcttcaccttcagcaactttgccatgagctgggtccgacaggcccctggcaaaggacttgaatgggtgtccacaatcagcggcagcgccggcacaacagattacgccgattctgtgaagggcagattcaccatcagccgggacaacagcaagaaaaccctgtacctccagatgaacagcctgcgcgtggaagataccgccgtgtactactgtgccgatggcagaggccccttcttcgattatcgcggccagggcacactggtcaccgtttcttctacgcgtgggagcggcatccagaaccctgatcctgccgtgtaccagctgcgggatagcaagagcagcgacaagagcgtgtgtctgttcaccgacttcgacagccagaccaacgtgtcccagagcaaggactccgacgtgtacatcaccgataagaccgtgctggacatgcggagcatggacttcaagagcaactccgccgtggcctggtccaacaagtccgatttcgcctgcgccaacgccttcaacaacagcattatccccgaggacacattcttcccaagcagcgacgtgccctgcgacgtgaagctggtggaaaagagcttcgagacagacaccaacctgaacttccagaacctgagcgtgatcggcttcagaatcctgctgctgaaagtggccggctttaacctgctgatgaccctgcggctgtggtccagccgcgccaagagaagcggatctggcgtgaagcagaccctgaatttcgacctgctgaagctggctggcgacgtggaatccaacccaggcccttctagaggccatatgaccgagtacaagcccacggtgcgcctcgccacccgcgacgacgtccccagggccgtacgcaccctcgccgccgcgttcgccgactaccccgccacgcgccacaccgtcgatccggaccgccacatcgagcgggtcaccgagctgcaagaactcttcctcacgcgcgtcgggctcgacatcggcaaggtgtgggtcgcggacgacggcgccgcggtggcggtctggaccacgccggagagcgtcgaagcgggggcggtgttcgccgagatcggcccgcgcatggccgagttgagcggttcccggctggccgcgcagcaacagatggaaggcctcctggcgccgcaccggcccaaggagcccgcgtggttcctggccaccgtcggcgtctcgcccgaccaccagggcaagggtctgggcagcgccgtcgtgctccccggagtggaggcggccgagcgcgccggggtgcccgccttcctggagacctccgcgccccgcaacctccccttctacgagcggctcggcttcaccgtcaccgccgacgtcgaggtgcccgaaggaccgcgcacctggtgcatgacccgcaagcccggtgcctga

SEQ ID NO: 7245 - DNA, 2028 bp, Artificial Sequence
  Synthetic Polynucloetide
atggccttaccagtgaccgccttgctcctgccgctggccttgctgctccacgccgccaggccgcaggtgcagctggttgaatctggcggaggactggttcagcctggcggatctctgagactgtcttgtgccgccagcggcttcaccttcaccaatcacgccatgagctgggtccgacaggcccctggaaaaggactggaactggtgtctagcatcagcggcaacggcagaaccacctactacgccgatagcgtgaagggcagattcaccatcagccgggacatcagcaagaacaccctggacctccagatgaacagcctgagagccgaggataccgccgtgtactactgtgccaaggatggcggagagacactggtggatagcagaggccagggcacactggtcacagtgtcatctctcgagagcggcggaggcggatctttcgaagtgcaggttttggagtctggcggaggactggttcagcctggcggatctctgagactgtcttgtgccgccagcggcttcaccttcagcaactttgccatgagctgggtccgacaggcccctggcaaaggacttgaatgggtgtccacaatcagcggcagcgccggcacaacagattacgccgattctgtgaagggcagattcaccatcagccgggacaacagcaagaaaaccctgtacctccagatgaacagcctgcgcgtggaagataccgccgtgtactactgtgccgatggcagaggccccttcttcgattatcgcggccagggcacactggtcaccgtttcttctctcgaggacctgaagaacgtgttcccacctgaggtggccgtgttcgagcctagcaaggccgagatcgcccacacccagaaagccaccctcgtgtgcctggctaccggcttctaccccgaccatgtggaactgtcttggtgggtcaacggcaaagaggtgcacagcggcgtgtctaccgacccccagccactgaaagaacagcccgccctgaacgacagccggtactgcctgagcagcagactgagagtgtccgccaccttctggcagaacccccggaaccacttcagatgccaggtgcagttctacggcctgagcgagaacgacgagtggacccaggacagagccaagcccgtgacccagatcgtgtctgccgaagcctggggcagagccgattgcggcatcaccagcgccagctaccaccagggcgtgctgagcgccaccatcctgtacgagatcctgctgggcaaggccaccctgtacgccgtgctggtgtctgccctggtgctgatggctatggtcaagcggaaggacagccggggaagggccaagcgatctggatctggagcaacaaacttctcactactcaaacaagcaggtgacgtggaggagaatcccgggcctactagaggccatatgaccgagtacaagcccacggtgcgcctcgccacccgcgacgacgtccccagggccgtacgcaccctcgccgccgcgttcgccgactaccccgccacgcgccacaccgtcgatccggaccgccacatcgagcgggtcaccgagctgcaagaactcttcctcacgcgcgtcgggctcgacatcggcaaggtgtgggtcgcggacgacggcgccgcggtggcggtctggaccacgccggagagcgtcgaagcgggggcggtgttcgccgagatcggcccgcgcatggccgagttgagcggttcccggctggccgcgcagcaacagatggaaggcctcctggcgccgcaccggcccaaggagcccgcgtggttcctggccaccgtcggcgtctcgcccgaccaccagggcaagggtctgggcagcgccgtcgtgctccccggagtggaggcggccgagcgcgccggggtgcccgccttcctggagacctccgcgccccgcaacctccccttctacgagcggctcggcttcaccgtcaccgccgacgtcgaggtgcccgaaggaccgcgcacctggtgcatgacccgcaagcccggtgcctga

SEQ ID NO: 7246 - DNA, 2097 bp, Artificial Sequence
  Synthetic Polynucloetide
atggccttaccagtgaccgccttgctcctgccgctggccttgctgctccacgccgccaggccgcaggtgcagctggttgaatctggcggaggactggttcagcctggcggatctctgagactgtcttgtgccgccagcggcttcaccttcaccaatcacgccatgagctgggtccgacaggcccctggaaaaggactggaactggtgtctagcatcagcggcaacggcagaaccacctactacgccgatagcgtgaagggcagattcaccatcagccgggacatcagcaagaacaccctggacctccagatgaacagcctgagagccgaggataccgccgtgtactactgtgccaaggatggcggagagacactggtggatagcagaggccagggcacactggtcacagtgtcatctctcgagagcggcggaggcggatctttcgaagtgcaggttttggagtctggcggaggactggttcagcctggcggatctctgagactgtcttgtgccgccagcggcttcaccttcagcaactttgccatgagctgggtccgacaggcccctggcaaaggacttgaatgggtgtccacaatcagcggcagcgccggcacaacagattacgccgattctgtgaagggcagattcaccatcagccgggacaacagcaagaaaaccctgtacctccagatgaacagcctgcgcgtggaagataccgccgtgtactactgtgccgatggcagaggccccttcttcgattatcgcggccagggcacactggtcaccgtttcttctacgcgtgggtctggaggcggaggcagcggcggaggcgggagcggcgacggtaacgaggagatgggaggaatcactcaaaccccttacaaagtctcaatttcaggaacaactgttatccttacatgtccccagtatcctggcagcgagatcctttggcagcataacgacaagaatatagggggagatgaagacgataagaatatcggatctgacgaggatcacttgagcctgaaagagttctccgagcttgaacaaagcggatattatgtgtgctatccgcgcgggtcaaagccggaagacgctaacttttacctttatctccgagccagagtgtgcgaaaattgcatggaaatggacgttatgtccgttgctacaatagttatcgtagatatatgcatcacgggtggactgcttctgctggtttattattggtccaagaatagaaaggccaaagctaaacccgtgaccagaggcgctggcgcaggcggaaggcaaaggggacaaaacaaagaacggccaccaccagtgccaaatccagattatgagcctattcggaaaggacagagggacctgtactctggcctgaatcagagaagaatccgcgccaagagaagcggatctggcgtgaagcagaccctgaatttcgacctgctgaagctggctggcgacgtggaatccaacccaggcccttctagaggccatatgaccgagtacaagcccacggtgcgcctcgccacccgcgacgacgtccccagggccgtacgcaccctcgccgccgcgttcgccgactaccccgccacgcgccacaccgtcgatccggaccgccacatcgagcgggtcaccgagctgcaagaactcttcctcacgcgcgtcgggctcgacatcggcaaggtgtgggtcgcggacgacggcgccgcggtggcggtctggaccacgccggagagcgtcgaagcgggggcggtgttcgccgagatcggcccgcgcatggccgagttgagcggttcccggctggccgcgcagcaacagatggaaggcctcctggcgccgcaccggcccaaggagcccgcgtggttcctggccaccgtcggcgtctcgcccgaccaccagggcaagggtctgggcagcgccgtcgtgctccccggagtggaggcggccgagcgcgccggggtgcccgccttcctggagacctccgcgccccgcaacctccccttctacgagcggctcggcttcaccgtcaccgccgacgtcgaggtgcccgaaggaccgcgcacctggtgcatgacccgcaagcccggtgcctga

SEQ ID NO: 7247 - DNA, 1992 bp, Artificial Sequence
  Synthetic Polynucloetide
atggccttaccagtgaccgccttgctcctgccgctggccttgctgctccacgccgccaggccgcaggtgcagctggttgaatctggcggaggactggttcagcctggcggatctctgagactgtcttgtgccgccagcggcttcaccttcaccaatcacgccatgagctgggtccgacaggcccctggaaaaggactggaactggtgtctagcatcagcggcaacggcagaaccacctactacgccgatagcgtgaagggcagattcaccatcagccgggacatcagcaagaacaccctggacctccagatgaacagcctgagagccgaggataccgccgtgtactactgtgccaaggatggcggagagacactggtggatagcagaggccagggcacactggtcacagtgtcatctctcgagagcggcggaggcggatctttcgaagtgcaggttttggagtctggcggaggactggttcagcctggcggatctctgagactgtcttgtgccgccagcggcttcaccttcagcaactttgccatgagctgggtccgacaggcccctggcaaaggacttgaatgggtgtccacaatcagcggcagcgccggcacaacagattacgccgattctgtgaagggcagattcaccatcagccgggacaacagcaagaaaaccctgtacctccagatgaacagcctgcgcgtggaagataccgccgtgtactactgtgccgatggcagaggccccttcttcgattatcgcggccagggcacactggtcaccgtttcttctacgcgtgggtctggaggcggaggcagcggcggaggcgggagcggcttcaagatccccatcgaggaactggaagatcgggtgttcgtgaactgcaacacctctatcacctgggtggaaggcaccgtgggaacactgctgagcgacatcaccagactggacctcggcaagcggattctggaccctcggggcatctacagatgcaacggcaccgacatctacaaggacaaagaaagcaccgtgcaggtccactacagaatgtgccagtcctgcgtggaactggaccctgctacagtggccggcatcatcgtgaccgatgtgatcgctactctgctgctggctctgggagtgttctgcttcgccggacacgaaacaggcagactgtctggcgctgccgatacacaggccctgctgagaaacgaccaagtgtatcagcccctgcgcgacagagatgatgcccagtattctcacctcggcggcaactgggctagaaacaagcgcgccaagagaagcggatctggcgtgaagcagaccctgaatttcgacctgctgaagctggctggcgacgtggaatccaacccaggcccttctagaggccatatgaccgagtacaagcccacggtgcgcctcgccacccgcgacgacgtccccagggccgtacgcaccctcgccgccgcgttcgccgactaccccgccacgcgccacaccgtcgatccggaccgccacatcgagcgggtcaccgagctgcaagaactcttcctcacgcgcgtcgggctcgacatcggcaaggtgtgggtcgcggacgacggcgccgcggtggcggtctggaccacgccggagagcgtcgaagcgggggcggtgttcgccgagatcggcccgcgcatggccgagttgagcggttcccggctggccgcgcagcaacagatggaaggcctcctggcgccgcaccggcccaaggagcccgcgtggttcctggccaccgtcggcgtctcgcccgaccaccagggcaagggtctgggcagcgccgtcgtgctccccggagtggaggcggccgagcgcgccggggtgcccgccttcctggagacctccgcgccccgcaacctccccttctacgagcggctcggcttcaccgtcaccgccgacgtcgaggtgcccgaaggaccgcgcacctggtgcatgacccgcaagcccggtgcctga

SEQ ID NO: 7248 - DNA, 2022 bp, Artificial Sequence
  Synthetic Polynucloetide
atggccttaccagtgaccgccttgctcctgccgctggccttgctgctccacgccgccaggccgcaggtgcagctggttgaatctggcggaggactggttcagcctggcggatctctgagactgtcttgtgccgccagcggcttcaccttcaccaatcacgccatgagctgggtccgacaggcccctggaaaaggactggaactggtgtctagcatcagcggcaacggcagaaccacctactacgccgatagcgtgaagggcagattcaccatcagccgggacatcagcaagaacaccctggacctccagatgaacagcctgagagccgaggataccgccgtgtactactgtgccaaggatggcggagagacactggtggatagcagaggccagggcacactggtcacagtgtcatctctcgagagcggcggaggcggatctttcgaagtgcaggttttggagtctggcggaggactggttcagcctggcggatctctgagactgtcttgtgccgccagcggcttcaccttcagcaactttgccatgagctgggtccgacaggcccctggcaaaggacttgaatgggtgtccacaatcagcggcagcgccggcacaacagattacgccgattctgtgaagggcagattcaccatcagccgggacaacagcaagaaaaccctgtacctccagatgaacagcctgcgcgtggaagataccgccgtgtactactgtgccgatggcagaggccccttcttcgattatcgcggccagggcacactggtcaccgtttcttctacgcgtgggtctggaggcggaggcagcggcggaggcgggagcggccagagcatcaagggcaaccacctggtcaaggtgtacgactaccaagaggacggcagcgtgctgctgacatgtgatgccgaggccaagaacatcacctggtttaaggacggcaagatgatcggcttcctgaccgaggacaagaagaagtggaacctgggcagcaacgctaaggaccccagaggcatgtatcagtgcaagggcagccagaacaagagcaagcccctccaggtgtactaccggatgtgccagaactgcatcgagctgaacgccgctaccatcagcggctttctgttcgccgagatcgtgtccatcttcgtgctggccgtgggcgtgtactttatcgctggacaggatggcgtgcggcagagcagagcttccgataagcaaaccctgctgcctaacgaccagctgtaccagcctctgaaggacagagaggacgaccagtacagccacctccagggcaatcagctgagaagaaaccgcgccaagagaagcggatctggcgtgaagcagaccctgaatttcgacctgctgaagctggctggcgacgtggaatccaacccaggcccttctagaggccatatgaccgagtacaagcccacggtgcgcctcgccacccgcgacgacgtccccagggccgtacgcaccctcgccgccgcgttcgccgactaccccgccacgcgccacaccgtcgatccggaccgccacatcgagcgggtcaccgagctgcaagaactcttcctcacgcgcgtcgggctcgacatcggcaaggtgtgggtcgcggacgacggcgccgcggtggcggtctggaccacgccggagagcgtcgaagcgggggcggtgttcgccgagatcggcccgcgcatggccgagttgagcggttcccggctggccgcgcagcaacagatggaaggcctcctggcgccgcaccggcccaaggagcccgcgtggttcctggccaccgtcggcgtctcgcccgaccaccagggcaagggtctgggcagcgccgtcgtgctccccggagtggaggcggccgagcgcgccggggtgcccgccttcctggagacctccgcgccccgcaacctccccttctacgagcggctcggcttcaccgtcaccgccgacgtcgaggtgcccgaaggaccgcgcacctggtgcatgacccgcaagcccggtgcctga

SEQ ID NO: 7249 - DNA, 1971 bp, Artificial Sequence
  Synthetic Polynucloetide
atggccttaccagtgaccgccttgctcctgccgctggccttgctgctccacgccgccaggccgcaggtgcagctggttgaatctggcggaggactggttcagcctggcggatctctgagactgtcttgtgccgccagcggcttcaccttcaccaatcacgccatgagctgggtccgacaggcccctggaaaaggactggaactggtgtctagcatcagcggcaacggcagaaccacctactacgccgatagcgtgaagggcagattcaccatcagccgggacatcagcaagaacaccctggacctccagatgaacagcctgagagccgaggataccgccgtgtactactgtgccaaggatggcggagagacactggtggatagcagaggccagggcacactggtcacagtgtcatctctcgagagcggcggaggcggatctttcgaagtgcaggttttggagtctggcggaggactggttcagcctggcggatctctgagactgtcttgtgccgccagcggcttcaccttcagcaactttgccatgagctgggtccgacaggcccctggcaaaggacttgaatgggtgtccacaatcagcggcagcgccggcacaacagattacgccgattctgtgaagggcagattcaccatcagccgggacaacagcaagaaaaccctgtacctccagatgaacagcctgcgcgtggaagataccgccgtgtactactgtgccgatggcagaggccccttcttcgattatcgcggccagggcacactggtcaccgtttcttctacgcgtgggtctggaggcggaggcagcggcggaggcgggagcggccagagttttgggttgttggaccctaaattgtgctatctgttggacggaatcctgttcatttacggagtgatcctgaccgcattgttcctgcgggttaagttttccagatccgcagacgcacccgcttaccaacaagggcagaaccaactctacaatgaacttaatttggggcggagggaagagtacgacgttctggacaaaaggaggggacgagatcccgagatgggcggaaagcctcagcgaaggaagaatccgcaagaggggctttataacgaactccagaaagataaaatggcagaagcctatagtgagattgggatgaagggagaaaggaggaggggtaaaggtcacgatgggttgtaccaaggattgagcacagccactaaagatacctatgatgcgctccacatgcaggccctgccgccaagacgcgccaagagaagcggatctggcgtgaagcagaccctgaatttcgacctgctgaagctggctggcgacgtggaatccaacccaggcccttctagaggccatatgaccgagtacaagcccacggtgcgcctcgccacccgcgacgacgtccccagggccgtacgcaccctcgccgccgcgttcgccgactaccccgccacgcgccacaccgtcgatccggaccgccacatcgagcgggtcaccgagctgcaagaactcttcctcacgcgcgtcgggctcgacatcggcaaggtgtgggtcgcggacgacggcgccgcggtggcggtctggaccacgccggagagcgtcgaagcgggggcggtgttcgccgagatcggcccgcgcatggccgagttgagcggttcccggctggccgcgcagcaacagatggaaggcctcctggcgccgcaccggcccaaggagcccgcgtggttcctggccaccgtcggcgtctcgcccgaccaccagggcaagggtctgggcagcgccgtcgtgctccccggagtggaggcggccgagcgcgccggggtgcccgccttcctggagacctccgcgccccgcaacctccccttctacgagcggctcggcttcaccgtcaccgccgacgtcgaggtgcccgaaggaccgcgcacctggtgcatgacccgcaagcccggtgcctga

SEQ ID NO: 7250 - DNA, 2595 bp, Artificial Sequence
  Synthetic Polynucloetide
atggccttaccagtgaccgccttgctcctgccgctggccttgctgctccacgccgccaggccgcaggtgcagctggttgaatctggcggaggactggttcagcctggcggatctctgagactgtcttgtgccgccagcggcttcaccttcaccaatcacgccatgagctgggtccgacaggcccctggaaaaggactggaactggtgtctagcatcagcggcaacggcagaaccacctactacgccgatagcgtgaagggcagattcaccatcagccgggacatcagcaagaacaccctggacctccagatgaacagcctgagagccgaggataccgccgtgtactactgtgccaaggatggcggagagacactggtggatagcagaggccagggcacactggtcacagtgtcatctctcgagggacagcctaaggccaatcctaccgtgacactgttccctccaagcagcgaagaactccaggccaacaaggccacacttgtgtgcctgatctccgacttctaccctggggctgtgacagtggcttggaaggccgatggatctcctgtgaaagccggcgtggaaaccaccaagccatccaagcagagcaacaacaaatacgccgccagctcctacctgagcctgacacctgagcagtggaagtcccacagatcctacagctgccaagtgacccacgaaggcagcaccgtggaaaagacagtggcccctacagagtgcagcggcagagccgattgcggctttaccagcgagagctaccagcagggcgtgctgagcgccaccatcctgtacgagatcctgctgggcaaggccaccctgtacgccgtgctggtgtctgccctggtgctgatggctatggtcaagcggaaggacagccggggaagggccaagcgatctggatctggagcaacaaacttctcactactcaaacaagcaggtgacgtggaggagaatcccgggcctactagtatggactggatttggcgcatccttttccttgtcggcgctgctaccggcgcgcattccttcgaagtgcaggttttggagtctggcggaggactggttcagcctggcggatctctgagactgtcttgtgccgccagcggcttcaccttcagcaactttgccatgagctgggtccgacaggcccctggcaaaggacttgaatgggtgtccacaatcagcggcagcgccggcacaacagattacgccgattctgtgaagggcagattcaccatcagccgggacaacagcaagaaaaccctgtacctccagatgaacagcctgcgcgtggaagataccgccgtgtactactgtgccgatggcagaggccccttcttcgattatcgcggccagggcacactggtcaccgtttcttctacgcgtgcctctacaaagggaccctccgtgtttcctctggctcccagcagcaagtctacaagcggaggaacagccgctctgggctgcctggtcaaggattactttcccgagcctgtgaccgtgtcctggaatagcggagcactgacaagcggcgtgcacacctttccagccgtgctgcaaagcagcggcctgtactctctgagcagcgtggtcacagtgcctagctctagcctgggcacccagacctacatctgcaatgtgaaccacaagcctagcaacaccaaggtggacaagagagtggaacccaagagctgtatccccgaggacacattcttcccaagccccgagagcagctgcgacgtgaagctggtggaaaagagcttcgagacagacaccaacctgaacttccagaacctgagcgtgatcggcttcagaatcctgctgctgaaagtggccggctttaacctgctgatgaccctgcggctgtggtccagccgcgccaagagaagcggatctggcgtgaagcagaccctgaatttcgacctgctgaagctggctggcgacgtggaatccaacccaggcccttctagaggccatatgaccgagtacaagcccacggtgcgcctcgccacccgcgacgacgtccccagggccgtacgcaccctcgccgccgcgttcgccgactaccccgccacgcgccacaccgtcgatccggaccgccacatcgagcgggtcaccgagctgcaagaactcttcctcacgcgcgtcgggctcgacatcggcaaggtgtgggtcgcggacgacggcgccgcggtggcggtctggaccacgccggagagcgtcgaagcgggggcggtgttcgccgagatcggcccgcgcatggccgagttgagcggttcccggctggccgcgcagcaacagatggaaggcctcctggcgccgcaccggcccaaggagcccgcgtggttcctggccaccgtcggcgtctcgcccgaccaccagggcaagggtctgggcagcgccgtcgtgctccccggagtggaggcggccgagcgcgccggggtgcccgccttcctggagacctccgcgccccgcaacctccccttctacgagcggctcggcttcaccgtcaccgccgacgtcgaggtgcccgaaggaccgcgcacctggtgcatgacccgcaagcccggtgcctga

SEQ ID NO: 7251 - DNA, 1893 bp, Artificial Sequence; identical to SEQ ID NO: 7224
  Synthetic Polynucloetide

SEQ ID NO: 7252 - DNA, 1980 bp, Artificial Sequence
  Synthetic Polynucloetide
atggccttaccagtgaccgccttgctcctgccgctggccttgctgctccacgccgccaggccgcaggtgcagctggttgaatctggcggaggactggttcagcctggcggatctctgagactgtcttgtgccgccagcggcttcaccttcaccaatcacgccatgagctgggtccgacaggcccctggaaaaggactggaactggtgtctagcatcagcggcaacggcagaaccacctactacgccgatagcgtgaagggcagattcaccatcagccgggacatcagcaagaacaccctggacctccagatgaacagcctgagagccgaggataccgccgtgtactactgtgccaaggatggcggagagacactggtggatagcagaggccagggcacactggtcacagtgtcatctctcgagggatctggcagagccgattgcggctttaccagcgagagctaccagcagggcgtgctgagcgccaccatcctgtacgagatcctgctgggcaaggccaccctgtacgccgtgctggtgtctgccctggtgctgatggctatggtcaagcggaaggacagccggggaagggccaagcgatctggatctggagcaacaaacttctcactactcaaacaagcaggtgacgtggaggagaatcccgggcctactagtatggactggatttggcgcatccttttccttgtcggcgctgctaccggcgcgcattccttcgaagtgcaggttttggagtctggcggaggactggttcagcctggcggatctctgagactgtcttgtgccgccagcggcttcaccttcagcaactttgccatgagctgggtccgacaggcccctggcaaaggacttgaatgggtgtccacaatcagcggcagcgccggcacaacagattacgccgattctgtgaagggcagattcaccatcagccgggacaacagcaagaaaaccctgtacctccagatgaacagcctgcgcgtggaagataccgccgtgtactactgtgccgatggcagaggccccttcttcgattatcgcggccagggcacactggtcaccgtttcttctacgcgtggcagcatccccgaggacacattcttcccaagccccgagagcagctgcgacgtgaagctggtggaaaagagcttcgagacagacaccaacctgaacttccagaacctgagcgtgatcggcttcagaatcctgctgctgaaagtggccggctttaacctgctgatgaccctgcggctgtggtccagccgcgccaagagaagcggatctggcgtgaagcagaccctgaatttcgacctgctgaagctggctggcgacgtggaatccaacccaggcccttctagaggccatatgaccgagtacaagcccacggtgcgcctcgccacccgcgacgacgtccccagggccgtacgcaccctcgccgccgcgttcgccgactaccccgccacgcgccacaccgtcgatccggaccgccacatcgagcgggtcaccgagctgcaagaactcttcctcacgcgcgtcgggctcgacatcggcaaggtgtgggtcgcggacgacggcgccgcggtggcggtctggaccacgccggagagcgtcgaagcgggggcggtgttcgccgagatcggcccgcgcatggccgagttgagcggttcccggctggccgcgcagcaacagatggaaggcctcctggcgccgcaccggcccaaggagcccgcgtggttcctggccaccgtcggcgtctcgcccgaccaccagggcaagggtctgggcagcgccgtcgtgctccccggagtggaggcggccgagcgcgccggggtgcccgccttcctggagacctccgcgccccgcaacctccccttctacgagcggctcggcttcaccgtcaccgccgacgtcgaggtgcccgaaggaccgcgcacctggtgcatgacccgcaagcccggtgcctga

SEQ ID NO: 7253 - DNA, 1278 bp, Artificial Sequence
  Synthetic Polynucloetide
atggccttaccagtgaccgccttgctcctgccgctggccttgctgctccacgccgccaggccgcaggtgcagctggttgaatctggcggaggactggttcagcctggcggatctctgagactgtcttgtgccgccagcggcttcaccttcaccaatcacgccatgagctgggtccgacaggcccctggaaaaggactggaactggtgtctagcatcagcggcaacggcagaaccacctactacgccgatagcgtgaagggcagattcaccatcagccgggacatcagcaagaacaccctggacctccagatgaacagcctgagagccgaggataccgccgtgtactactgtgccaaggatggcggagagacactggtggatagcagaggccagggcacactggtcacagtgtcatctctcgagggatctggcagagccgattgcggctttaccagcgagagctaccagcagggcgtgctgagcgccaccatcctgtacgagatcctgctgggcaaggccaccctgtacgccgtgctggtgtctgccctggtgctgatggctatggtcaagcggaaggacagccggggaagggccaagcgatctggatctggagcaacaaacttctcactactcaaacaagcaggtgacgtggaggagaatcccgggcctactagtatggactggatttggcgcatccttttccttgtcggcgctgctaccggcgcgcattccttcgaagtgcaggttttggagtctggcggaggactggttcagcctggcggatctctgagactgtcttgtgccgccagcggcttcaccttcagcaactttgccatgagctgggtccgacaggcccctggcaaaggacttgaatgggtgtccacaatcagcggcagcgccggcacaacagattacgccgattctgtgaagggcagattcaccatcagccgggacaacagcaagaaaaccctgtacctccagatgaacagcctgcgcgtggaagataccgccgtgtactactgtgccgatggcagaggccccttcttcgattatcgcggccagggcacactggtcaccgtttcttctacgcgtggcagcatccccgaggacacattcttcccaagccccgagagcagctgcgacgtgaagctggtggaaaagagcttcgagacagacaccaacctgaacttccagaacctgagcgtgatcggcttcagaatcctgctgctgaaagtggccggctttaacctgctgatgaccctgcggctgtggtccagc

SEQ ID NO: 7254 - DNA, 2007 bp, Artificial Sequence
  Synthetic Polynucloetide
atggccttaccagtgaccgccttgctcctgccgctggccttgctgctccacgccgccaggccgcaggtgcagctggttgaatctggcggaggactggttcagcctggcggatctctgagactgtcttgtgccgccagcggcttcaccttcaccaatcacgccatgagctgggtccgacaggcccctggaaaaggactggaactggtgtctagcatcagcggcaacggcagaaccacctactacgccgatagcgtgaagggcagattcaccatcagccgggacatcagcaagaacaccctggacctccagatgaacagcctgagagccgaggataccgccgtgtactactgtgccaaggatggcggagagacactggtggatagcagaggccagggcacactggtcacagtgtcatctctcgaggacaaaactcacacatgcccaccgtgcccagcaggcagagccgattgcggctttaccagcgagagctaccagcagggcgtgctgagcgccaccatcctgtacgagatcctgctgggcaaggccaccctgtacgccgtgctggtgtctgccctggtgctgatggctatggtcaagcggaaggacagccggggaagggccaagcgatctggatctggagcaacaaacttctcactactcaaacaagcaggtgacgtggaggagaatcccgggcctactagtatggactggatttggcgcatccttttccttgtcggcgctgctaccggcgcgcattccttcgaagtgcaggttttggagtctggcggaggactggttcagcctggcggatctctgagactgtcttgtgccgccagcggcttcaccttcagcaactttgccatgagctgggtccgacaggcccctggcaaaggacttgaatgggtgtccacaatcagcggcagcgccggcacaacagattacgccgattctgtgaagggcagattcaccatcagccgggacaacagcaagaaaaccctgtacctccagatgaacagcctgcgcgtggaagataccgccgtgtactactgtgccgatggcagaggccccttcttcgattatcgcggccagggcacactggtcaccgtttcttctacgcgtggcagcatccccgaggacacattcttcccaagccccgagagcagctgcgacgtgaagctggtggaaaagagcttcgagacagacaccaacctgaacttccagaacctgagcgtgatcggcttcagaatcctgctgctgaaagtggccggctttaacctgctgatgaccctgcggctgtggtccagccgcgccaagagaagcggatctggcgtgaagcagaccctgaatttcgacctgctgaagctggctggcgacgtggaatccaacccaggcccttctagaggccatatgaccgagtacaagcccacggtgcgcctcgccacccgcgacgacgtccccagggccgtacgcaccctcgccgccgcgttcgccgactaccccgccacgcgccacaccgtcgatccggaccgccacatcgagcgggtcaccgagctgcaagaactcttcctcacgcgcgtcgggctcgacatcggcaaggtgtgggtcgcggacgacggcgccgcggtggcggtctggaccacgccggagagcgtcgaagcgggggcggtgttcgccgagatcggcccgcgcatggccgagttgagcggttcccggctggccgcgcagcaacagatggaaggcctcctggcgccgcaccggcccaaggagcccgcgtggttcctggccaccgtcggcgtctcgcccgaccaccagggcaagggtctgggcagcgccgtcgtgctccccggagtggaggcggccgagcgcgccggggtgcccgccttcctggagacctccgcgccccgcaacctccccttctacgagcggctcggcttcaccgtcaccgccgacgtcgaggtgcccgaaggaccgcgcacctggtgcatgacccgcaagcccggtgcctga

SEQ ID NO: 7255 - DNA, 2007 bp, Artificial Sequence
  Synthetic Polynucloetide
atggccttaccagtgaccgccttgctcctgccgctggccttgctgctccacgccgccaggccgcaggtgcagctggttgaatctggcggaggactggttcagcctggcggatctctgagactgtcttgtgccgccagcggcttcaccttcaccaatcacgccatgagctgggtccgacaggcccctggaaaaggactggaactggtgtctagcatcagcggcaacggcagaaccacctactacgccgatagcgtgaagggcagattcaccatcagccgggacatcagcaagaacaccctggacctccagatgaacagcctgagagccgaggataccgccgtgtactactgtgccaaggatggcggagagacactggtggatagcagaggccagggcacactggtcacagtgtcatctctcgagggatctggcagagccgattgcggctttaccagcgagagctaccagcagggcgtgctgagcgccaccatcctgtacgagatcctgctgggcaaggccaccctgtacgccgtgctggtgtctgccctggtgctgatggctatggtcaagcggaaggacagccggggaagggccaagcgatctggatctggagcaacaaacttctcactactcaaacaagcaggtgacgtggaggagaatcccgggcctactagtatggactggatttggcgcatccttttccttgtcggcgctgctaccggcgcgcattccttcgaagtgcaggttttggagtctggcggaggactggttcagcctggcggatctctgagactgtcttgtgccgccagcggcttcaccttcagcaactttgccatgagctgggtccgacaggcccctggcaaaggacttgaatgggtgtccacaatcagcggcagcgccggcacaacagattacgccgattctgtgaagggcagattcaccatcagccgggacaacagcaagaaaaccctgtacctccagatgaacagcctgcgcgtggaagataccgccgtgtactactgtgccgatggcagaggccccttcttcgattatcgcggccagggcacactggtcaccgtttcttctacgcgtgataaaactcatacctgtccgccatgcccggcaatccccgaggacacattcttcccaagccccgagagcagctgcgacgtgaagctggtggaaaagagcttcgagacagacaccaacctgaacttccagaacctgagcgtgatcggcttcagaatcctgctgctgaaagtggccggctttaacctgctgatgaccctgcggctgtggtccagccgcgccaagagaagcggatctggcgtgaagcagaccctgaatttcgacctgctgaagctggctggcgacgtggaatccaacccaggcccttctagaggccatatgaccgagtacaagcccacggtgcgcctcgccacccgcgacgacgtccccagggccgtacgcaccctcgccgccgcgttcgccgactaccccgccacgcgccacaccgtcgatccggaccgccacatcgagcgggtcaccgagctgcaagaactcttcctcacgcgcgtcgggctcgacatcggcaaggtgtgggtcgcggacgacggcgccgcggtggcggtctggaccacgccggagagcgtcgaagcgggggcggtgttcgccgagatcggcccgcgcatggccgagttgagcggttcccggctggccgcgcagcaacagatggaaggcctcctggcgccgcaccggcccaaggagcccgcgtggttcctggccaccgtcggcgtctcgcccgaccaccagggcaagggtctgggcagcgccgtcgtgctccccggagtggaggcggccgagcgcgccggggtgcccgccttcctggagacctccgcgccccgcaacctccccttctacgagcggctcggcttcaccgtcaccgccgacgtcgaggtgcccgaaggaccgcgcacctggtgcatgacccgcaagcccggtgcctga

SEQ ID NO: 7256 - DNA, 2034 bp, Artificial Sequence
  Synthetic Polynucloetide
atggccttaccagtgaccgccttgctcctgccgctggccttgctgctccacgccgccaggccgcaggtgcagctggttgaatctggcggaggactggttcagcctggcggatctctgagactgtcttgtgccgccagcggcttcaccttcaccaatcacgccatgagctgggtccgacaggcccctggaaaaggactggaactggtgtctagcatcagcggcaacggcagaaccacctactacgccgatagcgtgaagggcagattcaccatcagccgggacatcagcaagaacaccctggacctccagatgaacagcctgagagccgaggataccgccgtgtactactgtgccaaggatggcggagagacactggtggatagcagaggccagggcacactggtcacagtgtcatctctcgaggacaaaactcacacatgcccaccgtgcccagcaggcagagccgattgcggctttaccagcgagagctaccagcagggcgtgctgagcgccaccatcctgtacgagatcctgctgggcaaggccaccctgtacgccgtgctggtgtctgccctggtgctgatggctatggtcaagcggaaggacagccggggaagggccaagcgatctggatctggagcaacaaacttctcactactcaaacaagcaggtgacgtggaggagaatcccgggcctactagtatggactggatttggcgcatccttttccttgtcggcgctgctaccggcgcgcattccttcgaagtgcaggttttggagtctggcggaggactggttcagcctggcggatctctgagactgtcttgtgccgccagcggcttcaccttcagcaactttgccatgagctgggtccgacaggcccctggcaaaggacttgaatgggtgtccacaatcagcggcagcgccggcacaacagattacgccgattctgtgaagggcagattcaccatcagccgggacaacagcaagaaaaccctgtacctccagatgaacagcctgcgcgtggaagataccgccgtgtactactgtgccgatggcagaggccccttcttcgattatcgcggccagggcacactggtcaccgtttcttctacgcgtgataaaactcatacctgtccgccatgcccggcaatccccgaggacacattcttcccaagccccgagagcagctgcgacgtgaagctggtggaaaagagcttcgagacagacaccaacctgaacttccagaacctgagcgtgatcggcttcagaatcctgctgctgaaagtggccggctttaacctgctgatgaccctgcggctgtggtccagccgcgccaagagaagcggatctggcgtgaagcagaccctgaatttcgacctgctgaagctggctggcgacgtggaatccaacccaggcccttctagaggccatatgaccgagtacaagcccacggtgcgcctcgccacccgcgacgacgtccccagggccgtacgcaccctcgccgccgcgttcgccgactaccccgccacgcgccacaccgtcgatccggaccgccacatcgagcgggtcaccgagctgcaagaactcttcctcacgcgcgtcgggctcgacatcggcaaggtgtgggtcgcggacgacggcgccgcggtggcggtctggaccacgccggagagcgtcgaagcgggggcggtgttcgccgagatcggcccgcgcatggccgagttgagcggttcccggctggccgcgcagcaacagatggaaggcctcctggcgccgcaccggcccaaggagcccgcgtggttcctggccaccgtcggcgtctcgcccgaccaccagggcaagggtctgggcagcgccgtcgtgctccccggagtggaggcggccgagcgcgccggggtgcccgccttcctggagacctccgcgccccgcaacctccccttctacgagcggctcggcttcaccgtcaccgccgacgtcgaggtgcccgaaggaccgcgcacctggtgcatgacccgcaagcccggtgcctga

SEQ ID NO: 7257 - DNA, 1332 bp, Artificial Sequence
  Synthetic Polynucloetide
atggccttaccagtgaccgccttgctcctgccgctggccttgctgctccacgccgccaggccgcaggtgcagctggttgaatctggcggaggactggttcagcctggcggatctctgagactgtcttgtgccgccagcggcttcaccttcaccaatcacgccatgagctgggtccgacaggcccctggaaaaggactggaactggtgtctagcatcagcggcaacggcagaaccacctactacgccgatagcgtgaagggcagattcaccatcagccgggacatcagcaagaacaccctggacctccagatgaacagcctgagagccgaggataccgccgtgtactactgtgccaaggatggcggagagacactggtggatagcagaggccagggcacactggtcacagtgtcatctctcgaggacaaaactcacacatgcccaccgtgcccagcaggcagagccgattgcggctttaccagcgagagctaccagcagggcgtgctgagcgccaccatcctgtacgagatcctgctgggcaaggccaccctgtacgccgtgctggtgtctgccctggtgctgatggctatggtcaagcggaaggacagccggggaagggccaagcgatctggatctggagcaacaaacttctcactactcaaacaagcaggtgacgtggaggagaatcccgggcctactagtatggactggatttggcgcatccttttccttgtcggcgctgctaccggcgcgcattccttcgaagtgcaggttttggagtctggcggaggactggttcagcctggcggatctctgagactgtcttgtgccgccagcggcttcaccttcagcaactttgccatgagctgggtccgacaggcccctggcaaaggacttgaatgggtgtccacaatcagcggcagcgccggcacaacagattacgccgattctgtgaagggcagattcaccatcagccgggacaacagcaagaaaaccctgtacctccagatgaacagcctgcgcgtggaagataccgccgtgtactactgtgccgatggcagaggccccttcttcgattatcgcggccagggcacactggtcaccgtttcttctacgcgtgataaaactcatacctgtccgccatgcccggcaatccccgaggacacattcttcccaagccccgagagcagctgcgacgtgaagctggtggaaaagagcttcgagacagacaccaacctgaacttccagaacctgagcgtgatcggcttcagaatcctgctgctgaaagtggccggctttaacctgctgatgaccctgcggctgtggtccagc

SEQ ID NO: 7258 - DNA, 1305 bp, Artificial Sequence
  Synthetic Polynucloetide
atggccttaccagtgaccgccttgctcctgccgctggccttgctgctccacgccgccaggccgcaggtgcagctggttgaatctggcggaggactggttcagcctggcggatctctgagactgtcttgtgccgccagcggcttcaccttcaccaatcacgccatgagctgggtccgacaggcccctggaaaaggactggaactggtgtctagcatcagcggcaacggcagaaccacctactacgccgatagcgtgaagggcagattcaccatcagccgggacatcagcaagaacaccctggacctccagatgaacagcctgagagccgaggataccgccgtgtactactgtgccaaggatggcggagagacactggtggatagcagaggccagggcacactggtcacagtgtcatctctcgagggatctggcagagccgattgcggctttaccagcgagagctaccagcagggcgtgctgagcgccaccatcctgtacgagatcctgctgggcaaggccaccctgtacgccgtgctggtgtctgccctggtgctgatggctatggtcaagcggaaggacagccggggaagggccaagcgatctggatctggagcaacaaacttctcactactcaaacaagcaggtgacgtggaggagaatcccgggcctactagtatggactggatttggcgcatccttttccttgtcggcgctgctaccggcgcgcattccttcgaagtgcaggttttggagtctggcggaggactggttcagcctggcggatctctgagactgtcttgtgccgccagcggcttcaccttcagcaactttgccatgagctgggtccgacaggcccctggcaaaggacttgaatgggtgtccacaatcagcggcagcgccggcacaacagattacgccgattctgtgaagggcagattcaccatcagccgggacaacagcaagaaaaccctgtacctccagatgaacagcctgcgcgtggaagataccgccgtgtactactgtgccgatggcagaggccccttcttcgattatcgcggccagggcacactggtcaccgtttcttctacgcgtgataaaactcatacctgtccgccatgcccggcaatccccgaggacacattcttcccaagccccgagagcagctgcgacgtgaagctggtggaaaagagcttcgagacagacaccaacctgaacttccagaacctgagcgtgatcggcttcagaatcctgctgctgaaagtggccggctttaacctgctgatgaccctgcggctgtggtccagc

SEQ ID NO: 7259 - DNA, 2661 bp, Artificial Sequence
  Synthetic Polynucloetide
atggccttaccagtgaccgccttgctcctgccgctggccttgctgctccacgccgccaggccgcaggtgcagctggttgaatctggcggaggactggttcagcctggcggatctctgagactgtcttgtgccgccagcggcttcaccttcaccaatcacgccatgagctgggtccgacaggcccctggaaaaggactggaactggtgtctagcatcagcggcaacggcagaaccacctactacgccgatagcgtgaagggcagattcaccatcagccgggacatcagcaagaacaccctggacctccagatgaacagcctgagagccgaggataccgccgtgtactactgtgccaaggatggcggagagacactggtggatagcagaggccagggcacactggtcacagtgtcatctctcgagggacagcctaaggccaatcctaccgtgacactgttccctccaagcagcgaagaactccaggccaacaaggccacacttgtgtgcctgatctccgacttctaccctggggctgtgacagtggcttggaaggccgatggatctcctgtgaaagccggcgtggaaaccaccaagccatccaagcagagcaacaacaaatacgccgccagctcctacctgagcctgacacctgagcagtggaagtcccacagatcctacagctgccaagtgacccacgaaggcagcaccgtggaaaagacagtggcccctacagagtgcagccccatcaagaccgatgtgattacaatggaccccaaggacaactgctccaaggacgccaacgataccctgctgctccagctgaccaacaccagcgcctactacatgtacttgttgctgctgctgaagtccgtggtgtacttcgccatcatcacatgctgcctgctgcggagaaccgccttctgctgcaacggcgagaagtctagggccaagcgatctggatctggagcaacaaacttctcactactcaaacaagcaggtgacgtggaggagaatcccgggcctactagtatggactggatttggcgcatccttttccttgtcggcgctgctaccggcgcgcattccttcgaagtgcaggttttggagtctggcggaggactggttcagcctggcggatctctgagactgtcttgtgccgccagcggcttcaccttcagcaactttgccatgagctgggtccgacaggcccctggcaaaggacttgaatgggtgtccacaatcagcggcagcgccggcacaacagattacgccgattctgtgaagggcagattcaccatcagccgggacaacagcaagaaaaccctgtacctccagatgaacagcctgcgcgtggaagataccgccgtgtactactgtgccgatggcagaggccccttcttcgattatcgcggccagggcacactggtcaccgtttcttctacgcgtgcctctacaaagggaccctccgtgtttcctctggctcccagcagcaagtctacaagcggaggaacagccgctctgggctgcctggtcaaggattactttcccgagcctgtgaccgtgtcctggaatagcggagcactgacaagcggcgtgcacacctttccagccgtgctgcaaagcagcggcctgtactctctgagcagcgtggtcacagtgcctagctctagcctgggcacccagacctacatctgcaatgtgaaccacaagcctagcaacaccaaggtggacaagagagtggaacccaagagctgtgaagtgaaaaccgactccaccgaccacgtgaagcccaaagagacagagaacaccaagcagcccagcaagagctgccacaagcccaaggccatcgtgcacaccgagaaagtgaacatgatgagcctgaccgtgctgggcctgcggatgctgttcgccaaaaccgtggccgtgaacttcctgctgaccgccaagctgttcttcctccgcgccaagagaagcggatctggcgtgaagcagaccctgaatttcgacctgctgaagctggctggcgacgtggaatccaacccaggcccttctagaggccatatgaccgagtacaagcccacggtgcgcctcgccacccgcgacgacgtccccagggccgtacgcaccctcgccgccgcgttcgccgactaccccgccacgcgccacaccgtcgatccggaccgccacatcgagcgggtcaccgagctgcaagaactcttcctcacgcgcgtcgggctcgacatcggcaaggtgtgggtcgcggacgacggcgccgcggtggcggtctggaccacgccggagagcgtcgaagcgggggcggtgttcgccgagatcggcccgcgcatggccgagttgagcggttcccggctggccgcgcagcaacagatggaaggcctcctggcgccgcaccggcccaaggagcccgcgtggttcctggccaccgtcggcgtctcgcccgaccaccagggcaagggtctgggcagcgccgtcgtgctccccggagtggaggcggccgagcgcgccggggtgcccgccttcctggagacctccgcgccccgcaacctccccttctacgagcggctcggcttcaccgtcaccgccgacgtcgaggtgcccgaaggaccgcgcacctggtgcatgacccgcaagcccggtgcctga

SEQ ID NO: 7260 - DNA, 1959 bp, Artificial Sequence; identical to SEQ ID NO: 7222
  Synthetic Polynucloetide

SEQ ID NO: 7261 - DNA, 2046 bp, Artificial Sequence
  Synthetic Polynucloetide
atggccttaccagtgaccgccttgctcctgccgctggccttgctgctccacgccgccaggccgcaggtgcagctggttgaatctggcggaggactggttcagcctggcggatctctgagactgtcttgtgccgccagcggcttcaccttcaccaatcacgccatgagctgggtccgacaggcccctggaaaaggactggaactggtgtctagcatcagcggcaacggcagaaccacctactacgccgatagcgtgaagggcagattcaccatcagccgggacatcagcaagaacaccctggacctccagatgaacagcctgagagccgaggataccgccgtgtactactgtgccaaggatggcggagagacactggtggatagcagaggccagggcacactggtcacagtgtcatctctcgagggatctcccatcaagaccgatgtgattacaatggaccccaaggacaactgctccaaggacgccaacgataccctgctgctccagctgaccaacaccagcgcctactacatgtacttgttgctgctgctgaagtccgtggtgtacttcgccatcatcacatgctgcctgctgcggagaaccgccttctgctgcaacggcgagaagtctagggccaagcgatctggatctggagcaacaaacttctcactactcaaacaagcaggtgacgtggaggagaatcccgggcctactagtatggactggatttggcgcatccttttccttgtcggcgctgctaccggcgcgcattccttcgaagtgcaggttttggagtctggcggaggactggttcagcctggcggatctctgagactgtcttgtgccgccagcggcttcaccttcagcaactttgccatgagctgggtccgacaggcccctggcaaaggacttgaatgggtgtccacaatcagcggcagcgccggcacaacagattacgccgattctgtgaagggcagattcaccatcagccgggacaacagcaagaaaaccctgtacctccagatgaacagcctgcgcgtggaagataccgccgtgtactactgtgccgatggcagaggccccttcttcgattatcgcggccagggcacactggtcaccgtttcttctacgcgtggcagcgaagtgaaaaccgactccaccgaccacgtgaagcccaaagagacagagaacaccaagcagcccagcaagagctgccacaagcccaaggccatcgtgcacaccgagaaagtgaacatgatgagcctgaccgtgctgggcctgcggatgctgttcgccaaaaccgtggccgtgaacttcctgctgaccgccaagctgttcttcctccgcgccaagagaagcggatctggcgtgaagcagaccctgaatttcgacctgctgaagctggctggcgacgtggaatccaacccaggcccttctagaggccatatgaccgagtacaagcccacggtgcgcctcgccacccgcgacgacgtccccagggccgtacgcaccctcgccgccgcgttcgccgactaccccgccacgcgccacaccgtcgatccggaccgccacatcgagcgggtcaccgagctgcaagaactcttcctcacgcgcgtcgggctcgacatcggcaaggtgtgggtcgcggacgacggcgccgcggtggcggtctggaccacgccggagagcgtcgaagcgggggcggtgttcgccgagatcggcccgcgcatggccgagttgagcggttcccggctggccgcgcagcaacagatggaaggcctcctggcgccgcaccggcccaaggagcccgcgtggttcctggccaccgtcggcgtctcgcccgaccaccagggcaagggtctgggcagcgccgtcgtgctccccggagtggaggcggccgagcgcgccggggtgcccgccttcctggagacctccgcgccccgcaacctccccttctacgagcggctcggcttcaccgtcaccgccgacgtcgaggtgcccgaaggaccgcgcacctggtgcatgacccgcaagcccggtgcctga

SEQ ID NO: 7262 - DNA, 1344 bp, Artificial Sequence
  Synthetic Polynucloetide
atggccttaccagtgaccgccttgctcctgccgctggccttgctgctccacgccgccaggccgcaggtgcagctggttgaatctggcggaggactggttcagcctggcggatctctgagactgtcttgtgccgccagcggcttcaccttcaccaatcacgccatgagctgggtccgacaggcccctggaaaaggactggaactggtgtctagcatcagcggcaacggcagaaccacctactacgccgatagcgtgaagggcagattcaccatcagccgggacatcagcaagaacaccctggacctccagatgaacagcctgagagccgaggataccgccgtgtactactgtgccaaggatggcggagagacactggtggatagcagaggccagggcacactggtcacagtgtcatctctcgagggatctcccatcaagaccgatgtgattacaatggaccccaaggacaactgctccaaggacgccaacgataccctgctgctccagctgaccaacaccagcgcctactacatgtacttgttgctgctgctgaagtccgtggtgtacttcgccatcatcacatgctgcctgctgcggagaaccgccttctgctgcaacggcgagaagtctagggccaagcgatctggatctggagcaacaaacttctcactactcaaacaagcaggtgacgtggaggagaatcccgggcctactagtatggactggatttggcgcatccttttccttgtcggcgctgctaccggcgcgcattccttcgaagtgcaggttttggagtctggcggaggactggttcagcctggcggatctctgagactgtcttgtgccgccagcggcttcaccttcagcaactttgccatgagctgggtccgacaggcccctggcaaaggacttgaatgggtgtccacaatcagcggcagcgccggcacaacagattacgccgattctgtgaagggcagattcaccatcagccgggacaacagcaagaaaaccctgtacctccagatgaacagcctgcgcgtggaagataccgccgtgtactactgtgccgatggcagaggccccttcttcgattatcgcggccagggcacactggtcaccgtttcttctacgcgtggcagcgaagtgaaaaccgactccaccgaccacgtgaagcccaaagagacagagaacaccaagcagcccagcaagagctgccacaagcccaaggccatcgtgcacaccgagaaagtgaacatgatgagcctgaccgtgctgggcctgcggatgctgttcgccaaaaccgtggccgtgaacttcctgctgaccgccaagctgttcttcctc

SEQ ID NO: 7263 - DNA, 2073 bp, Artificial Sequence
  Synthetic Polynucloetide
atggccttaccagtgaccgccttgctcctgccgctggccttgctgctccacgccgccaggccgcaggtgcagctggttgaatctggcggaggactggttcagcctggcggatctctgagactgtcttgtgccgccagcggcttcaccttcaccaatcacgccatgagctgggtccgacaggcccctggaaaaggactggaactggtgtctagcatcagcggcaacggcagaaccacctactacgccgatagcgtgaagggcagattcaccatcagccgggacatcagcaagaacaccctggacctccagatgaacagcctgagagccgaggataccgccgtgtactactgtgccaaggatggcggagagacactggtggatagcagaggccagggcacactggtcacagtgtcatctctcgaggacaaaactcacacatgcccaccgtgcccagcacccatcaagaccgatgtgattacaatggaccccaaggacaactgctccaaggacgccaacgataccctgctgctccagctgaccaacaccagcgcctactacatgtacttgttgctgctgctgaagtccgtggtgtacttcgccatcatcacatgctgcctgctgcggagaaccgccttctgctgcaacggcgagaagtctagggccaagcgatctggatctggagcaacaaacttctcactactcaaacaagcaggtgacgtggaggagaatcccgggcctactagtatggactggatttggcgcatccttttccttgtcggcgctgctaccggcgcgcattccttcgaagtgcaggttttggagtctggcggaggactggttcagcctggcggatctctgagactgtcttgtgccgccagcggcttcaccttcagcaactttgccatgagctgggtccgacaggcccctggcaaaggacttgaatgggtgtccacaatcagcggcagcgccggcacaacagattacgccgattctgtgaagggcagattcaccatcagccgggacaacagcaagaaaaccctgtacctccagatgaacagcctgcgcgtggaagataccgccgtgtactactgtgccgatggcagaggccccttcttcgattatcgcggccagggcacactggtcaccgtttcttctacgcgtggcagcgaagtgaaaaccgactccaccgaccacgtgaagcccaaagagacagagaacaccaagcagcccagcaagagctgccacaagcccaaggccatcgtgcacaccgagaaagtgaacatgatgagcctgaccgtgctgggcctgcggatgctgttcgccaaaaccgtggccgtgaacttcctgctgaccgccaagctgttcttcctccgcgccaagagaagcggatctggcgtgaagcagaccctgaatttcgacctgctgaagctggctggcgacgtggaatccaacccaggcccttctagaggccatatgaccgagtacaagcccacggtgcgcctcgccacccgcgacgacgtccccagggccgtacgcaccctcgccgccgcgttcgccgactaccccgccacgcgccacaccgtcgatccggaccgccacatcgagcgggtcaccgagctgcaagaactcttcctcacgcgcgtcgggctcgacatcggcaaggtgtgggtcgcggacgacggcgccgcggtggcggtctggaccacgccggagagcgtcgaagcgggggcggtgttcgccgagatcggcccgcgcatggccgagttgagcggttcccggctggccgcgcagcaacagatggaaggcctcctggcgccgcaccggcccaaggagcccgcgtggttcctggccaccgtcggcgtctcgcccgaccaccagggcaagggtctgggcagcgccgtcgtgctccccggagtggaggcggccgagcgcgccggggtgcccgccttcctggagacctccgcgccccgcaacctccccttctacgagcggctcggcttcaccgtcaccgccgacgtcgaggtgcccgaaggaccgcgcacctggtgcatgacccgcaagcccggtgcctga

SEQ ID NO: 7264 - DNA, 2073 bp, Artificial Sequence
  Synthetic Polynucloetide
atggccttaccagtgaccgccttgctcctgccgctggccttgctgctccacgccgccaggccgcaggtgcagctggttgaatctggcggaggactggttcagcctggcggatctctgagactgtcttgtgccgccagcggcttcaccttcaccaatcacgccatgagctgggtccgacaggcccctggaaaaggactggaactggtgtctagcatcagcggcaacggcagaaccacctactacgccgatagcgtgaagggcagattcaccatcagccgggacatcagcaagaacaccctggacctccagatgaacagcctgagagccgaggataccgccgtgtactactgtgccaaggatggcggagagacactggtggatagcagaggccagggcacactggtcacagtgtcatctctcgagggatctcccatcaagaccgatgtgattacaatggaccccaaggacaactgctccaaggacgccaacgataccctgctgctccagctgaccaacaccagcgcctactacatgtacttgttgctgctgctgaagtccgtggtgtacttcgccatcatcacatgctgcctgctgcggagaaccgccttctgctgcaacggcgagaagtctagggccaagcgatctggatctggagcaacaaacttctcactactcaaacaagcaggtgacgtggaggagaatcccgggcctactagtatggactggatttggcgcatccttttccttgtcggcgctgctaccggcgcgcattccttcgaagtgcaggttttggagtctggcggaggactggttcagcctggcggatctctgagactgtcttgtgccgccagcggcttcaccttcagcaactttgccatgagctgggtccgacaggcccctggcaaaggacttgaatgggtgtccacaatcagcggcagcgccggcacaacagattacgccgattctgtgaagggcagattcaccatcagccgggacaacagcaagaaaaccctgtacctccagatgaacagcctgcgcgtggaagataccgccgtgtactactgtgccgatggcagaggccccttcttcgattatcgcggccagggcacactggtcaccgtttcttctacgcgtgataaaactcatacctgtccgccatgcccggcagaagtgaaaaccgactccaccgaccacgtgaagcccaaagagacagagaacaccaagcagcccagcaagagctgccacaagcccaaggccatcgtgcacaccgagaaagtgaacatgatgagcctgaccgtgctgggcctgcggatgctgttcgccaaaaccgtggccgtgaacttcctgctgaccgccaagctgttcttcctccgcgccaagagaagcggatctggcgtgaagcagaccctgaatttcgacctgctgaagctggctggcgacgtggaatccaacccaggcccttctagaggccatatgaccgagtacaagcccacggtgcgcctcgccacccgcgacgacgtccccagggccgtacgcaccctcgccgccgcgttcgccgactaccccgccacgcgccacaccgtcgatccggaccgccacatcgagcgggtcaccgagctgcaagaactcttcctcacgcgcgtcgggctcgacatcggcaaggtgtgggtcgcggacgacggcgccgcggtggcggtctggaccacgccggagagcgtcgaagcgggggcggtgttcgccgagatcggcccgcgcatggccgagttgagcggttcccggctggccgcgcagcaacagatggaaggcctcctggcgccgcaccggcccaaggagcccgcgtggttcctggccaccgtcggcgtctcgcccgaccaccagggcaagggtctgggcagcgccgtcgtgctccccggagtggaggcggccgagcgcgccggggtgcccgccttcctggagacctccgcgccccgcaacctccccttctacgagcggctcggcttcaccgtcaccgccgacgtcgaggtgcccgaaggaccgcgcacctggtgcatgacccgcaagcccggtgcctga

SEQ ID NO: 7265 - DNA, 2100 bp, Artificial Sequence
  Synthetic Polynucloetide
atggccttaccagtgaccgccttgctcctgccgctggccttgctgctccacgccgccaggccgcaggtgcagctggttgaatctggcggaggactggttcagcctggcggatctctgagactgtcttgtgccgccagcggcttcaccttcaccaatcacgccatgagctgggtccgacaggcccctggaaaaggactggaactggtgtctagcatcagcggcaacggcagaaccacctactacgccgatagcgtgaagggcagattcaccatcagccgggacatcagcaagaacaccctggacctccagatgaacagcctgagagccgaggataccgccgtgtactactgtgccaaggatggcggagagacactggtggatagcagaggccagggcacactggtcacagtgtcatctctcgaggacaaaactcacacatgcccaccgtgcccagcacccatcaagaccgatgtgattacaatggaccccaaggacaactgctccaaggacgccaacgataccctgctgctccagctgaccaacaccagcgcctactacatgtacttgttgctgctgctgaagtccgtggtgtacttcgccatcatcacatgctgcctgctgcggagaaccgccttctgctgcaacggcgagaagtctagggccaagcgatctggatctggagcaacaaacttctcactactcaaacaagcaggtgacgtggaggagaatcccgggcctactagtatggactggatttggcgcatccttttccttgtcggcgctgctaccggcgcgcattccttcgaagtgcaggttttggagtctggcggaggactggttcagcctggcggatctctgagactgtcttgtgccgccagcggcttcaccttcagcaactttgccatgagctgggtccgacaggcccctggcaaaggacttgaatgggtgtccacaatcagcggcagcgccggcacaacagattacgccgattctgtgaagggcagattcaccatcagccgggacaacagcaagaaaaccctgtacctccagatgaacagcctgcgcgtggaagataccgccgtgtactactgtgccgatggcagaggccccttcttcgattatcgcggccagggcacactggtcaccgtttcttctacgcgtgataaaactcatacctgtccgccatgcccggcagaagtgaaaaccgactccaccgaccacgtgaagcccaaagagacagagaacaccaagcagcccagcaagagctgccacaagcccaaggccatcgtgcacaccgagaaagtgaacatgatgagcctgaccgtgctgggcctgcggatgctgttcgccaaaaccgtggccgtgaacttcctgctgaccgccaagctgttcttcctccgcgccaagagaagcggatctggcgtgaagcagaccctgaatttcgacctgctgaagctggctggcgacgtggaatccaacccaggcccttctagaggccatatgaccgagtacaagcccacggtgcgcctcgccacccgcgacgacgtccccagggccgtacgcaccctcgccgccgcgttcgccgactaccccgccacgcgccacaccgtcgatccggaccgccacatcgagcgggtcaccgagctgcaagaactcttcctcacgcgcgtcgggctcgacatcggcaaggtgtgggtcgcggacgacggcgccgcggtggcggtctggaccacgccggagagcgtcgaagcgggggcggtgttcgccgagatcggcccgcgcatggccgagttgagcggttcccggctggccgcgcagcaacagatggaaggcctcctggcgccgcaccggcccaaggagcccgcgtggttcctggccaccgtcggcgtctcgcccgaccaccagggcaagggtctgggcagcgccgtcgtgctccccggagtggaggcggccgagcgcgccggggtgcccgccttcctggagacctccgcgccccgcaacctccccttctacgagcggctcggcttcaccgtcaccgccgacgtcgaggtgcccgaaggaccgcgcacctggtgcatgacccgcaagcccggtgcctga

SEQ ID NO: 7266 - DNA, 1398 bp, Artificial Sequence
  Synthetic Polynucloetide
atggccttaccagtgaccgccttgctcctgccgctggccttgctgctccacgccgccaggccgcaggtgcagctggttgaatctggcggaggactggttcagcctggcggatctctgagactgtcttgtgccgccagcggcttcaccttcaccaatcacgccatgagctgggtccgacaggcccctggaaaaggactggaactggtgtctagcatcagcggcaacggcagaaccacctactacgccgatagcgtgaagggcagattcaccatcagccgggacatcagcaagaacaccctggacctccagatgaacagcctgagagccgaggataccgccgtgtactactgtgccaaggatggcggagagacactggtggatagcagaggccagggcacactggtcacagtgtcatctctcgaggacaaaactcacacatgcccaccgtgcccagcacccatcaagaccgatgtgattacaatggaccccaaggacaactgctccaaggacgccaacgataccctgctgctccagctgaccaacaccagcgcctactacatgtacttgttgctgctgctgaagtccgtggtgtacttcgccatcatcacatgctgcctgctgcggagaaccgccttctgctgcaacggcgagaagtctagggccaagcgatctggatctggagcaacaaacttctcactactcaaacaagcaggtgacgtggaggagaatcccgggcctactagtatggactggatttggcgcatccttttccttgtcggcgctgctaccggcgcgcattccttcgaagtgcaggttttggagtctggcggaggactggttcagcctggcggatctctgagactgtcttgtgccgccagcggcttcaccttcagcaactttgccatgagctgggtccgacaggcccctggcaaaggacttgaatgggtgtccacaatcagcggcagcgccggcacaacagattacgccgattctgtgaagggcagattcaccatcagccgggacaacagcaagaaaaccctgtacctccagatgaacagcctgcgcgtggaagataccgccgtgtactactgtgccgatggcagaggccccttcttcgattatcgcggccagggcacactggtcaccgtttcttctacgcgtgataaaactcatacctgtccgccatgcccggcagaagtgaaaaccgactccaccgaccacgtgaagcccaaagagacagagaacaccaagcagcccagcaagagctgccacaagcccaaggccatcgtgcacaccgagaaagtgaacatgatgagcctgaccgtgctgggcctgcggatgctgttcgccaaaaccgtggccgtgaacttcctgctgaccgccaagctgttcttcctc

SEQ ID NO: 7267 - DNA, 2181 bp, Artificial Sequence
  Synthetic Polynucloetide
atggccttaccagtgaccgccttgctcctgccgctggccttgctgctccacgccgccaggccggaagtgcagctggttgaatctggcggaggactggttcaggctggcggatctctgagactgtcttgtgccgccagcggcagaacctttagcatgggctggtttagacaggcccctggcaaagagagagagttcgtcgccgccatcacatactctggcggcagcccttactacgccgactctgtgaagggcagattcaccatcagccgggacaacgccaagaacaccgtgtacctccagatgaacagcctgaagcctgaggacaccgccgtgtactactgcgccgccaatccaacatacggcagcgactggaacgccgagaattggggccagggaacccaagtgacagtgtctagcctcgagagcggcggaggcggatctttcgaagaagtgcagctggttgaatctggcggaggactggttcagcctggcggatctctgagactgtcttgtgccgccagcggcttcagcttcagcgacttttggatgagctgggtccgacaggcccctggcaaaggacttgaatgggtcgccacaatcagccaggccggcagcgagaaggactacgtggactctgtgaagggcagattcaccatcagccgggacaacgccaagaagtccctgtacctccagatgaacagcctgagagccgaggacaccgccgtgtactattgtgcctctggcgtgtacagcttcgactacagaggccagggcaccctggtcacagtctcttctacgcgtgagcagaaactgatctcggaagaggatctggcgaagcccaccacgacgccagcgccgcgaccaccaacaccggcgcccaccatcgcgtcgcagcccctgtccctgcgcccagaggcgtgccggccagcggcggggggcgcagtgcacacgagggggctggacttcgcctgtgacatctacatctgggcgcccttggccgggacttgtggggtccttctcctgtcactggttatcaccctttactgcaaacggggcagaaagaaactcctgtatatattcaaacaaccatttatgagaccagtacaaactactcaagaggaagatggctgtagctgccgatttccagaagaagaagaaggaggatgtgaactgagagtgaagttcagcaggagcgcagacgcccccgcgtaccagcagggccagaaccagctctataacgagctgaatctaggacgaagagaggagtacgatgttttggacaagagacgtggccgggaccctgagatggggggaaagccgagaaggaagaaccctcaggaaggcctgtacaatgaactgcagaaagataagatggcggaggcctacagtgagattgggatgaaaggcgagcgccggaggggcaaggggcacgatggcctttaccagggtctcagtacagccaccaaggacacctacgacgcccttcacatgcaggccctgccccctcgctctagtggctccggcgagggcagaggaagtctactaacctgcggagatgtggaagaaaatcctggcccacatatgaccgagtacaagcccacggtgcgcctcgccacccgcgacgacgtccccagggccgtacgcaccctcgccgccgcgttcgccgactaccccgccacgcgccacaccgtcgatccggaccgccacatcgagcgggtcaccgagctgcaagaactcttcctcacgcgcgtcgggctcgacatcggcaaggtgtgggtcgcggacgacggcgccgcggtggcggtctggaccacgccggagagcgtcgaagcgggggcggtgttcgccgagatcggcccgcgcatggccgagttgagcggttcccggctggccgcgcagcaacagatggaaggcctcctggcgccgcaccggcccaaggagcccgcgtggttcctggccaccgtcggcgtctcgcccgaccaccagggcaagggtctgggcagcgccgtcgtgctccccggagtggaggcggccgagcgcgccggggtgcccgccttcctggagacctccgcgccccgcaacctccccttctacgagcggctcggcttcaccgtcaccgccgacgtcgaggtgcccgaaggaccgcgcacctggtgcatgacccgcaagcccggtgcctga

SEQ ID NO: 7268 - DNA, 2163 bp, Artificial Sequence
  Synthetic Polynucloetide
atggccttaccagtgaccgccttgctcctgccgctggccttgctgctccacgccgccaggccggaagtgcagctggttgaatctggcggaggactggttcaggctggcggatctctgagactgtcttgtgccgccagcggcagaacctttagcatgggctggtttagacaggcccctggcaaagagagagagttcgtcgccgccatcacatactctggcggcagcccttactacgccgactctgtgaagggcagattcaccatcagccgggacaacgccaagaacaccgtgtacctccagatgaacagcctgaagcctgaggacaccgccgtgtactactgcgccgccaatccaacatacggcagcgactggaacgccgagaattggggccagggaacccaagtgacagtgtctagcctcgagagcggcggaggcggatctttcgaagaagtgcagctggttgaatctggcggaggactggttcagcctggcggatctctgagactgtcttgtgccgccagcggcttcagcttcagcgacttttggatgagctgggtccgacaggcccctggcaaaggacttgaatgggtcgccacaatcagccaggccggcagcgagaaggactacgtggactctgtgaagggcagattcaccatcagccgggacaacgccaagaagtccctgtacctccagatgaacagcctgagagccgaggacaccgccgtgtactattgtgcctctggcgtgtacagcttcgactacagaggccagggcaccctggtcacagtctcttctacgcgtgagcagaaactgatctcggaagaggatctgaaaattgaagttatgtatcctcctccttacctagacaatgagaagagcaatggaaccattatccatgtgaaagggaaacacctttgtccaagtcccctatttcccggaccttctaagcccttttgggtgctggtggtggttgggggagtcctggcttgctatagcttgctagtaacagtggcctttattattttctgggtgaggagtaagaggagcaggctcctgcacagtgactacatgaacatgactccacgccgccccggacccacccgcaagcattaccagccctatgccccaccacgcgacttcgcagcctatcgctccagagtgaagttcagcaggagcgcagacgcccccgcgtaccagcagggccagaaccagctctataacgagctcaatctaggacgaagagaggagtacgatgttttggacaagagacgtggccgggaccctgagatggggggaaagccgagaaggaagaaccctcaggaaggcctgtacaatgaactgcagaaagataagatggcggaggcctacagtgagattgggatgaaaggcgagcgccggaggggcaaggggcacgatggcctttaccagggtctcagtacagccaccaaggacacctacgacgcccttcacatgcaggccctgccccctcgctctagtggctccggcgagggcagaggaagtctactaacctgcggagatgtggaagaaaatcctggcccacatatgaccgagtacaagcccacggtgcgcctcgccacccgcgacgacgtccccagggccgtacgcaccctcgccgccgcgttcgccgactaccccgccacgcgccacaccgtcgatccggaccgccacatcgagcgggtcaccgagctgcaagaactcttcctcacgcgcgtcgggctcgacatcggcaaggtgtgggtcgcggacgacggcgccgcggtggcggtctggaccacgccggagagcgtcgaagcgggggcggtgttcgccgagatcggcccgcgcatggccgagttgagcggttcccggctggccgcgcagcaacagatggaaggcctcctggcgccgcaccggcccaaggagcccgcgtggttcctggccaccgtcggcgtctcgcccgaccaccagggcaagggtctgggcagcgccgtcgtgctccccggagtggaggcggccgagcgcgccggggtgcccgccttcctggagacctccgcgccccgcaacctccccttctacgagcggctcggcttcaccgtcaccgccgacgtcgaggtgcccgaaggaccgcgcacctggtgcatgacccgcaagcccggtgcctga

SEQ ID NO: 7269 - DNA, 1491 bp, Artificial Sequence
  Synthetic Polynucloetide
atggccttaccagtgaccgccttgctcctgccgctggccttgctgctccacgccgccaggccggaagtgcagctggttgaatctggcggaggactggttcaggctggcggatctctgagactgtcttgtgccgccagcggcagaacctttagcatgggctggtttagacaggcccctggcaaagagagagagttcgtcgccgccatcacatactctggcggcagcccttactacgccgactctgtgaagggcagattcaccatcagccgggacaacgccaagaacaccgtgtacctccagatgaacagcctgaagcctgaggacaccgccgtgtactactgcgccgccaatccaacatacggcagcgactggaacgccgagaattggggccagggaacccaagtgacagtgtctagcctcgagagcggcggaggcggatctttcgaagaagtgcagctggttgaatctggcggaggactggttcagcctggcggatctctgagactgtcttgtgccgccagcggcttcagcttcagcgacttttggatgagctgggtccgacaggcccctggcaaaggacttgaatgggtcgccacaatcagccaggccggcagcgagaaggactacgtggactctgtgaagggcagattcaccatcagccgggacaacgccaagaagtccctgtacctccagatgaacagcctgagagccgaggacaccgccgtgtactattgtgcctctggcgtgtacagcttcgactacagaggccagggcaccctggtcacagtctcttctacgcgtgagcagaaactgatctcggaagaggatctgaaaattgaagttatgtatcctcctccttacctagacaatgagaagagcaatggaaccattatccatgtgaaagggaaacacctttgtccaagtcccctatttcccggaccttctaagcccttttgggtgctggtggtggttgggggagtcctggcttgctatagcttgctagtaacagtggcctttattattttctgggtgaggagtaagaggagcaggctcctgcacagtgactacatgaacatgactccacgccgccccggacccacccgcaagcattaccagccctatgccccaccacgcgacttcgcagcctatcgctccagagtgaagttcagcaggagcgcagacgcccccgcgtaccagcagggccagaaccagctctataacgagctcaatctaggacgaagagaggagtacgatgttttggacaagagacgtggccgggaccctgagatggggggaaagccgagaaggaagaaccctcaggaaggcctgtacaatgaactgcagaaagataagatggcggaggcctacagtgagattgggatgaaaggcgagcgccggaggggcaaggggcacgatggcctttaccagggtctcagtacagccaccaaggacacctacgacgcccttcacatgcaggccctgccccctcgc

SEQ ID NO: 7270 - DNA, 1512 bp, Artificial Sequence
  Synthetic Polynucloetide
atggccttaccagtgaccgccttgctcctgccgctggccttgctgctccacgccgccaggccggaagtgcagctggttgaatctggcggaggactggttcaggctggcggatctctgagactgtcttgtgccgccagcggcagaacctttagcatgggctggtttagacaggcccctggcaaagagagagagttcgtcgccgccatcacatactctggcggcagcccttactacgccgactctgtgaagggcagattcaccatcagccgggacaacgccaagaacaccgtgtacctccagatgaacagcctgaagcctgaggacaccgccgtgtactactgcgccgccaatccaacatacggcagcgactggaacgccgagaattggggccagggaacccaagtgacagtgtctagcctcgagagcggcggaggcggatctttcgaagaagtgcagctggttgaatctggcggaggactggttcagcctggcggatctctgagactgtcttgtgccgccagcggcttcagcttcagcgacttttggatgagctgggtccgacaggcccctggcaaaggacttgaatgggtcgccacaatcagccaggccggcagcgagaaggactacgtggactctgtgaagggcagattcaccatcagccgggacaacgccaagaagtccctgtacctccagatgaacagcctgagagccgaggacaccgccgtgtactattgtgcctctggcgtgtacagcttcgactacagaggccagggcaccctggtcacagtctcttctacgcgtgagcagaaactgatctcggaagaggatctggcgaagcccaccacgacgccagcgccgcgaccaccaacaccggcgcccaccatcgcgtcgcagcccctgtccctgcgcccagaggcgtgccggccagcggcggggggcgcagtgcacacgagggggctggacttcgcctgtgacatctacatctgggcgcccttggccgggacttgtggggtccttctcctgtcactggttatcaccctttactgcaaacggggcagaaagaaactcctgtatatattcaaacaaccatttatgagaccagtacaaactactcaagaggaagatggctgtagctgccgatttccagaagaagaagaaggaggatgtgaactgagagtgaagttcagcaggagcgcagacgcccccgcgtaccagcagggccagaaccagctctataacgagctgaatctaggacgaagagaggagtacgatgttttggacaagagacgtggccgggaccctgagatggggggaaagccgagaaggaagaaccctcaggaaggcctgtacaatgaactgcagaaagataagatggcggaggcctacagtgagattgggatgaaaggcgagcgccggaggggcaaggggcacgatggcctttaccagggtctcagtacagccaccaaggacacctacgacgcccttcacatgcaggccctgccccctcgctga

SEQ ID NO: 7271 - DNA, 1515 bp, Artificial Sequence
  Synthetic Polynucloetide
atggccttaccagtgaccgccttgctcctgccgctggccttgctgctccacgccgccaggccggaagaagtgcagctggttgaatctggcggaggactggttcagcctggcggatctctgagactgtcttgtgccgccagcggcttcagcttcagcgacttttggatgagctgggtccgacaggcccctggcaaaggacttgaatgggtcgccacaatcagccaggccggcagcgagaaggactacgtggactctgtgaagggcagattcaccatcagccgggacaacgccaagaagtccctgtacctccagatgaacagcctgagagccgaggacaccgccgtgtactattgtgcctctggcgtgtacagcttcgactacagaggccagggcaccctggtcacagtctcttctctcgagagcggcggaggcggatctttcgaagaagtgcagctggttgaatctggcggaggactggttcaggctggcggatctctgagactgtcttgtgccgccagcggcagaacctttagcatgggctggtttagacaggcccctggcaaagagagagagttcgtcgccgccatcacatactctggcggcagcccttactacgccgactctgtgaagggcagattcaccatcagccgggacaacgccaagaacaccgtgtacctccagatgaacagcctgaagcctgaggacaccgccgtgtactactgcgccgccaatccaacatacggcagcgactggaacgccgagaattggggccagggaacccaagtgacagtgtctagcacgcgtgagcagaaactgatctcggaagaggatctggcgaagcccaccacgacgccagcgccgcgaccaccaacaccggcgcccaccatcgcgtcgcagcccctgtccctgcgcccagaggcgtgccggccagcggcggggggcgcagtgcacacgagggggctggacttcgcctgtgacatctacatctgggcgcccttggccgggacttgtggggtccttctcctgtcactggttatcaccctttactgcaaacggggcagaaagaaactcctgtatatattcaaacaaccatttatgagaccagtacaaactactcaagaggaagatggctgtagctgccgatttccagaagaagaagaaggaggatgtgaactgagagtgaagttcagcaggagcgcagacgcccccgcgtaccagcagggccagaaccagctctataacgagctgaatctaggacgaagagaggagtacgatgttttggacaagagacgtggccgggaccctgagatggggggaaagccgagaaggaagaaccctcaggaaggcctgtacaatgaactgcagaaagataagatggcggaggcctacagtgagattgggatgaaaggcgagcgccggaggggcaaggggcacgatggcctttaccagggtctcagtacagccaccaaggacacctacgacgcccttcacatgcaggccctgccccctcgctga

SEQ ID NO: 7272 - DNA, 2751 bp, Artificial Sequence
  Synthetic Polynucloetide
atggccttaccagtgaccgccttgctcctgccgctggccttgctgctccacgccgccaggccggaagtgcagctggttgaatctggcggaggactggttcaggctggcggatctctgagactgtcttgtgccgccagcggcagaacctttagcatgggctggtttagacaggcccctggcaaagagagagagttcgtcgccgccatcacatactctggcggcagcccttactacgccgactctgtgaagggcagattcaccatcagccgggacaacgccaagaacaccgtgtacctccagatgaacagcctgaagcctgaggacaccgccgtgtactactgcgccgccaatccaacatacggcagcgactggaacgccgagaattggggccagggaacccaagtgacagtgtctagcctcgagagcggcggaggcggatctttcgaagaagtgcagctggttgaatctggcggaggactggttcagcctggcggatctctgagactgtcttgtgccgccagcggcttcagcttcagcgacttttggatgagctgggtccgacaggcccctggcaaaggacttgaatgggtcgccacaatcagccaggccggcagcgagaaggactacgtggactctgtgaagggcagattcaccatcagccgggacaacgccaagaagtccctgtacctccagatgaacagcctgagagccgaggacaccgccgtgtactattgtgcctctggcgtgtacagcttcgactacagaggccagggcaccctggtcacagtctcttctacgcgtgagcagaaactgatctcggaagaggatctggcgaagcccaccacgacgccagcgccgcgaccaccaacaccggcgcccaccatcgcgtcgcagcccctgtccctgcgcccagaggcgtgccggccagcggcggggggcgcagtgcacacgagggggctggacttcgcctgtgacatctacatctgggcgcccttggccgggacttgtggggtccttctcctgtcactggttatcaccctttactgcgggcgcgccagagtgaagttcagcaggagcgcagacgcccccgcgtaccagcagggccagaaccagctctataacgagctgaatctaggacgaagagaggagtacgatgttttggacaagagacgtggccgggaccctgagatggggggaaagccgagaaggaagaaccctcaggaaggcctgtacaatgaactgcagaaagataagatggcggaggcctacagtgagattgggatgaaaggcgagcgccggaggggcaaggggcacgatggcctttaccagggtctcagtacagccaccaaggacacctacgacgcccttcacatgcaggccctgccccctcgctctagaggatctggagcaacaaacttctcactactcaaacaagcaggtgacgtggaggagaatcccgggcctgggatccacatggccacttacgaggttctctgtgaggtggcgcggaaactgggcacggatgacagggaagtggtattgttcctcctaaacgtgttcatacctcaacccacactggcccaattaattggagctcttagagctttaaaggaggagggcaggttaacgtttcccctgttagcggaatgtctgtttcgtgcaggtcgcagagacctcttgcgcgacctgcttcacttagacccgcgttttttagagcgccacctagcgggcacaatgagttatttcagcccttatcagctcactgttctccacgtagacggggagctgtgtgcgagggatattaggtctttgatatttttaagcaaggacactatagggtctcgcagcacaccacagacattcttacactgggtgtactgtatggaaaacttagacctactgggtcccactgacgtggatgccctaatgtcaatgcttagatctttgtcaagagtagacctacagcgccaagtgcaaaccctaatgggccttcacctttccggcccatcacactcccaacactatcgccatacaccactcgagaccgatttctacgactacaaggacgacgatgacaagactagtggctccggcgagggcagaggaagtctactaacctgcggagatgtggaagaaaatcctggcccacatatgaccgagtacaagcccacggtgcgcctcgccacccgcgacgacgtccccagggccgtacgcaccctcgccgccgcgttcgccgactaccccgccacgcgccacaccgtcgatccggaccgccacatcgagcgggtcaccgagctgcaagaactcttcctcacgcgcgtcgggctcgacatcggcaaggtgtgggtcgcggacgacggcgccgcggtggcggtctggaccacgccggagagcgtcgaagcgggggcggtgttcgccgagatcggcccgcgcatggccgagttgagcggttcccggctggccgcgcagcaacagatggaaggcctcctggcgccgcaccggcccaaggagcccgcgtggttcctggccaccgtcggcgtctcgcccgaccaccagggcaagggtctgggcagcgccgtcgtgctccccggagtggaggcggccgagcgcgccggggtgcccgccttcctggagacctccgcgccccgcaacctccccttctacgagcggctcggcttcaccgtcaccgccgacgtcgaggtgcccgaaggaccgcgcacctggtgcatgacccgcaagcccggtgcctga

SEQ ID NO: 7273 - DNA, 2586 bp, Artificial Sequence
  Synthetic Polynucloetide
atggccttaccagtgaccgccttgctcctgccgctggccttgctgctccacgccgccaggccggaagtgcagctggttgaatctggcggaggactggttcaggctggcggatctctgagactgtcttgtgccgccagcggcagaacctttagcatgggctggtttagacaggcccctggcaaagagagagagttcgtcgccgccatcacatactctggcggcagcccttactacgccgactctgtgaagggcagattcaccatcagccgggacaacgccaagaacaccgtgtacctccagatgaacagcctgaagcctgaggacaccgccgtgtactactgcgccgccaatccaacatacggcagcgactggaacgccgagaattggggccagggaacccaagtgacagtgtctagcctcgagatccagaaccctgatcctgccgtgtaccagctgcgggatagcaagagcagcgacaagagcgtgtgtctgttcaccgacttcgacagccagaccaacgtgtcccagagcaaggactccgacgtgtacatcaccgataagtgcgtgctggacatgcggagcatggacttcaagagcaactccgccgtggcctggtccaacaagtccgatttcgcctgcgccaacgccttcaacaacagcattatccccgaggacacattcttcccaagcagcgacgtgccctgcgacgtgaagctggtggaaaagagcttcgagacagacaccaacctgaacttccagaacctgagcgtgatcggcttcagaatcctgctgctgaaagtggccggctttaacctgctgatgaccctgcggctgtggtccagccgcgccaagagaagcggatctggcgtgaagcagaccctgaatttcgacctgctgaagctggctggcgacgtggaatccaacccaggccctactagtatggactggatttggcgcatccttttccttgtcggcgctgctaccggcgcgcattccttcgaagaagtgcagctggttgaatctggcggaggactggttcagcctggcggatctctgagactgtcttgtgccgccagcggcttcagcttcagcgacttttggatgagctgggtccgacaggcccctggcaaaggacttgaatgggtcgccacaatcagccaggccggcagcgagaaggactacgtggactctgtgaagggcagattcaccatcagccgggacaacgccaagaagtccctgtacctccagatgaacagcctgagagccgaggacaccgccgtgtactattgtgcctctggcgtgtacagcttcgactacagaggccagggcaccctggtcacagtctcttctacgcgtgaggacctgaagaacgtgttcccacctgaggtggccgtgttcgagcctagcaaggccgagatcgcccacacccagaaagccaccctcgtgtgcctggctaccggcttctaccccgaccatgtggaactgtcttggtgggtcaacggcaaagaggtgcacagcggcgtgtgtaccgacccccagccactgaaagaacagcccgccctgaacgacagccggtactgcctgagcagcagactgagagtgtccgccaccttctggcagaacccccggaaccacttcagatgccaggtgcagttctacggcctgagcgagaacgacgagtggacccaggacagagccaagcccgtgacccagatcgtgtctgccgaagcctggggcagagccgattgcggcatcaccagcgccagctaccaccagggcgtgctgagcgccaccatcctgtacgagatcctgctgggcaaggccaccctgtacgccgtgctggtgtctgccctggtgctgatggctatggtcaagcggaaggacagccggggaagggccaagcgatctggatctggagcaacaaacttctcactactcaaacaagcaggtgacgtggaggagaatcccgggccttctagaggccatatgaccgagtacaagcccacggtgcgcctcgccacccgcgacgacgtccccagggccgtacgcaccctcgccgccgcgttcgccgactaccccgccacgcgccacaccgtcgatccggaccgccacatcgagcgggtcaccgagctgcaagaactcttcctcacgcgcgtcgggctcgacatcggcaaggtgtgggtcgcggacgacggcgccgcggtggcggtctggaccacgccggagagcgtcgaagcgggggcggtgttcgccgagatcggcccgcgcatggccgagttgagcggttcccggctggccgcgcagcaacagatggaaggcctcctggcgccgcaccggcccaaggagcccgcgtggttcctggccaccgtcggcgtctcgcccgaccaccagggcaagggtctgggcagcgccgtcgtgctccccggagtggaggcggccgagcgcgccggggtgcccgccttcctggagacctccgcgccccgcaacctccccttctacgagcggctcggcttcaccgtcaccgccgacgtcgaggtgcccgaaggaccgcgcacctggtgcatgacccgcaagcccggtgcctga

SEQ ID NO: 7274 - DNA, 2583 bp, Artificial Sequence
  Synthetic Polynucloetide
atggccttaccagtgaccgccttgctcctgccgctggccttgctgctccacgccgccaggccggaagtgcagctggttgaatctggcggaggactggttcaggctggcggatctctgagactgtcttgtgccgccagcggcagaacctttagcatgggctggtttagacaggcccctggcaaagagagagagttcgtcgccgccatcacatactctggcggcagcccttactacgccgactctgtgaagggcagattcaccatcagccgggacaacgccaagaacaccgtgtacctccagatgaacagcctgaagcctgaggacaccgccgtgtactactgcgccgccaatccaacatacggcagcgactggaacgccgagaattggggccagggaacccaagtgacagtgtctagcctcgaggacctgaagaacgtgttcccacctgaggtggccgtgttcgagcctagcaaggccgagatcgcccacacccagaaagccaccctcgtgtgcctggctaccggcttctaccccgaccatgtggaactgtcttggtgggtcaacggcaaagaggtgcacagcggcgtgtgtaccgacccccagccactgaaagaacagcccgccctgaacgacagccggtactgcctgagcagcagactgagagtgtccgccaccttctggcagaacccccggaaccacttcagatgccaggtgcagttctacggcctgagcgagaacgacgagtggacccaggacagagccaagcccgtgacccagatcgtgtctgccgaagcctggggcagagccgattgcggcatcaccagcgccagctaccaccagggcgtgctgagcgccaccatcctgtacgagatcctgctgggcaaggccaccctgtacgccgtgctggtgtctgccctggtgctgatggctatggtcaagcggaaggacagccggggaagggccaagcgatctggatctggagcaacaaacttctcactactcaaacaagcaggtgacgtggaggagaatcccgggcctactagtatggactggatttggcgcatccttttccttgtcggcgctgctaccggcgcgcattccttcgaagaagtgcagctggttgaatctggcggaggactggttcagcctggcggatctctgagactgtcttgtgccgccagcggcttcagcttcagcgacttttggatgagctgggtccgacaggcccctggcaaaggacttgaatgggtcgccacaatcagccaggccggcagcgagaaggactacgtggactctgtgaagggcagattcaccatcagccgggacaacgccaagaagtccctgtacctccagatgaacagcctgagagccgaggacaccgccgtgtactattgtgcctctggcgtgtacagcttcgactacagaggccagggcaccctggtcacagtctcttctacgcgtatccagaaccctgatcctgccgtgtaccagctgcgggatagcaagagcagcgacaagagcgtgtgtctgttcaccgacttcgacagccagaccaacgtgtcccagagcaaggactccgacgtgtacatcaccgataagtgcgtgctggacatgcggagcatggacttcaagagcaactccgccgtggcctggtccaacaagtccgatttcgcctgcgccaacgccttcaacaacagcattatccccgaggacacattcttcccaagcagcgacgtgccctgcgacgtgaagctggtggaaaagagcttcgagacagacaccaacctgaacttccagaacctgagcgtgatcggcttcagaatcctgctgctgaaagtggccggctttaacctgctgatgaccctgcggctgtggtccagccgcgccaagagaagcggatctggcgtgaagcagaccctgaatttcgacctgctgaagctggctggcgacgtggaatccaacccaggcccttctagaggccatatgaccgagtacaagcccacggtgcgcctcgccacccgcgacgacgtccccagggccgtacgcaccctcgccgccgcgttcgccgactaccccgccacgcgccacaccgtcgatccggaccgccacatcgagcgggtcaccgagctgcaagaactcttcctcacgcgcgtcgggctcgacatcggcaaggtgtgggtcgcggacgacggcgccgcggtggcggtctggaccacgccggagagcgtcgaagcgggggcggtgttcgccgagatcggcccgcgcatggccgagttgagcggttcccggctggccgcgcagcaacagatggaaggcctcctggcgccgcaccggcccaaggagcccgcgtggttcctggccaccgtcggcgtctcgcccgaccaccagggcaagggtctgggcagcgccgtcgtgctccccggagtggaggcggccgagcgcgccggggtgcccgccttcctggagacctccgcgccccgcaacctccccttctacgagcggctcggcttcaccgtcaccgccgacgtcgaggtgcccgaaggaccgcgcacctggtgcatgacccgcaagcccggtgcctga

SEQ ID NO: 7275 - DNA, 1881 bp, Artificial Sequence
  Synthetic Polynucloetide
atggccttaccagtgaccgccttgctcctgccgctggccttgctgctccacgccgccaggccggaagtgcagctggttgaatctggcggaggactggttcaggctggcggatctctgagactgtcttgtgccgccagcggcagaacctttagcatgggctggtttagacaggcccctggcaaagagagagagttcgtcgccgccatcacatactctggcggcagcccttactacgccgactctgtgaagggcagattcaccatcagccgggacaacgccaagaacaccgtgtacctccagatgaacagcctgaagcctgaggacaccgccgtgtactactgcgccgccaatccaacatacggcagcgactggaacgccgagaattggggccagggaacccaagtgacagtgtctagcctcgaggacctgaagaacgtgttcccacctgaggtggccgtgttcgagcctagcgaggccgagatcagccacacccagaaagccaccctcgtgtgcctggctaccggcttctaccccgaccatgtggaactgtcttggtgggtcaacggcaaagaggtgcacagcggcgtgtgtaccgacccccagccactgaaagaacagcccgccctgaacgacagccggtactgcctgagcagcagactgagagtgtccgccaccttctggcagaacccccggaaccacttcagatgccaggtgcagttctacggcctgagcgagaacgacgagtggacccaggacagagccaagcccgtgacccagatcgtgtctgccgaagcctggggcagagccgattgcggctttaccagcgagagctaccagcagggcgtgctgagcgccaccatcctgtacgagatcctgctgggcaaggccaccctgtacgccgtgctggtgtctgccctggtgctgatggctatggtcaagcggaaggacagccggggaagggccaagcgatctggatctggagcaacaaacttctcactactcaaacaagcaggtgacgtggaggagaatcccgggcctactagtatggactggatttggcgcatccttttccttgtcggcgctgctaccggcgcgcattccttcgaagaagtgcagctggttgaatctggcggaggactggttcagcctggcggatctctgagactgtcttgtgccgccagcggcttcagcttcagcgacttttggatgagctgggtccgacaggcccctggcaaaggacttgaatgggtcgccacaatcagccaggccggcagcgagaaggactacgtggactctgtgaagggcagattcaccatcagccgggacaacgccaagaagtccctgtacctccagatgaacagcctgagagccgaggacaccgccgtgtactattgtgcctctggcgtgtacagcttcgactacagaggccagggcaccctggtcacagtctcttctacgcgtatccagaaccctgatcctgccgtgtaccagctgcgggatagcaagagcagcgacaagagcgtgtgtctgttcaccgacttcgacagccagaccaacgtgtcccagagcaaggactccgacgtgtacatcaccgataagtgcgtgctggacatgcggagcatggacttcaagagcaactccgccgtggcctggtccaacaagtccgatttcgcctgcgccaacgccttcaacaacagcattatccccgaggacacattcttcccaagccccgagagcagctgcgacgtgaagctggtggaaaagagcttcgagacagacaccaacctgaacttccagaacctgagcgtgatcggcttcagaatcctgctgctgaaagtggccggctttaacctgctgatgaccctgcggctgtggtccagc

SEQ ID NO: 7276 - DNA, 2556 bp, Artificial Sequence
  Synthetic Polynucloetide
atggccttaccagtgaccgccttgctcctgccgctggccttgctgctccacgccgccaggccggaagtgcagctggttgaatctggcggaggactggttcaggctggcggatctctgagactgtcttgtgccgccagcggcagaacctttagcatgggctggtttagacaggcccctggcaaagagagagagttcgtcgccgccatcacatactctggcggcagcccttactacgccgactctgtgaagggcagattcaccatcagccgggacaacgccaagaacaccgtgtacctccagatgaacagcctgaagcctgaggacaccgccgtgtactactgcgccgccaatccaacatacggcagcgactggaacgccgagaattggggccagggaacccaagtgacagtgtctagcctcgaggacctgaagaacgtgttcccacctgaggtggccgtgttcgagcctagcgaggccgagatcagccacacccagaaagccaccctcgtgtgcctggctaccggcttctaccccgaccatgtggaactgtcttggtgggtcaacggcaaagaggtgcacagcggcgtgtgtaccgacccccagccactgaaagaacagcccgccctgaacgacagccggtactgcctgagcagcagactgagagtgtccgccaccttctggcagaacccccggaaccacttcagatgccaggtgcagttctacggcctgagcgagaacgacgagtggacccaggacagagccaagcccgtgacccagatcgtgtctgccgaagcctggggcagagccgattgcggctttaccagcgagagctaccagcagggcgtgctgagcgccaccatcctgtacgagatcctgctgggcaaggccaccctgtacgccgtgctggtgtctgccctggtgctgatggctatggtcaagcggaaggacagccggggaagggccaagcgatctggatctggagcaacaaacttctcactactcaaacaagcaggtgacgtggaggagaatcccgggcctactagtatggactggatttggcgcatccttttccttgtcggcgctgctaccggcgcgcattccttcgaagaagtgcagctggttgaatctggcggaggactggttcagcctggcggatctctgagactgtcttgtgccgccagcggcttcagcttcagcgacttttggatgagctgggtccgacaggcccctggcaaaggacttgaatgggtcgccacaatcagccaggccggcagcgagaaggactacgtggactctgtgaagggcagattcaccatcagccgggacaacgccaagaagtccctgtacctccagatgaacagcctgagagccgaggacaccgccgtgtactattgtgcctctggcgtgtacagcttcgactacagaggccagggcaccctggtcacagtctcttctacgcgtatccagaaccctgatcctgccgtgtaccagctgcgggatagcaagagcagcgacaagagcgtgtgtctgttcaccgacttcgacagccagaccaacgtgtcccagagcaaggactccgacgtgtacatcaccgataagtgcgtgctggacatgcggagcatggacttcaagagcaactccgccgtggcctggtccaacaagtccgatttcgcctgcgccaacgccttcaacaacagcattatccccgaggacacattcttcccaagccccgagagcagctgcgacgtgaagctggtggaaaagagcttcgagacagacaccaacctgaacttccagaacctgagcgtgatcggcttcagaatcctgctgctgaaagtggccggctttaacctgctgatgaccctgcggctgtggtccagccgcgccaagagaagcggatctggcgtgaagcagaccctgaatttcgacctgctgaagctggctggcgacgtggaatccaacccaggcccttctagaggcgggatccacaccatggctacctacgaggtgctgtgcgaggtggcaagaaagctgggcaccgacgacagagaagtggtgctgttcctgctgaacgtgttcatccctcagcctacactggcccagctgatcggtgcactgagagccctgaaagaggaaggccggctgacctttcctctgctggccgaatgcctgttcagagccggaagaagggatctgctgcgggacctgctgcatctggaccccagatttctggaaagacacctggccggcaccatgagctacttcagcccttaccagctgaccgtgctgcacgttgacggcgaactgtgcgccagagatattcggagcctgatcttcctgagcaaggacaccatcggcagccggtctacccctcagacatttctgcactgggtgtactgcatggaaaacctggacctgctcggccccacagatgtggatgccctgatgtccatgctgagaagcctgagcagagtggacctccagagacaggtgcagacactgatgggactgcacctgagcggacctagccacagccagcactacagacacacccct

SEQ ID NO: 7277 - DNA, 1893 bp, Artificial Sequence
  Synthetic Polynucloetide
atggccttaccagtgaccgccttgctcctgccgctggccttgctgctccacgccgccaggccggaagtgcagctggttgaatctggcggaggactggttcaggctggcggatctctgagactgtcttgtgccgccagcggcagaacctttagcatgggctggtttagacaggcccctggcaaagagagagagttcgtcgccgccatcacatactctggcggcagcccttactacgccgactctgtgaagggcagattcaccatcagccgggacaacgccaagaacaccgtgtacctccagatgaacagcctgaagcctgaggacaccgccgtgtactactgcgccgccaatccaacatacggcagcgactggaacgccgagaattggggccagggaacccaagtgacagtgtctagcctcgagatccagaaccctgatcctgccgtgtaccagctgcgggatagcaagagcagcgacaagagcgtgtgtctgttcaccgacttcgacagccagaccaacgtgtcccagagcaaggactccgacgtgtacatcaccgataagtgcgtgctggacatgcggagcatggacttcaagagcaactccgccgtggcctggtccaacaagtccgatttcgcctgcgccaacgccttcaacaacagcattatccccgaggacacattcttcccaagccccgagagcagctgcgacgtgaagctggtggaaaagagcttcgagacagacaccaacctgaacttccagaacctgagcgtgatcggcttcagaatcctgctgctgaaagtggccggctttaacctgctgatgaccctgcggctgtggtccagccgcgccaagagaagcggatctggcgtgaagcagaccctgaatttcgacctgctgaagctggctggcgacgtggaatccaacccaggccctactagtatggactggatttggcgcatccttttccttgtcggcgctgctaccggcgcgcattccttcgaagaagtgcagctggttgaatctggcggaggactggttcagcctggcggatctctgagactgtcttgtgccgccagcggcttcagcttcagcgacttttggatgagctgggtccgacaggcccctggcaaaggacttgaatgggtcgccacaatcagccaggccggcagcgagaaggactacgtggactctgtgaagggcagattcaccatcagccgggacaacgccaagaagtccctgtacctccagatgaacagcctgagagccgaggacaccgccgtgtactattgtgcctctggcgtgtacagcttcgactacagaggccagggcaccctggtcacagtctcttctacgcgtgaggacctgaagaacgtgttcccacctgaggtggccgtgttcgagcctagcgaggccgagatcagccacacccagaaagccaccctcgtgtgcctggctaccggcttctaccccgaccatgtggaactgtcttggtgggtcaacggcaaagaggtgcacagcggcgtgtgtaccgacccccagccactgaaagaacagcccgccctgaacgacagccggtactgcctgagcagcagactgagagtgtccgccaccttctggcagaacccccggaaccacttcagatgccaggtgcagttctacggcctgagcgagaacgacgagtggacccaggacagagccaagcccgtgacccagatcgtgtctgccgaagcctggggcagagccgattgcggctttaccagcgagagctaccagcagggcgtgctgagcgccaccatcctgtacgagatcctgctgggcaaggccaccctgtacgccgtgctggtgtctgccctggtgctgatggctatggtcaagcggaaggacagccgggga

SEQ ID NO: 7278 - DNA, 2559 bp, Artificial Sequence
  Synthetic Polynucloetide
atggccttaccagtgaccgccttgctcctgccgctggccttgctgctccacgccgccaggccggaagtgcagctggttgaatctggcggaggactggttcaggctggcggatctctgagactgtcttgtgccgccagcggcagaacctttagcatgggctggtttagacaggcccctggcaaagagagagagttcgtcgccgccatcacatactctggcggcagcccttactacgccgactctgtgaagggcagattcaccatcagccgggacaacgccaagaacaccgtgtacctccagatgaacagcctgaagcctgaggacaccgccgtgtactactgcgccgccaatccaacatacggcagcgactggaacgccgagaattggggccagggaacccaagtgacagtgtctagcctcgagatccagaaccctgatcctgccgtgtaccagctgcgggatagcaagagcagcgacaagagcgtgtgtctgttcaccgacttcgacagccagaccaacgtgtcccagagcaaggactccgacgtgtacatcaccgataagtgcgtgctggacatgcggagcatggacttcaagagcaactccgccgtggcctggtccaacaagtccgatttcgcctgcgccaacgccttcaacaacagcattatccccgaggacacattcttcccaagccccgagagcagctgcgacgtgaagctggtggaaaagagcttcgagacagacaccaacctgaacttccagaacctgagcgtgatcggcttcagaatcctgctgctgaaagtggccggctttaacctgctgatgaccctgcggctgtggtccagccgcgccaagagaagcggatctggcgtgaagcagaccctgaatttcgacctgctgaagctggctggcgacgtggaatccaacccaggccctactagtatggactggatttggcgcatccttttccttgtcggcgctgctaccggcgcgcattccttcgaagaagtgcagctggttgaatctggcggaggactggttcagcctggcggatctctgagactgtcttgtgccgccagcggcttcagcttcagcgacttttggatgagctgggtccgacaggcccctggcaaaggacttgaatgggtcgccacaatcagccaggccggcagcgagaaggactacgtggactctgtgaagggcagattcaccatcagccgggacaacgccaagaagtccctgtacctccagatgaacagcctgagagccgaggacaccgccgtgtactattgtgcctctggcgtgtacagcttcgactacagaggccagggcaccctggtcacagtctcttctacgcgtgaggacctgaagaacgtgttcccacctgaggtggccgtgttcgagcctagcgaggccgagatcagccacacccagaaagccaccctcgtgtgcctggctaccggcttctaccccgaccatgtggaactgtcttggtgggtcaacggcaaagaggtgcacagcggcgtgtgtaccgacccccagccactgaaagaacagcccgccctgaacgacagccggtactgcctgagcagcagactgagagtgtccgccaccttctggcagaacccccggaaccacttcagatgccaggtgcagttctacggcctgagcgagaacgacgagtggacccaggacagagccaagcccgtgacccagatcgtgtctgccgaagcctggggcagagccgattgcggctttaccagcgagagctaccagcagggcgtgctgagcgccaccatcctgtacgagatcctgctgggcaaggccaccctgtacgccgtgctggtgtctgccctggtgctgatggctatggtcaagcggaaggacagccggggaagggccaagcgatctggatctggagcaacaaacttctcactactcaaacaagcaggtgacgtggaggagaatcccgggccttctagaggcgggatccacaccatggctacctacgaggtgctgtgcgaggtggcaagaaagctgggcaccgacgacagagaagtggtgctgttcctgctgaacgtgttcatccctcagcctacactggcccagctgatcggtgcactgagagccctgaaagaggaaggccggctgacctttcctctgctggccgaatgcctgttcagagccggaagaagggatctgctgcgggacctgctgcatctggaccccagatttctggaaagacacctggccggcaccatgagctacttcagcccttaccagctgaccgtgctgcacgttgacggcgaactgtgcgccagagatattcggagcctgatcttcctgagcaaggacaccatcggcagccggtctacccctcagacatttctgcactgggtgtactgcatggaaaacctggacctgctcggccccacagatgtggatgccctgatgtccatgctgagaagcctgagcagagtggacctccagagacaggtgcagacactgatgggactgcacctgagcggacctagccacagccagcactacagacacacccct

SEQ ID NO: 7279 - DNA, 2703 bp, Artificial Sequence
  Synthetic Polynucloetide
atggccttaccagtgaccgccttgctcctgccgctggccttgctgctccacgccgccaggccgctcgaggggaaaccaattcccaaccctcttctgggactggattcaaccggcagcggcgaggacctgaagaacgtgttcccacctgaggtggccgtgttcgagcctagcaaggccgagatcgcccacacccagaaagccaccctcgtgtgcctggctaccggcttctaccccgaccatgtggaactgtcttggtgggtcaacggcaaagaggtgcacagcggcgtgtgtaccgacccccagccactgaaagaacagcccgccctgaacgacagccggtactgcctgagcagcagactgagagtgtccgccaccttctggcagaacccccggaaccacttcagatgccaggtgcagttctacggcctgagcgagaacgacgagtggacccaggacagagccaagcccgtgacccagatcgtgtctgccgaagcctggggcagagccgattgcggcatcaccagcgccagctaccaccagggcgtgctgagcgccaccatcctgtacgagatcctgctgggcaaggccaccctgtacgccgtgctggtgtctgccctggtgctgatggctatggtcaagcggaaggacagccggggaagggccaagcgatctggatctggagcaacaaacttctcactactcaaacaagcaggtgacgtggaggagaatcccgggcctactagcatggccttaccagtgaccgccttgctcctgccgctggccttgctgctccacgccgccaggccggaagtgcagctggttgaatctggcggaggactggttcaggctggcggatctctgagactgtcttgtgccgccagcggcagaacctttagcatgggctggtttagacaggcccctggcaaagagagagagttcgtcgccgccatcacatactctggcggcagcccttactacgccgactctgtgaagggcagattcaccatcagccgggacaacgccaagaacaccgtgtacctccagatgaacagcctgaagcctgaggacaccgccgtgtactactgcgccgccaatccaacatacggcagcgactggaacgccgagaattggggccagggaacccaagtgacagtgtctagcctcgagagcggcggaggcggatctttcgaagaagtgcagctggttgaatctggcggaggactggttcagcctggcggatctctgagactgtcttgtgccgccagcggcttcagcttcagcgacttttggatgagctgggtccgacaggcccctggcaaaggacttgaatgggtcgccacaatcagccaggccggcagcgagaaggactacgtggactctgtgaagggcagattcaccatcagccgggacaacgccaagaagtccctgtacctccagatgaacagcctgagagccgaggacaccgccgtgtactattgtgcctctggcgtgtacagcttcgactacagaggccagggcaccctggtcacagtctcttctacgcgtgagcagaaactgatctcggaagaggatgggagcggcatccagaaccctgatcctgccgtgtaccagctgcgggatagcaagagcagcgacaagagcgtgtgtctgttcaccgacttcgacagccagaccaacgtgtcccagagcaaggactccgacgtgtacatcaccgataagtgcgtgctggacatgcggagcatggacttcaagagcaactccgccgtggcctggtccaacaagtccgatttcgcctgcgccaacgccttcaacaacagcattatccccgaggacacattcttcccaagcagcgacgtgccctgcgacgtgaagctggtggaaaagagcttcgagacagacaccaacctgaacttccagaacctgagcgtgatcggcttcagaatcctgctgctgaaagtggccggctttaacctgctgatgaccctgcggctgtggtccagccgcgccaagagaagcggatctggcgtgaagcagaccctgaatttcgacctgctgaagctggctggcgacgtggaatccaacccaggcccttctagaggccatatgaccgagtacaagcccacggtgcgcctcgccacccgcgacgacgtccccagggccgtacgcaccctcgccgccgcgttcgccgactaccccgccacgcgccacaccgtcgatccggaccgccacatcgagcgggtcaccgagctgcaagaactcttcctcacgcgcgtcgggctcgacatcggcaaggtgtgggtcgcggacgacggcgccgcggtggcggtctggaccacgccggagagcgtcgaagcgggggcggtgttcgccgagatcggcccgcgcatggccgagttgagcggttcccggctggccgcgcagcaacagatggaaggcctcctggcgccgcaccggcccaaggagcccgcgtggttcctggccaccgtcggcgtctcgcccgaccaccagggcaagggtctgggcagcgccgtcgtgctccccggagtggaggcggccgagcgcgccggggtgcccgccttcctggagacctccgcgccccgcaacctccccttctacgagcggctcggcttcaccgtcaccgccgacgtcgaggtgcccgaaggaccgcgcacctggtgcatgacccgcaagcccggtgcctga

SEQ ID NO: 7280 - DNA, 2706 bp, Artificial Sequence
  Synthetic Polynucloetide
atggccttaccagtgaccgccttgctcctgccgctggccttgctgctccacgccgccaggccgctcgagcagaaactgatctcggaagaggatctgggctccggcgatcgccctgatcctgccgtgtaccagctgcgggatagcaagagcagcgacaagagcgtgtgtctgttcaccgacttcgacagccagaccaacgtgtcccagagcaaggactccgacgtgtacatcaccgataagtgcgtgctggacatgcggagcatggacttcaagagcaactccgccgtggcctggtccaacaagtccgatttcgcctgcgccaacgccttcaacaacagcattatccccgaggacacattcttcccaagccccgagagcagctgcgacgtgaagctggtggaaaagagcttcgagacagacaccaacctgaacttccagaacctgagcgtgatcggcttcagaatcctgctgctgaaagtggccggctttaacctgctgatgaccctgcggctgtggtccagctctagtcgcgccaagagaagcggatctggcgtgaagcagaccctgaatttcgacctgctgaagctggctggcgacgtggaatccaacccaggccccactagcatggccttaccagtgaccgccttgctcctgccgctggccttgctgctccacgccgccaggccggaagtgcagctggttgaatctggcggaggactggttcaggctggcggatctctgagactgtcttgtgccgccagcggcagaacctttagcatgggctggtttagacaggcccctggcaaagagagagagttcgtcgccgccatcacatactctggcggcagcccttactacgccgactctgtgaagggcagattcaccatcagccgggacaacgccaagaacaccgtgtacctccagatgaacagcctgaagcctgaggacaccgccgtgtactactgcgccgccaatccaacatacggcagcgactggaacgccgagaattggggccagggaacccaagtgacagtgtctagcctcgagagcggcggaggcggatctttcgaagaagtgcagctggttgaatctggcggaggactggttcagcctggcggatctctgagactgtcttgtgccgccagcggcttcagcttcagcgacttttggatgagctgggtccgacaggcccctggcaaaggacttgaatgggtcgccacaatcagccaggccggcagcgagaaggactacgtggactctgtgaagggcagattcaccatcagccgggacaacgccaagaagtccctgtacctccagatgaacagcctgagagccgaggacaccgccgtgtactattgtgcctctggcgtgtacagcttcgactacagaggccagggcaccctggtcacagtctcttctacgcgtgggaaaccaattcccaaccctcttctgggactggattcaaccggcagcggcgaggacctgaagaacgtgttcccacctgaggtggccgtgttcgagcctagcgaggccgagatcagccacacccagaaagccaccctcgtgtgcctggctaccggcttctaccccgaccatgtggaactgtcttggtgggtcaacggcaaagaggtgcacagcggcgtgtgtaccgacccccagccactgaaagaacagcccgccctgaacgacagccggtactgcctgagcagcagactgagagtgtccgccaccttctggcagaacccccggaaccacttcagatgccaggtgcagttctacggcctgagcgagaacgacgagtggacccaggacagagccaagcccgtgacccagatcgtgtctgccgaagcctggggcagagccgattgcggctttaccagcgagagctaccagcagggcgtgctgagcgccaccatcctgtacgagatcctgctgggcaaggccaccctgtacgccgtgctggtgtctgccctggtgctgatggctatggtcaagcggaaggacagccggggaagggccaagcgatctggatctggagcaacaaacttctcactactcaaacaagcaggtgacgtggaggagaatcccgggccttctagaggccatatgaccgagtacaagcccacggtgcgcctcgccacccgcgacgacgtccccagggccgtacgcaccctcgccgccgcgttcgccgactaccccgccacgcgccacaccgtcgatccggaccgccacatcgagcgggtcaccgagctgcaagaactcttcctcacgcgcgtcgggctcgacatcggcaaggtgtgggtcgcggacgacggcgccgcggtggcggtctggaccacgccggagagcgtcgaagcgggggcggtgttcgccgagatcggcccgcgcatggccgagttgagcggttcccggctggccgcgcagcaacagatggaaggcctcctggcgccgcaccggcccaaggagcccgcgtggttcctggccaccgtcggcgtctcgcccgaccaccagggcaagggtctgggcagcgccgtcgtgctccccggagtggaggcggccgagcgcgccggggtgcccgccttcctggagacctccgcgccccgcaacctccccttctacgagcggctcggcttcaccgtcaccgccgacgtcgaggtgcccgaaggaccgcgcacctggtgcatgacccgcaagcccggtgcctga

SEQ ID NO: 7281 - DNA, 2583 bp, Artificial Sequence
  Synthetic Polynucloetide
atggccttaccagtgaccgccttgctcctgccgctggccttgctgctccacgccgccaggccggaagtgcagctggttgaatctggcggaggactggttcaggctggcggatctctgagactgtcttgtgccgccagcggcagaacctttagcatgggctggtttagacaggcccctggcaaagagagagagttcgtcgccgccatcacatactctggcggcagcccttactacgccgactctgtgaagggcagattcaccatcagccgggacaacgccaagaacaccgtgtacctccagatgaacagcctgaagcctgaggacaccgccgtgtactactgcgccgccaatccaacatacggcagcgactggaacgccgagaattggggccagggaacccaagtgacagtgtctagcctcgaggacctgaagaacgtgttcccacctgaggtggccgtgttcgagcctagcgaggccgagatcagccacacccagaaagccaccctcgtgtgcctggctaccggcttctaccccgaccatgtggaactgtcttggtgggtcaacggcaaagaggtgcacagcggcgtgtctaccgacccccagccactgaaagaacagcccgccctgaacgacagccggtactgcctgagcagcagactgagagtgtccgccaccttctggcagaacccccggaaccacttcagatgccaggtgcagttctacggcctgagcgagaacgacgagtggacccaggacagagccaagcccgtgacccagatcgtgtctgccgaagcctggggcagagccgattgcggctttaccagcgagagctaccagcagggcgtgctgagcgccaccatcctgtacgagatcctgctgggcaaggccaccctgtacgccgtgctggtgtctgccctggtgctgatggctatggtcaagcggaaggacagccggggaagggccaagcgatctggatctggagcaacaaacttctcactactcaaacaagcaggtgacgtggaggagaatcccgggcctactagtatggactggatttggcgcatccttttccttgtcggcgctgctaccggcgcgcattccttcgaagaagtgcagctggttgaatctggcggaggactggttcagcctggcggatctctgagactgtcttgtgccgccagcggcttcagcttcagcgacttttggatgagctgggtccgacaggcccctggcaaaggacttgaatgggtcgccacaatcagccaggccggcagcgagaaggactacgtggactctgtgaagggcagattcaccatcagccgggacaacgccaagaagtccctgtacctccagatgaacagcctgagagccgaggacaccgccgtgtactattgtgcctctggcgtgtacagcttcgactacagaggccagggcaccctggtcacagtctcttctacgcgtatccagaaccctgatcctgccgtgtaccagctgcgggatagcaagagcagcgacaagagcgtgtgtctgttcaccgacttcgacagccagaccaacgtgtcccagagcaaggactccgacgtgtacatcaccgataagaccgtgctggacatgcggagcatggacttcaagagcaactccgccgtggcctggtccaacaagtccgatttcgcctgcgccaacgccttcaacaacagcattatccccgaggacacattcttcccaagccccgagagcagctgcgacgtgaagctggtggaaaagagcttcgagacagacaccaacctgaacttccagaacctgagcgtgatcggcttcagaatcctgctgctgaaagtggccggctttaacctgctgatgaccctgcggctgtggtccagccgcgccaagagaagcggatctggcgtgaagcagaccctgaatttcgacctgctgaagctggctggcgacgtggaatccaacccaggcccttctagaggccatatgaccgagtacaagcccacggtgcgcctcgccacccgcgacgacgtccccagggccgtacgcaccctcgccgccgcgttcgccgactaccccgccacgcgccacaccgtcgatccggaccgccacatcgagcgggtcaccgagctgcaagaactcttcctcacgcgcgtcgggctcgacatcggcaaggtgtgggtcgcggacgacggcgccgcggtggcggtctggaccacgccggagagcgtcgaagcgggggcggtgttcgccgagatcggcccgcgcatggccgagttgagcggttcccggctggccgcgcagcaacagatggaaggcctcctggcgccgcaccggcccaaggagcccgcgtggttcctggccaccgtcggcgtctcgcccgaccaccagggcaagggtctgggcagcgccgtcgtgctccccggagtggaggcggccgagcgcgccggggtgcccgccttcctggagacctccgcgccccgcaacctccccttctacgagcggctcggcttcaccgtcaccgccgacgtcgaggtgcccgaaggaccgcgcacctggtgcatgacccgcaagcccggtgcctga

SEQ ID NO: 7282 - DNA, 2829 bp, Artificial Sequence
  Synthetic Polynucloetide
atggccttaccagtgaccgccttgctcctgccgctggccttgctgctccacgccgccaggccggaagtgcagctggttgaatctggcggaggactggttcaggctggcggatctctgagactgtcttgtgccgccagcggcagaacctttagcatgggctggtttagacaggcccctggcaaagagagagagttcgtcgccgccatcacatactctggcggcagcccttactacgccgactctgtgaagggcagattcaccatcagccgggacaacgccaagaacaccgtgtacctccagatgaacagcctgaagcctgaggacaccgccgtgtactactgcgccgccaatccaacatacggcagcgactggaacgccgagaattggggccagggaacccaagtgacagtgtctagcctcgaggacctgaagaacgtgttcccacctgaggtggccgtgttcgagcctagcgaggccgagatcagccacacccagaaagccaccctcgtgtgcctggctaccggcttctaccccgaccatgtggaactgtcttggtgggtcaacggcaaagaggtgcacagcggcgtgtctaccgacccccagccactgaaagaacagcccgccctgaacgacagccggtactgcctgagcagcagactgagagtgtccgccaccttctggcagaacccccggaaccacttcagatgccaggtgcagttctacggcctgagcgagaacgacgagtggacccaggacagagccaagcccgtgacccagatcgtgtctgccgaagcctggggcagagccgattgcggctttaccagcgagagctaccagcagggcgtgctgagcgccaccatcctgtacgagatcctgctgggcaaggccaccctgtacgccgtgctggtgtctgccctggtgctgatggctatggtcaagcggaaggacagccggggaagggccaagcgatctggatctggagcaacaaacttctcactactcaaacaagcaggtgacgtggaggagaatcccgggcctactagtatggactggatttggcgcatccttttccttgtcggcgctgctaccggcgcgcattccttcgaagaagtgcagctggttgaatctggcggaggactggttcagcctggcggatctctgagactgtcttgtgccgccagcggcttcagcttcagcgacttttggatgagctgggtccgacaggcccctggcaaaggacttgaatgggtcgccacaatcagccaggccggcagcgagaaggactacgtggactctgtgaagggcagattcaccatcagccgggacaacgccaagaagtccctgtacctccagatgaacagcctgagagccgaggacaccgccgtgtactattgtgcctctggcgtgtacagcttcgactacagaggccagggcaccctggtcacagtctcttctacgcgtgagcagaaactgatctcggaagaggatgggagcggcaccccattcccttctctggcccctcccatcatgctgctggtggacggcaagcagcagatggtggtcgtgtgcctggtgctggatgtggccccacctggactggacagccccatctggtttagcgccggcaatggctctgccctggacgcctttacctacggcccaagccctgccaccgatggcacctggacaaatctggcccacctgagcctgcccagcgaggaactggcttcttgggagcctctcgtgtgccacacaggacctggcgctgagggacacagcagatccacccagcctatgcacctgtctggcgaggccagcaccgccagaacctgtcctcaggaacctctgagaggcacccctggcggagcactgtggctgggagtgctgagactgctgctgttcaagctgctgctgtttgacctgctgctgacctgctcctgtctgtgcgatcctgccggccctctgccttctcctgccaccaccacaagactgagagccctgggcagccacagactgcaccctgccacagagacaggcggcagagaggccacaagcagccctagaccccagcccagagacagaagatggggcgataccccccctggcagaaagcctggatctccagtccgcgccaagagaagcggatctggcgtgaagcagaccctgaatttcgacctgctgaagctggctggcgacgtggaatccaacccaggcccttctagaggccatatgaccgagtacaagcccacggtgcgcctcgccacccgcgacgacgtccccagggccgtacgcaccctcgccgccgcgttcgccgactaccccgccacgcgccacaccgtcgatccggaccgccacatcgagcgggtcaccgagctgcaagaactcttcctcacgcgcgtcgggctcgacatcggcaaggtgtgggtcgcggacgacggcgccgcggtggcggtctggaccacgccggagagcgtcgaagcgggggcggtgttcgccgagatcggcccgcgcatggccgagttgagcggttcccggctggccgcgcagcaacagatggaaggcctcctggcgccgcaccggcccaaggagcccgcgtggttcctggccaccgtcggcgtctcgcccgaccaccagggcaagggtctgggcagcgccgtcgtgctccccggagtggaggcggccgagcgcgccggggtgcccgccttcctggagacctccgcgccccgcaacctccccttctacgagcggctcggcttcaccgtcaccgccgacgtcgaggtgcccgaaggaccgcgcacctggtgcatgacccgcaagcccggtgcctga

SEQ ID NO: 7283 - DNA, 2868 bp, Artificial Sequence
  Synthetic Polynucloetide
atggccttaccagtgaccgccttgctcctgccgctggccttgctgctccacgccgccaggccgctcgaggacctgaagaacgtgttcccacctgaggtggccgtgttcgagcctagcgaggccgagatcagccacacccagaaagccaccctcgtgtgcctggctaccggcttctaccccgaccatgtggaactgtcttggtgggtcaacggcaaagaggtgcacagcggcgtgtctaccgacccccagccactgaaagaacagcccgccctgaacgacagccggtactgcctgagcagcagactgagagtgtccgccaccttctggcagaacccccggaaccacttcagatgccaggtgcagttctacggcctgagcgagaacgacgagtggacccaggacagagccaagcccgtgacccagatcgtgtctgccgaagcctggggcagagccgattgcggctttaccagcgagagctaccagcagggcgtgctgagcgccaccatcctgtacgagatcctgctgggcaaggccaccctgtacgccgtgctggtgtctgccctggtgctgatggctatggtcaagcggaaggacagccggggaagggccaagcgatctggatctggagcaacaaacttctcactactcaaacaagcaggtgacgtggaggagaatcccgggcctactagcatggccttaccagtgaccgccttgctcctgccgctggccttgctgctccacgccgccaggccggaagtgcagctggttgaatctggcggaggactggttcaggctggcggatctctgagactgtcttgtgccgccagcggcagaacctttagcatgggctggtttagacaggcccctggcaaagagagagagttcgtcgccgccatcacatactctggcggcagcccttactacgccgactctgtgaagggcagattcaccatcagccgggacaacgccaagaacaccgtgtacctccagatgaacagcctgaagcctgaggacaccgccgtgtactactgcgccgccaatccaacatacggcagcgactggaacgccgagaattggggccagggaacccaagtgacagtgtctagcctcgagagcggcggaggcggatctttcgaagaagtgcagctggttgaatctggcggaggactggttcagcctggcggatctctgagactgtcttgtgccgccagcggcttcagcttcagcgacttttggatgagctgggtccgacaggcccctggcaaaggacttgaatgggtcgccacaatcagccaggccggcagcgagaaggactacgtggactctgtgaagggcagattcaccatcagccgggacaacgccaagaagtccctgtacctccagatgaacagcctgagagccgaggacaccgccgtgtactattgtgcctctggcgtgtacagcttcgactacagaggccagggcaccctggtcacagtctcttctacgcgtgagcagaaactgatctcggaagaggatctggggagcggcaccccattcccttctctggcccctcccatcatgctgctggtggacggcaagcagcagatggtggtcgtgtgcctggtgctggatgtggccccacctggactggacagccccatctggtttagcgccggcaatggctctgccctggacgcctttacctacggcccaagccctgccaccgatggcacctggacaaatctggcccacctgagcctgcccagcgaggaactggcttcttgggagcctctcgtgtgccacacaggacctggcgctgagggacacagcagatccacccagcctatgcacctgtctggcgaggccagcaccgccagaacctgtcctcaggaacctctgagaggcacccctggcggagcactgtggctgggagtgctgagactgctgctgttcaagctgctgctgtttgacctgctgctgacctgctcctgtctgtgcgatcctgccggccctctgccttctcctgccaccaccacaagactgagagccctgggcagccacagactgcaccctgccacagagacaggcggcagagaggccacaagcagccctagaccccagcccagagacagaagatggggcgataccccccctggcagaaagcctggatctccagtccgcgccaagagaagcggatctggcgtgaagcagaccctgaatttcgacctgctgaagctggctggcgacgtggaatccaacccaggcccttctagatctagaggccatatgaccgagtacaagcccacggtgcgcctcgccacccgcgacgacgtccccagggccgtacgcaccctcgccgccgcgttcgccgactaccccgccacgcgccacaccgtcgatccggaccgccacatcgagcgggtcaccgagctgcaagaactcttcctcacgcgcgtcgggctcgacatcggcaaggtgtgggtcgcggacgacggcgccgcggtggcggtctggaccacgccggagagcgtcgaagcgggggcggtgttcgccgagatcggcccgcgcatggccgagttgagcggttcccggctggccgcgcagcaacagatggaaggcctcctggcgccgcaccggcccaaggagcccgcgtggttcctggccaccgtcggcgtctcgcccgaccaccagggcaagggtctgggcagcgccgtcgtgctccccggagtggaggcggccgagcgcgccggggtgcccgccttcctggagacctccgcgccccgcaacctccccttctacgagcggctcggcttcaccgtcaccgccgacgtcgaggtgcccgaaggaccgcgcacctggtgcatgacccgcaagcccggtgcctga

SEQ ID NO: 7284 - DNA, 2694 bp, Artificial Sequence
  Synthetic Polynucloetide
atggccttaccagtgaccgccttgctcctgccgctggccttgctgctccacgccgccaggccggaagtgcagctggttgaatctggcggaggactggttcaggctggcggatctctgagactgtcttgtgccgccagcggcagaacctttagcatgggctggtttagacaggcccctggcaaagagagagagttcgtcgccgccatcacatactctggcggcagcccttactacgccgactctgtgaagggcagattcaccatcagccgggacaacgccaagaacaccgtgtacctccagatgaacagcctgaagcctgaggacaccgccgtgtactactgcgccgccaatccaacatacggcagcgactggaacgccgagaattggggccagggaacccaagtgacagtgtctagcctcgaggggaaaccaattcccaaccctcttctgggactggattcaaccggcagcggcgacaagcagctggacgccgacgtgtcccccaagcctaccatcttcctgccctctatcgccgagacaaagctccagaaggccggcacctacctgtgcctgctggaaaagttcttcccagatgtgattaagatccactggcaggaaaagaagtccaacaccatcctgggcagccaggaaggcaacaccatgaagaccaacgacacctacatgaagttcagctggctgaccgtgcccgagaagtccctggacaaagaacacagatgcatcgtgcggcacgaaaacaacaagaacggcgtggaccaggaaatcatcttcccacccatcaagaccgatgtgattacaatggaccccaaggacaactgctccaaggacgccaacgataccctgctgctccagctgaccaacaccagcgcctactacatgtacttgttgctgctgctgaagtccgtggtgtacttcgccatcatcacatgctgcctgctgcggagaaccgccttctgctgcaacggcgagaagtctagggccaagcgatctggatctggagcaacaaacttctcactactcaaacaagcaggtgacgtggaggagaatcccgggcctactagtatggactggatttggcgcatccttttccttgtcggcgctgctaccggcgcgcattccttcgaagaagtgcagctggttgaatctggcggaggactggttcagcctggcggatctctgagactgtcttgtgccgccagcggcttcagcttcagcgacttttggatgagctgggtccgacaggcccctggcaaaggacttgaatgggtcgccacaatcagccaggccggcagcgagaaggactacgtggactctgtgaagggcagattcaccatcagccgggacaacgccaagaagtccctgtacctccagatgaacagcctgagagccgaggacaccgccgtgtactattgtgcctctggcgtgtacagcttcgactacagaggccagggcaccctggtcacagtctcttctacgcgtgagcagaaactgatctcggaagaggatgggagcggcagccagcctcacaccaagcccagcgtgttcgtgatgaagaacggcaccaacgtggcctgcctcgtgaaagagttctaccccaaggacatcaggatcaacctggtgtccagcaagaagatcaccgagttcgaccccgccatcgtgatctcccccagcggcaagtacaacgccgtgaagctggggaagtacgaggacagcaacagcgtgacctgctccgtgcagcacgacaacaagaccgtgcacagcaccgactttgaagtgaaaaccgactccaccgaccacgtgaagcccaaagagacagagaacaccaagcagcccagcaagagctgccacaagcccaaggccatcgtgcacaccgagaaagtgaacatgatgagcctgaccgtgctgggcctgcggatgctgttcgccaaaaccgtggccgtgaacttcctgctgaccgccaagctgttcttcctccgcgccaagagaagcggatctggcgtgaagcagaccctgaatttcgacctgctgaagctggctggcgacgtggaatccaacccaggcccttctagaggccatatgaccgagtacaagcccacggtgcgcctcgccacccgcgacgacgtccccagggccgtacgcaccctcgccgccgcgttcgccgactaccccgccacgcgccacaccgtcgatccggaccgccacatcgagcgggtcaccgagctgcaagaactcttcctcacgcgcgtcgggctcgacatcggcaaggtgtgggtcgcggacgacggcgccgcggtggcggtctggaccacgccggagagcgtcgaagcgggggcggtgttcgccgagatcggcccgcgcatggccgagttgagcggttcccggctggccgcgcagcaacagatggaaggcctcctggcgccgcaccggcccaaggagcccgcgtggttcctggccaccgtcggcgtctcgcccgaccaccagggcaagggtctgggcagcgccgtcgtgctccccggagtggaggcggccgagcgcgccggggtgcccgccttcctggagacctccgcgccccgcaacctccccttctacgagcggctcggcttcaccgtcaccgccgacgtcgaggtgcccgaaggaccgcgcacctggtgcatgacccgcaagcccggtgcctga

SEQ ID NO: 7285 - DNA, 1905 bp, Artificial Sequence
  Synthetic Polynucloetide
atggccttaccagtgaccgccttgctcctgccgctggccttgctgctccacgccgccaggccggaagtgcagctggttgaatctggcggaggactggttcaggctggcggatctctgagactgtcttgtgccgccagcggcagaacctttagcatgggctggtttagacaggcccctggcaaagagagagagttcgtcgccgccatcacatactctggcggcagcccttactacgccgactctgtgaagggcagattcaccatcagccgggacaacgccaagaacaccgtgtacctccagatgaacagcctgaagcctgaggacaccgccgtgtactactgcgccgccaatccaacatacggcagcgactggaacgccgagaattggggccagggaacccaagtgacagtgtctagcctcgagagccagcctcacaccaagcccagcgtgttcgtgatgaagaacggcaccaacgtggcctgcctcgtgaaagagttctaccccaaggacatcaggatcaacctggtgtccagcaagaagatcaccgagttcgaccccgccatcgtgatctcccccagcggcaagtacaacgccgtgaagctggggaagtacgaggacagcaacagcgtgacctgctccgtgcagcacgacaacaagaccgtgcacagcaccgactttgaagtgaaaaccgactccaccgaccacgtgaagcccaaagagacagagaacaccaagcagcccagcaagagctgccacaagcccaaggccatcgtgcacaccgagaaagtgaacatgatgagcctgaccgtgctgggcctgcggatgctgttcgccaaaaccgtggccgtgaacttcctgctgaccgccaagctgttcttcctcagggccaagcgatctggatctggagcaacaaacttctcactactcaaacaagcaggtgacgtggaggagaatcccgggcctactagtatggactggatttggcgcatccttttccttgtcggcgctgctaccggcgcgcattccttcgaagaagtgcagctggttgaatctggcggaggactggttcagcctggcggatctctgagactgtcttgtgccgccagcggcttcagcttcagcgacttttggatgagctgggtccgacaggcccctggcaaaggacttgaatgggtcgccacaatcagccaggccggcagcgagaaggactacgtggactctgtgaagggcagattcaccatcagccgggacaacgccaagaagtccctgtacctccagatgaacagcctgagagccgaggacaccgccgtgtactattgtgcctctggcgtgtacagcttcgactacagaggccagggcaccctggtcacagtctcttctacgcgtgacaagcagctggacgccgacgtgtcccccaagcctaccatcttcctgccctctatcgccgagacaaagctccagaaggccggcacctacctgtgcctgctggaaaagttcttcccagatgtgattaagatccactggcaggaaaagaagtccaacaccatcctgggcagccaggaaggcaacaccatgaagaccaacgacacctacatgaagttcagctggctgaccgtgcccgagaagtccctggacaaagaacacagatgcatcgtgcggcacgaaaacaacaagaacggcgtggaccaggaaatcatcttcccacccatcaagaccgatgtgattacaatggaccccaaggacaactgctccaaggacgccaacgataccctgctgctccagctgaccaacaccagcgcctactacatgtacttgttgctgctgctgaagtccgtggtgtacttcgccatcatcacatgctgcctgctgcggagaaccgccttctgctgcaacggcgagaagtct

SEQ ID NO: 7286 - DNA, 2724 bp, Artificial Sequence
  Synthetic Polynucloetide
atggccttaccagtgaccgccttgctcctgccgctggccttgctgctccacgccgccaggccgctcgaggggaaaccaattcccaaccctcttctgggactggattcaaccggcagcggcgacaagcagctggacgccgacgtgtcccccaagcctaccatcttcctgccctctatcgccgagacaaagctccagaaggccggcacctacctgtgcctgctggaaaagttcttcccagatgtgattaagatccactggcaggaaaagaagtccaacaccatcctgggcagccaggaaggcaacaccatgaagaccaacgacacctacatgaagttcagctggctgaccgtgcccgagaagtccctggacaaagaacacagatgcatcgtgcggcacgaaaacaacaagaacggcgtggaccaggaaatcatcttcccacccatcaagaccgatgtgattacaatggaccccaaggacaactgctccaaggacgccaacgataccctgctgctccagctgaccaacaccagcgcctactacatgtacttgttgctgctgctgaagtccgtggtgtacttcgccatcatcacatgctgcctgctgcggagaaccgccttctgctgcaacggcgagaagtctagggccaagcgatctggatctggagcaacaaacttctcactactcaaacaagcaggtgacgtggaggagaatcccgggcctactagcatggccttaccagtgaccgccttgctcctgccgctggccttgctgctccacgccgccaggccggaagtgcagctggttgaatctggcggaggactggttcaggctggcggatctctgagactgtcttgtgccgccagcggcagaacctttagcatgggctggtttagacaggcccctggcaaagagagagagttcgtcgccgccatcacatactctggcggcagcccttactacgccgactctgtgaagggcagattcaccatcagccgggacaacgccaagaacaccgtgtacctccagatgaacagcctgaagcctgaggacaccgccgtgtactactgcgccgccaatccaacatacggcagcgactggaacgccgagaattggggccagggaacccaagtgacagtgtctagcctcgagagcggcggaggcggatctttcgaagaagtgcagctggttgaatctggcggaggactggttcagcctggcggatctctgagactgtcttgtgccgccagcggcttcagcttcagcgacttttggatgagctgggtccgacaggcccctggcaaaggacttgaatgggtcgccacaatcagccaggccggcagcgagaaggactacgtggactctgtgaagggcagattcaccatcagccgggacaacgccaagaagtccctgtacctccagatgaacagcctgagagccgaggacaccgccgtgtactattgtgcctctggcgtgtacagcttcgactacagaggccagggcaccctggtcacagtctcttctacgcgtgagcagaaactgatctcggaagaggatgggagcggcagccagcctcacaccaagcccagcgtgttcgtgatgaagaacggcaccaacgtggcctgcctcgtgaaagagttctaccccaaggacatcaggatcaacctggtgtccagcaagaagatcaccgagttcgaccccgccatcgtgatctcccccagcggcaagtacaacgccgtgaagctggggaagtacgaggacagcaacagcgtgacctgctccgtgcagcacgacaacaagaccgtgcacagcaccgactttgaagtgaaaaccgactccaccgaccacgtgaagcccaaagagacagagaacaccaagcagcccagcaagagctgccacaagcccaaggccatcgtgcacaccgagaaagtgaacatgatgagcctgaccgtgctgggcctgcggatgctgttcgccaaaaccgtggccgtgaacttcctgctgaccgccaagctgttcttcctccgcgccaagagaagcggatctggcgtgaagcagaccctgaatttcgacctgctgaagctggctggcgacgtggaatccaacccaggcccttctagaggccatatgaccgagtacaagcccacggtgcgcctcgccacccgcgacgacgtccccagggccgtacgcaccctcgccgccgcgttcgccgactaccccgccacgcgccacaccgtcgatccggaccgccacatcgagcgggtcaccgagctgcaagaactcttcctcacgcgcgtcgggctcgacatcggcaaggtgtgggtcgcggacgacggcgccgcggtggcggtctggaccacgccggagagcgtcgaagcgggggcggtgttcgccgagatcggcccgcgcatggccgagttgagcggttcccggctggccgcgcagcaacagatggaaggcctcctggcgccgcaccggcccaaggagcccgcgtggttcctggccaccgtcggcgtctcgcccgaccaccagggcaagggtctgggcagcgccgtcgtgctccccggagtggaggcggccgagcgcgccggggtgcccgccttcctggagacctccgcgccccgcaacctccccttctacgagcggctcggcttcaccgtcaccgccgacgtcgaggtgcccgaaggaccgcgcacctggtgcatgacccgcaagcccggtgcctga

SEQ ID NO: 7287 - DNA, 3114 bp, Artificial Sequence
  Synthetic Polynucloetide
atggccttaccagtgaccgccttgctcctgccgctggccttgctgctccacgccgccaggccggaagtgcagctggttgaatctggcggaggactggttcaggctggcggatctctgagactgtcttgtgccgccagcggcagaacctttagcatgggctggtttagacaggcccctggcaaagagagagagttcgtcgccgccatcacatactctggcggcagcccttactacgccgactctgtgaagggcagattcaccatcagccgggacaacgccaagaacaccgtgtacctccagatgaacagcctgaagcctgaggacaccgccgtgtactactgcgccgccaatccaacatacggcagcgactggaacgccgagaattggggccagggaacccaagtgacagtgtctagcggacagcctaaggccaatcctaccgtgacactgttccctccaagcagcgaagaactccaggccaacaaggccacacttgtgtgcctgatctccgacttctaccctggggctgtgacagtggcttggaaggccgatggatctcctgtgaaagccggcgtggaaaccaccaagccatccaagcagagcaacaacaaatacgccgccagctcctacctgagcctgacacctgagcagtggaagtcccacagatcctacagctgccaagtgacccacgaaggcagcaccgtggaaaagacagtggcccctacagagtgcagcggatcccagagcttcggcctgctggaccccaagctgtgctacctgctggatggcatcctgttcatctacggcgtgatcctgaccgccctgttcctgagagtgaagttcagcagaagcgccgacgcccctgcctaccagcagggacagaaccaactgtacaacgagctgaacctgggcagacgggaagagtacgacgtgctggacaagcggagaggcagggaccctgagatgggcggaaagccccagcggagaaagaacccccaggaaggactgtataacgaactccagaaagacaagatggccgaagcctacagcgagatcggcatgaagggcgagcggagaagaggcaagggccacgatggcctgtaccagggcctgagcaccgccaccaaggacacctatgacgccctgcacatgcaggccctgcctccaagaagggccaagcgatctggatctggagcaacaaacttctcactactcaaacaagcaggtgacgtggaggagaatcccgggcctactagtatggactggatttggcgcatccttttccttgtcggcgctgctaccggcgcgcattccttcgaagaagtgcagctggttgaatctggcggaggactggttcagcctggcggatctctgagactgtcttgtgccgccagcggcttcagcttcagcgacttttggatgagctgggtccgacaggcccctggcaaaggacttgaatgggtcgccacaatcagccaggccggcagcgagaaggactacgtggactctgtgaagggcagattcaccatcagccgggacaacgccaagaagtccctgtacctccagatgaacagcctgagagccgaggacaccgccgtgtactattgtgcctctggcgtgtacagcttcgactacagaggccagggcaccctggtcacagtctcttctgcctctacaaagggaccctccgtgtttcctctggctcccagcagcaagtctacaagcggaggaacagccgctctgggctgcctggtcaaggattactttcccgagcctgtgaccgtgtcctggaatagcggagcactgacaagcggcgtgcacacctttccagccgtgctgcaaagcagcggcctgtactctctgagcagcgtggtcacagtgcctagctctagcctgggcacccagacctacatctgcaatgtgaaccacaagcctagcaacaccaaggtggacaagagagtggaacccaagagctgtggtacccagagttttgggttgttggaccctaaattgtgctatctgttggacggaatcctgttcatttacggagtgatcctgaccgcattgttcctgcgggttaagttttccagatccgcagacgcacccgcttaccaacaagggcagaaccaactctacaatgaacttaatttggggcggagggaagagtacgacgttctggacaaaaggaggggacgagatcccgagatgggcggaaagcctcagcgaaggaagaatccgcaagaggggctttataacgaactccagaaagataaaatggcagaagcctatagtgagattgggatgaagggagaaaggaggaggggtaaaggtcacgatgggttgtaccaaggattgagcacagccactaaagatacctatgatgcgctccacatgcaggccctgccgccaagacgcgccaagagaagcggatctggcgtgaagcagaccctgaatttcgacctgctgaagctggctggcgacgtggaatccaacccaggcccttctagaggccatatgaccgagtacaagcccacggtgcgcctcgccacccgcgacgacgtccccagggccgtacgcaccctcgccgccgcgttcgccgactaccccgccacgcgccacaccgtcgatccggaccgccacatcgagcgggtcaccgagctgcaagaactcttcctcacgcgcgtcgggctcgacatcggcaaggtgtgggtcgcggacgacggcgccgcggtggcggtctggaccacgccggagagcgtcgaagcgggggcggtgttcgccgagatcggcccgcgcatggccgagttgagcggttcccggctggccgcgcagcaacagatggaaggcctcctggcgccgcaccggcccaaggagcccgcgtggttcctggccaccgtcggcgtctcgcccgaccaccagggcaagggtctgggcagcgccgtcgtgctccccggagtggaggcggccgagcgcgccggggtgcccgccttcctggagacctccgcgccccgcaacctccccttctacgagcggctcggcttcaccgtcaccgccgacgtcgaggtgcccgaaggaccgcgcacctggtgcatgacccgcaagcccggtgcctga

SEQ ID NO: 7288 - DNA, 2469 bp, Artificial Sequence
  Synthetic Polynucloetide
atggccttaccagtgaccgccttgctcctgccgctggccttgctgctccacgccgccaggccggaagtgcagctggttgaatctggcggaggactggttcaggctggcggatctctgagactgtcttgtgccgccagcggcagaacctttagcatgggctggtttagacaggcccctggcaaagagagagagttcgtcgccgccatcacatactctggcggcagcccttactacgccgactctgtgaagggcagattcaccatcagccgggacaacgccaagaacaccgtgtacctccagatgaacagcctgaagcctgaggacaccgccgtgtactactgcgccgccaatccaacatacggcagcgactggaacgccgagaattggggccagggaacccaagtgacagtgtctagcctcgaggacctgaagaacgtgttcccacctgaggtggccgtgttcgagcctagcgaggccgagatcagccacacccagaaagccaccctcgtgtgcctggctaccggcttctaccccgaccatgtggaactgtcttggtgggtcaacggcaaagaggtgcacagcggcgtgtctaccgacccccagccactgaaagaacagcccgccctgaacgacagccggtactgcctgagcagcagactgagagtgtccgccaccttctggcagaacccccggaaccacttcagatgccaggtgcagttctacggcctgagcgagaacgacgagtggacccaggacagagccaagcccgtgacccagatcgtgtctgccgaagcctggggcagagccgattgcggatcccagagcttcggcctgctggaccccaagctgtgctacctgctggatggcatcctgttcatctacggcgtgatcctgaccgccctgttcctgagagtgaagttcagcagaagcgccgacgcccctgcctaccagcagggacagaaccaactgtacaacgagctgaacctgggcagacgggaagagtacgacgtgctggacaagcggagaggcagggaccctgagatgggcggaaagccccagcggagaaagaacccccaggaaggactgtataacgaactccagaaagacaagatggccgaagcctacagcgagatcggcatgaagggcgagcggagaagaggcaagggccacgatggcctgtaccagggcctgagcaccgccaccaaggacacctatgacgccctgcacatgcaggccctgcctccaagaagggccaagcgatctggatctggagcaacaaacttctcactactcaaacaagcaggtgacgtggaggagaatcccgggcctactagtatggactggatttggcgcatccttttccttgtcggcgctgctaccggcgcgcattccttcgaagaagtgcagctggttgaatctggcggaggactggttcagcctggcggatctctgagactgtcttgtgccgccagcggcttcagcttcagcgacttttggatgagctgggtccgacaggcccctggcaaaggacttgaatgggtcgccacaatcagccaggccggcagcgagaaggactacgtggactctgtgaagggcagattcaccatcagccgggacaacgccaagaagtccctgtacctccagatgaacagcctgagagccgaggacaccgccgtgtactattgtgcctctggcgtgtacagcttcgactacagaggccagggcaccctggtcacagtctcttctacgcgtatccagaaccctgatcctgccgtgtaccagctgcgggatagcaagagcagcgacaagagcgtgtgtctgttcaccgacttcgacagccagaccaacgtgtcccagagcaaggactccgacgtgtacatcaccgataagaccgtgctggacatgcggagcatggacttcaagagcaactccgccgtggcctggtccaacaagtccgatttcgcctgcgccaacgccttcaacaacagcattatccccgaggacacattcttcccaagccccgagagcagctgcggtacccagagttttgggttgttggaccctaaattgtgctatctgttggacggaatcctgttcatttacggagtgatcctgaccgcattgttcctgcgggttaagttttccagatccgcagacgcacccgcttaccaacaagggcagaaccaactctacaatgaacttaatttggggcggagggaagagtacgacgttctggacaaaaggaggggacgagatcccgagatgggcggaaagcctcagcgaaggaagaatccgcaagaggggctttataacgaactccagaaagataaaatggcagaagcctatagtgagattgggatgaagggagaaaggaggaggggtaaaggtcacgatgggttgtaccaaggattgagcacagccactaaagatacctatgatgcgctccacatgcaggccctgccgccaaga

SEQ ID NO: 7289 - DNA, 2469 bp, Artificial Sequence
  Synthetic Polynucloetide
atggccttaccagtgaccgccttgctcctgccgctggccttgctgctccacgccgccaggccggaagtgcagctggttgaatctggcggaggactggttcaggctggcggatctctgagactgtcttgtgccgccagcggcagaacctttagcatgggctggtttagacaggcccctggcaaagagagagagttcgtcgccgccatcacatactctggcggcagcccttactacgccgactctgtgaagggcagattcaccatcagccgggacaacgccaagaacaccgtgtacctccagatgaacagcctgaagcctgaggacaccgccgtgtactactgcgccgccaatccaacatacggcagcgactggaacgccgagaattggggccagggaacccaagtgacagtgtctagcctcgaggacctgaagaacgtgttcccacctgaggtggccgtgttcgagcctagcaaggccgagatcgcccacacccagaaagccaccctcgtgtgcctggctaccggcttctaccccgaccatgtggaactgtcttggtgggtcaacggcaaagaggtgcacagcggcgtgtgtaccgacccccagccactgaaagaacagcccgccctgaacgacagccggtactgcctgagcagcagactgagagtgtccgccaccttctggcagaacccccggaaccacttcagatgccaggtgcagttctacggcctgagcgagaacgacgagtggacccaggacagagccaagcccgtgacccagatcgtgtctgccgaagcctggggcagagccgattgcggatcccagagcttcggcctgctggaccccaagctgtgctacctgctggatggcatcctgttcatctacggcgtgatcctgaccgccctgttcctgagagtgaagttcagcagaagcgccgacgcccctgcctaccagcagggacagaaccaactgtacaacgagctgaacctgggcagacgggaagagtacgacgtgctggacaagcggagaggcagggaccctgagatgggcggaaagccccagcggagaaagaacccccaggaaggactgtataacgaactccagaaagacaagatggccgaagcctacagcgagatcggcatgaagggcgagcggagaagaggcaagggccacgatggcctgtaccagggcctgagcaccgccaccaaggacacctatgacgccctgcacatgcaggccctgcctccaagaagggccaagcgatctggatctggagcaacaaacttctcactactcaaacaagcaggtgacgtggaggagaatcccgggcctactagtatggactggatttggcgcatccttttccttgtcggcgctgctaccggcgcgcattccttcgaagaagtgcagctggttgaatctggcggaggactggttcagcctggcggatctctgagactgtcttgtgccgccagcggcttcagcttcagcgacttttggatgagctgggtccgacaggcccctggcaaaggacttgaatgggtcgccacaatcagccaggccggcagcgagaaggactacgtggactctgtgaagggcagattcaccatcagccgggacaacgccaagaagtccctgtacctccagatgaacagcctgagagccgaggacaccgccgtgtactattgtgcctctggcgtgtacagcttcgactacagaggccagggcaccctggtcacagtctcttctacgcgtatccagaaccctgatcctgccgtgtaccagctgcgggatagcaagagcagcgacaagagcgtgtgtctgttcaccgacttcgacagccagaccaacgtgtcccagagcaaggactccgacgtgtacatcaccgataagtgcgtgctggacatgcggagcatggacttcaagagcaactccgccgtggcctggtccaacaagtccgatttcgcctgcgccaacgccttcaacaacagcattatccccgaggacacattcttcccaagcagcgacgtgccctgcggtacccagagttttgggttgttggaccctaaattgtgctatctgttggacggaatcctgttcatttacggagtgatcctgaccgcattgttcctgcgggttaagttttccagatccgcagacgcacccgcttaccaacaagggcagaaccaactctacaatgaacttaatttggggcggagggaagagtacgacgttctggacaaaaggaggggacgagatcccgagatgggcggaaagcctcagcgaaggaagaatccgcaagaggggctttataacgaactccagaaagataaaatggcagaagcctatagtgagattgggatgaagggagaaaggaggaggggtaaaggtcacgatgggttgtaccaaggattgagcacagccactaaagatacctatgatgcgctccacatgcaggccctgccgccaaga

SEQ ID NO: 7290 - DNA, 2682 bp, Artificial Sequence
  Synthetic Polynucloetide
atggccttaccagtgaccgccttgctcctgccgctggccttgctgctccacgccgccaggccggaagtgcagctggttgaatctggcggaggactggttcaggctggcggatctctgagactgtcttgtgccgccagcggcagaacctttagcatgggctggtttagacaggcccctggcaaagagagagagttcgtcgccgccatcacatactctggcggcagcccttactacgccgactctgtgaagggcagattcaccatcagccgggacaacgccaagaacaccgtgtacctccagatgaacagcctgaagcctgaggacaccgccgtgtactactgcgccgccaatccaacatacggcagcgactggaacgccgagaattggggccagggaacccaagtgacagtgtctagcctcgaggggaaaccaattcccaaccctcttctgggactggattcaaccggcagcggcgaggacctgaagaacgtgttcccacctgaggtggccgtgttcgagcctagcgaggccgagatcagccacacccagaaagccaccctcgtgtgcctggctaccggcttctaccccgaccatgtggaactgtcttggtgggtcaacggcaaagaggtgcacagcggcgtgtctaccgacccccagccactgaaagaacagcccgccctgaacgacagccggtactgcctgagcagcagactgagagtgtccgccaccttctggcagaacccccggaaccacttcagatgccaggtgcagttctacggcctgagcgagaacgacgagtggacccaggacagagccaagcccgtgacccagatcgtgtctgccgaagcctggggcagagccgattgcggatcccagagcttcggcctgctggaccccaagctgtgctacctgctggatggcatcctgttcatctacggcgtgatcctgaccgccctgttcctgagagtgaagttcagcagaagcgccgacgcccctgcctaccagcagggacagaaccaactgtacaacgagctgaacctgggcagacgggaagagtacgacgtgctggacaagcggagaggcagggaccctgagatgggcggaaagccccagcggagaaagaacccccaggaaggactgtataacgaactccagaaagacaagatggccgaagcctacagcgagatcggcatgaagggcgagcggagaagaggcaagggccacgatggcctgtaccagggcctgagcaccgccaccaaggacacctatgacgccctgcacatgcaggccctgcctccaagaagggccaagcgatctggatctggagcaacaaacttctcactactcaaacaagcaggtgacgtggaggagaatcccgggcctactagtatggactggatttggcgcatccttttccttgtcggcgctgctaccggcgcgcattccttcgaagaagtgcagctggttgaatctggcggaggactggttcagcctggcggatctctgagactgtcttgtgccgccagcggcttcagcttcagcgacttttggatgagctgggtccgacaggcccctggcaaaggacttgaatgggtcgccacaatcagccaggccggcagcgagaaggactacgtggactctgtgaagggcagattcaccatcagccgggacaacgccaagaagtccctgtacctccagatgaacagcctgagagccgaggacaccgccgtgtactattgtgcctctggcgtgtacagcttcgactacagaggccagggcaccctggtcacagtctcttctacgcgtgagcagaaactgatctcggaagaggatgggagcggcatccagaaccctgatcctgccgtgtaccagctgcgggatagcaagagcagcgacaagagcgtgtgtctgttcaccgacttcgacagccagaccaacgtgtcccagagcaaggactccgacgtgtacatcaccgataagaccgtgctggacatgcggagcatggacttcaagagcaactccgccgtggcctggtccaacaagtccgatttcgcctgcgccaacgccttcaacaacagcattatccccgaggacacattcttcccaagccccgagagcagctgcggtacccagagttttgggttgttggaccctaaattgtgctatctgttggacggaatcctgttcatttacggagtgatcctgaccgcattgttcctgaggagcaagcggtcacggctgctccacagcgattacatgaatatgacaccacgaagaccgggtcctactcgcaaacactaccaaccctacgcacctccccgcgactttgcagcgtaccgatctcgggttaagttttccagatccgcagacgcacccgcttaccaacaagggcagaaccaactctacaatgaacttaatttggggcggagggaagagtacgacgttctggacaaaaggaggggacgagatcccgagatgggcggaaagcctcagcgaaggaagaatccgcaagaggggctttataacgaactccagaaagataaaatggcagaagcctatagtgagattgggatgaagggagaaaggaggaggggtaaaggtcacgatgggttgtaccaaggattgagcacagccactaaagatacctatgatgcgctccacatgcaggccctgccgccaaga

SEQ ID NO: 7291 - DNA, 2805 bp, Artificial Sequence
  Synthetic Polynucloetide
atggccttaccagtgaccgccttgctcctgccgctggccttgctgctccacgccgccaggccggaagtgcagctggttgaatctggcggaggactggttcaggctggcggatctctgagactgtcttgtgccgccagcggcagaacctttagcatgggctggtttagacaggcccctggcaaagagagagagttcgtcgccgccatcacatactctggcggcagcccttactacgccgactctgtgaagggcagattcaccatcagccgggacaacgccaagaacaccgtgtacctccagatgaacagcctgaagcctgaggacaccgccgtgtactactgcgccgccaatccaacatacggcagcgactggaacgccgagaattggggccagggaacccaagtgacagtgtctagcctcgaggggaaaccaattcccaaccctcttctgggactggattcaaccggcagcggcgaggacctgaagaacgtgttcccacctgaggtggccgtgttcgagcctagcgaggccgagatcagccacacccagaaagccaccctcgtgtgcctggctaccggcttctaccccgaccatgtggaactgtcttggtgggtcaacggcaaagaggtgcacagcggcgtgtctaccgacccccagccactgaaagaacagcccgccctgaacgacagccggtactgcctgagcagcagactgagagtgtccgccaccttctggcagaacccccggaaccacttcagatgccaggtgcagttctacggcctgagcgagaacgacgagtggacccaggacagagccaagcccgtgacccagatcgtgtctgccgaagcctggggcagagccgattgcggatcccagagcttcggcctgctggaccccaagctgtgctacctgctggatggcatcctgttcatctacggcgtgatcctgaccgccctgttcctgaggagtaagaggagcaggctcctgcacagtgactacatgaacatgactccacgccgccccggacccacccgcaagcattaccagccctatgccccaccacgcgacttcgcagcctatcgctccagagtgaagttcagcagaagcgccgacgcccctgcctaccagcagggacagaaccaactgtacaacgagctgaacctgggcagacgggaagagtacgacgtgctggacaagcggagaggcagggaccctgagatgggcggaaagccccagcggagaaagaacccccaggaaggactgtataacgaactccagaaagacaagatggccgaagcctacagcgagatcggcatgaagggcgagcggagaagaggcaagggccacgatggcctgtaccagggcctgagcaccgccaccaaggacacctatgacgccctgcacatgcaggccctgcctccaagaagggccaagcgatctggatctggagcaacaaacttctcactactcaaacaagcaggtgacgtggaggagaatcccgggcctactagtatggactggatttggcgcatccttttccttgtcggcgctgctaccggcgcgcattccttcgaagaagtgcagctggttgaatctggcggaggactggttcagcctggcggatctctgagactgtcttgtgccgccagcggcttcagcttcagcgacttttggatgagctgggtccgacaggcccctggcaaaggacttgaatgggtcgccacaatcagccaggccggcagcgagaaggactacgtggactctgtgaagggcagattcaccatcagccgggacaacgccaagaagtccctgtacctccagatgaacagcctgagagccgaggacaccgccgtgtactattgtgcctctggcgtgtacagcttcgactacagaggccagggcaccctggtcacagtctcttctacgcgtgagcagaaactgatctcggaagaggatgggagcggcatccagaaccctgatcctgccgtgtaccagctgcgggatagcaagagcagcgacaagagcgtgtgtctgttcaccgacttcgacagccagaccaacgtgtcccagagcaaggactccgacgtgtacatcaccgataagaccgtgctggacatgcggagcatggacttcaagagcaactccgccgtggcctggtccaacaagtccgatttcgcctgcgccaacgccttcaacaacagcattatccccgaggacacattcttcccaagccccgagagcagctgcggtacccagagttttgggttgttggaccctaaattgtgctatctgttggacggaatcctgttcatttacggagtgatcctgaccgcattgttcctgaggagcaagcggtcacggctgctccacagcgattacatgaatatgacaccacgaagaccgggtcctactcgcaaacactaccaaccctacgcacctccccgcgactttgcagcgtaccgatctcgggttaagttttccagatccgcagacgcacccgcttaccaacaagggcagaaccaactctacaatgaacttaatttggggcggagggaagagtacgacgttctggacaaaaggaggggacgagatcccgagatgggcggaaagcctcagcgaaggaagaatccgcaagaggggctttataacgaactccagaaagataaaatggcagaagcctatagtgagattgggatgaagggagaaaggaggaggggtaaaggtcacgatgggttgtaccaaggattgagcacagccactaaagatacctatgatgcgctccacatgcaggccctgccgccaaga

SEQ ID NO: 7292 - DNA, 2688 bp, Artificial Sequence
  Synthetic Polynucloetide
atggccttaccagtgaccgccttgctcctgccgctggccttgctgctccacgccgccaggccggaagtgcagctggttgaatctggcggaggactggttcaggctggcggatctctgagactgtcttgtgccgccagcggcagaacctttagcatgggctggtttagacaggcccctggcaaagagagagagttcgtcgccgccatcacatactctggcggcagcccttactacgccgactctgtgaagggcagattcaccatcagccgggacaacgccaagaacaccgtgtacctccagatgaacagcctgaagcctgaggacaccgccgtgtactactgcgccgccaatccaacatacggcagcgactggaacgccgagaattggggccagggaacccaagtgacagtgtctagcctcgaggggaaaccaattcccaaccctcttctgggactggattcaaccggcagcggcgaggacctgaagaacgtgttcccacctgaggtggccgtgttcgagcctagcgaggccgagatcagccacacccagaaagccaccctcgtgtgcctggctaccggcttctaccccgaccatgtggaactgtcttggtgggtcaacggcaaagaggtgcacagcggcgtgtctaccgacccccagccactgaaagaacagcccgccctgaacgacagccggtactgcctgagcagcagactgagagtgtccgccaccttctggcagaacccccggaaccacttcagatgccaggtgcagttctacggcctgagcgagaacgacgagtggacccaggacagagccaagcccgtgacccagatcgtgtctgccgaagcctggggcagagccgattgcggatcccagagcttcggcctgctggaccccaagctgtgctacctgctggatggcatcctgttcatctacggcgtgatcctgaccgccctgttcctgagagtgaagttcagcagaagcgccgacgcccctgcctaccagcagggacagaaccaactgtacaacgagctgaacctgggcagacgggaagagtacgacgtgctggacaagcggagaggcagggaccctgagatgggcggaaagccccagcggagaaagaacccccaggaaggactgtataacgaactccagaaagacaagatggccgaagcctacagcgagatcggcatgaagggcgagcggagaagaggcaagggccacgatggcctgtaccagggcctgagcaccgccaccaaggacacctatgacgccctgcacatgcaggccctgcctccaagaagggccaagcgatctggatctggagcaacaaacttctcactactcaaacaagcaggtgacgtggaggagaatcccgggcctactagtatggactggatttggcgcatccttttccttgtcggcgctgctaccggcgcgcattccttcgaagaagtgcagctggttgaatctggcggaggactggttcagcctggcggatctctgagactgtcttgtgccgccagcggcttcagcttcagcgacttttggatgagctgggtccgacaggcccctggcaaaggacttgaatgggtcgccacaatcagccaggccggcagcgagaaggactacgtggactctgtgaagggcagattcaccatcagccgggacaacgccaagaagtccctgtacctccagatgaacagcctgagagccgaggacaccgccgtgtactattgtgcctctggcgtgtacagcttcgactacagaggccagggcaccctggtcacagtctcttctacgcgtgagcagaaactgatctcggaagaggatctggggagcggcatccagaaccctgatcctgccgtgtaccagctgcgggatagcaagagcagcgacaagagcgtgtgtctgttcaccgacttcgacagccagaccaacgtgtcccagagcaaggactccgacgtgtacatcaccgataagaccgtgctggacatgcggagcatggacttcaagagcaactccgccgtggcctggtccaacaagtccgatttcgcctgcgccaacgccttcaacaacagcattatccccgaggacacattcttcccaagccccgagagcagctgcggtacccagagttttgggttgttggaccctaaattgtgctatctgttggacggaatcctgttcatttacggagtgatcctgaccgcattgttcctgaagagaggccggaagaagctgctgtacatcttcaagcagcctttcatgcggcccgtgcagaccacccaggaagaggacggctgctcctgccggttccccgaggaagaagaaggcggctgcgagctgcgggttaagttttccagatccgcagacgcacccgcttaccaacaagggcagaaccaactctacaatgaacttaatttggggcggagggaagagtacgacgttctggacaaaaggaggggacgagatcccgagatgggcggaaagcctcagcgaaggaagaatccgcaagaggggctttataacgaactccagaaagataaaatggcagaagcctatagtgagattgggatgaagggagaaaggaggaggggtaaaggtcacgatgggttgtaccaaggattgagcacagccactaaagatacctatgatgcgctccacatgcaggccctgccgccaaga

SEQ ID NO: 7293 - DNA, 2814 bp, Artificial Sequence
  Synthetic Polynucloetide
atggccttaccagtgaccgccttgctcctgccgctggccttgctgctccacgccgccaggccggaagtgcagctggttgaatctggcggaggactggttcaggctggcggatctctgagactgtcttgtgccgccagcggcagaacctttagcatgggctggtttagacaggcccctggcaaagagagagagttcgtcgccgccatcacatactctggcggcagcccttactacgccgactctgtgaagggcagattcaccatcagccgggacaacgccaagaacaccgtgtacctccagatgaacagcctgaagcctgaggacaccgccgtgtactactgcgccgccaatccaacatacggcagcgactggaacgccgagaattggggccagggaacccaagtgacagtgtctagcctcgaggggaaaccaattcccaaccctcttctgggactggattcaaccggcagcggcgaggacctgaagaacgtgttcccacctgaggtggccgtgttcgagcctagcgaggccgagatcagccacacccagaaagccaccctcgtgtgcctggctaccggcttctaccccgaccatgtggaactgtcttggtgggtcaacggcaaagaggtgcacagcggcgtgtctaccgacccccagccactgaaagaacagcccgccctgaacgacagccggtactgcctgagcagcagactgagagtgtccgccaccttctggcagaacccccggaaccacttcagatgccaggtgcagttctacggcctgagcgagaacgacgagtggacccaggacagagccaagcccgtgacccagatcgtgtctgccgaagcctggggcagagccgattgcggatcccagagcttcggcctgctggaccccaagctgtgctacctgctggatggcatcctgttcatctacggcgtgatcctgaccgccctgttcctgaaacggggcagaaagaaactcctgtatatattcaaacaaccatttatgagaccagtacaaactactcaagaggaagatggctgtagctgccgatttccagaagaagaagaaggaggatgtgaactgagagtgaagttcagcagaagcgccgacgcccctgcctaccagcagggacagaaccaactgtacaacgagctgaacctgggcagacgggaagagtacgacgtgctggacaagcggagaggcagggaccctgagatgggcggaaagccccagcggagaaagaacccccaggaaggactgtataacgaactccagaaagacaagatggccgaagcctacagcgagatcggcatgaagggcgagcggagaagaggcaagggccacgatggcctgtaccagggcctgagcaccgccaccaaggacacctatgacgccctgcacatgcaggccctgcctccaagaagggccaagcgatctggatctggagcaacaaacttctcactactcaaacaagcaggtgacgtggaggagaatcccgggcctactagtatggactggatttggcgcatccttttccttgtcggcgctgctaccggcgcgcattccttcgaagaagtgcagctggttgaatctggcggaggactggttcagcctggcggatctctgagactgtcttgtgccgccagcggcttcagcttcagcgacttttggatgagctgggtccgacaggcccctggcaaaggacttgaatgggtcgccacaatcagccaggccggcagcgagaaggactacgtggactctgtgaagggcagattcaccatcagccgggacaacgccaagaagtccctgtacctccagatgaacagcctgagagccgaggacaccgccgtgtactattgtgcctctggcgtgtacagcttcgactacagaggccagggcaccctggtcacagtctcttctacgcgtgagcagaaactgatctcggaagaggatctggggagcggcatccagaaccctgatcctgccgtgtaccagctgcgggatagcaagagcagcgacaagagcgtgtgtctgttcaccgacttcgacagccagaccaacgtgtcccagagcaaggactccgacgtgtacatcaccgataagaccgtgctggacatgcggagcatggacttcaagagcaactccgccgtggcctggtccaacaagtccgatttcgcctgcgccaacgccttcaacaacagcattatccccgaggacacattcttcccaagccccgagagcagctgcggtacccagagttttgggttgttggaccctaaattgtgctatctgttggacggaatcctgttcatttacggagtgatcctgaccgcattgttcctgaagagaggccggaagaagctgctgtacatcttcaagcagcctttcatgcggcccgtgcagaccacccaggaagaggacggctgctcctgccggttccccgaggaagaagaaggcggctgcgagctgcgggttaagttttccagatccgcagacgcacccgcttaccaacaagggcagaaccaactctacaatgaacttaatttggggcggagggaagagtacgacgttctggacaaaaggaggggacgagatcccgagatgggcggaaagcctcagcgaaggaagaatccgcaagaggggctttataacgaactccagaaagataaaatggcagaagcctatagtgagattgggatgaagggagaaaggaggaggggtaaaggtcacgatgggttgtaccaaggattgagcacagccactaaagatacctatgatgcgctccacatgcaggccctgccgccaaga

SEQ ID NO: 7294 - DNA, 2487 bp, Artificial Sequence
  Synthetic Polynucloetide
atggccttaccagtgaccgccttgctcctgccgctggccttgctgctccacgccgccaggccggaagtgcagctggttgaatctggcggaggactggttcaggctggcggatctctgagactgtcttgtgccgccagcggcagaacctttagcatgggctggtttagacaggcccctggcaaagagagagagttcgtcgccgccatcacatactctggcggcagcccttactacgccgactctgtgaagggcagattcaccatcagccgggacaacgccaagaacaccgtgtacctccagatgaacagcctgaagcctgaggacaccgccgtgtactactgcgccgccaatccaacatacggcagcgactggaacgccgagaattggggccagggaacccaagtgacagtgtctagcctcgagcagagcttcggcctgctggaccccaagctgtgctacctgctggatggcatcctgttcatctacggcgtgatcctgaccgccctgttcctgagagtgaagttcagcagaagcgccgacgcccctgcctaccagcagggacagaaccaactgtacaacgagctgaacctgggcagacgggaagagtacgacgtgctggacaagcggagaggcagggaccctgagatgggcggaaagccccagcggagaaagaacccccaggaaggactgtataacgaactccagaaagacaagatggccgaagcctacagcgagatcggcatgaagggcgagcggagaagaggcaagggccacgatggcctgtaccagggcctgagcaccgccaccaaggacacctatgacgccctgcacatgcaggccctgcctccaagaagggccaagcgatctggatctggagcaacaaacttctcactactcaaacaagcaggtgacgtggaggagaatcccgggcctactagtatggactggatttggcgcatccttttccttgtcggcgctgctaccggcgcgcattccttcgaagaagtgcagctggttgaatctggcggaggactggttcagcctggcggatctctgagactgtcttgtgccgccagcggcttcagcttcagcgacttttggatgagctgggtccgacaggcccctggcaaaggacttgaatgggtcgccacaatcagccaggccggcagcgagaaggactacgtggactctgtgaagggcagattcaccatcagccgggacaacgccaagaagtccctgtacctccagatgaacagcctgagagccgaggacaccgccgtgtactattgtgcctctggcgtgtacagcttcgactacagaggccagggcaccctggtcacagtctcttctacgcgtcagagttttgggttgttggaccctaaattgtgctatctgttggacggaatcctgttcatttacggagtgatcctgaccgcattgttcctgcgggttaagttttccagatccgcagacgcacccgcttaccaacaagggcagaaccaactctacaatgaacttaatttggggcggagggaagagtacgacgttctggacaaaaggaggggacgagatcccgagatgggcggaaagcctcagcgaaggaagaatccgcaagaggggctttataacgaactccagaaagataaaatggcagaagcctatagtgagattgggatgaagggagaaaggaggaggggtaaaggtcacgatgggttgtaccaaggattgagcacagccactaaagatacctatgatgcgctccacatgcaggccctgccgccaagacgcgccaagagaagcggatctggcgtgaagcagaccctgaatttcgacctgctgaagctggctggcgacgtggaatccaacccaggcccttctagaggccatatgaccgagtacaagcccacggtgcgcctcgccacccgcgacgacgtccccagggccgtacgcaccctcgccgccgcgttcgccgactaccccgccacgcgccacaccgtcgatccggaccgccacatcgagcgggtcaccgagctgcaagaactcttcctcacgcgcgtcgggctcgacatcggcaaggtgtgggtcgcggacgacggcgccgcggtggcggtctggaccacgccggagagcgtcgaagcgggggcggtgttcgccgagatcggcccgcgcatggccgagttgagcggttcccggctggccgcgcagcaacagatggaaggcctcctggcgccgcaccggcccaaggagcccgcgtggttcctggccaccgtcggcgtctcgcccgaccaccagggcaagggtctgggcagcgccgtcgtgctccccggagtggaggcggccgagcgcgccggggtgcccgccttcctggagacctccgcgccccgcaacctccccttctacgagcggctcggcttcaccgtcaccgccgacgtcgaggtgcccgaaggaccgcgcacctggtgcatgacccgcaagcccggtgcctga

SEQ ID NO: 7295 - DNA, 1959 bp, Artificial Sequence
  Synthetic Polynucloetide
atggccttaccagtgaccgccttgctcctgccgctggccttgctgctccacgccgccaggccggaagtgcagctggttgaatctggcggaggactggttcaggctggcggatctctgagactgtcttgtgccgccagcggcagaacctttagcatgggctggtttagacaggcccctggcaaagagagagagttcgtcgccgccatcacatactctggcggcagcccttactacgccgactctgtgaagggcagattcaccatcagccgggacaacgccaagaacaccgtgtacctccagatgaacagcctgaagcctgaggacaccgccgtgtactactgcgccgccaatccaacatacggcagcgactggaacgccgagaattggggccagggaacccaagtgacagtgtctagcctcgagggacagcctaaggccaatcctaccgtgacactgttccctccaagcagcgaagaactccaggccaacaaggccacacttgtgtgcctgatctccgacttctaccctggggctgtgacagtggcttggaaggccgatggatctcctgtgaaagccggcgtggaaaccaccaagccatccaagcagagcaacaacaaatacgccgccagctcctacctgagcctgacacctgagcagtggaagtcccacagatcctacagctgccaagtgacccacgaaggcagcaccgtggaaaagacagtggcccctacagagtgcagccccatcaagaccgatgtgattacaatggaccccaaggacaactgctccaaggacgccaacgataccctgctgctccagctgaccaacaccagcgcctactacatgtacttgttgctgctgctgaagtccgtggtgtacttcgccatcatcacatgctgcctgctgcggagaaccgccttctgctgcaacggcgagaagtctagggccaagcgatctggatctggagcaacaaacttctcactactcaaacaagcaggtgacgtggaggagaatcccgggcctactagtatggactggatttggcgcatccttttccttgtcggcgctgctaccggcgcgcattccttcgaagaagtgcagctggttgaatctggcggaggactggttcagcctggcggatctctgagactgtcttgtgccgccagcggcttcagcttcagcgacttttggatgagctgggtccgacaggcccctggcaaaggacttgaatgggtcgccacaatcagccaggccggcagcgagaaggactacgtggactctgtgaagggcagattcaccatcagccgggacaacgccaagaagtccctgtacctccagatgaacagcctgagagccgaggacaccgccgtgtactattgtgcctctggcgtgtacagcttcgactacagaggccagggcaccctggtcacagtctcttctacgcgtgcctctacaaagggaccctccgtgtttcctctggctcccagcagcaagtctacaagcggaggaacagccgctctgggctgcctggtcaaggattactttcccgagcctgtgaccgtgtcctggaatagcggagcactgacaagcggcgtgcacacctttccagccgtgctgcaaagcagcggcctgtactctctgagcagcgtggtcacagtgcctagctctagcctgggcacccagacctacatctgcaatgtgaaccacaagcctagcaacaccaaggtggacaagagagtggaacccaagagctgtgaagtgaaaaccgactccaccgaccacgtgaagcccaaagagacagagaacaccaagcagcccagcaagagctgccacaagcccaaggccatcgtgcacaccgagaaagtgaacatgatgagcctgaccgtgctgggcctgcggatgctgttcgccaaaaccgtggccgtgaacttcctgctgaccgccaagctgttcttcctc

SEQ ID NO: 7296 - DNA, 1893 bp, Artificial Sequence
  Synthetic Polynucloetide
atggccttaccagtgaccgccttgctcctgccgctggccttgctgctccacgccgccaggccggaagtgcagctggttgaatctggcggaggactggttcaggctggcggatctctgagactgtcttgtgccgccagcggcagaacctttagcatgggctggtttagacaggcccctggcaaagagagagagttcgtcgccgccatcacatactctggcggcagcccttactacgccgactctgtgaagggcagattcaccatcagccgggacaacgccaagaacaccgtgtacctccagatgaacagcctgaagcctgaggacaccgccgtgtactactgcgccgccaatccaacatacggcagcgactggaacgccgagaattggggccagggaacccaagtgacagtgtctagcctcgagggacagcctaaggccaatcctaccgtgacactgttccctccaagcagcgaagaactccaggccaacaaggccacacttgtgtgcctgatctccgacttctaccctggggctgtgacagtggcttggaaggccgatggatctcctgtgaaagccggcgtggaaaccaccaagccatccaagcagagcaacaacaaatacgccgccagctcctacctgagcctgacacctgagcagtggaagtcccacagatcctacagctgccaagtgacccacgaaggcagcaccgtggaaaagacagtggcccctacagagtgcagcggcagagccgattgcggcatcaccagcgccagctaccaccagggcgtgctgagcgccaccatcctgtacgagatcctgctgggcaaggccaccctgtacgccgtgctggtgtctgccctggtgctgatggctatggtcaagcggaaggacagccggggaagggccaagcgatctggatctggagcaacaaacttctcactactcaaacaagcaggtgacgtggaggagaatcccgggcctactagtatggactggatttggcgcatccttttccttgtcggcgctgctaccggcgcgcattccttcgaagaagtgcagctggttgaatctggcggaggactggttcagcctggcggatctctgagactgtcttgtgccgccagcggcttcagcttcagcgacttttggatgagctgggtccgacaggcccctggcaaaggacttgaatgggtcgccacaatcagccaggccggcagcgagaaggactacgtggactctgtgaagggcagattcaccatcagccgggacaacgccaagaagtccctgtacctccagatgaacagcctgagagccgaggacaccgccgtgtactattgtgcctctggcgtgtacagcttcgactacagaggccagggcaccctggtcacagtctcttctacgcgtgcctctacaaagggaccctccgtgtttcctctggctcccagcagcaagtctacaagcggaggaacagccgctctgggctgcctggtcaaggattactttcccgagcctgtgaccgtgtcctggaatagcggagcactgacaagcggcgtgcacacctttccagccgtgctgcaaagcagcggcctgtactctctgagcagcgtggtcacagtgcctagctctagcctgggcacccagacctacatctgcaatgtgaaccacaagcctagcaacaccaaggtggacaagagagtggaacccaagagctgtatccccgaggacacattcttcccaagcagcgacgtgccctgcgacgtgaagctggtggaaaagagcttcgagacagacaccaacctgaacttccagaacctgagcgtgatcggcttcagaatcctgctgctgaaagtggccggctttaacctgctgatgaccctgcggctgtggtccagc

SEQ ID NO: 7297 - DNA, 1893 bp, Artificial Sequence
  Synthetic Polynucloetide
atggccttaccagtgaccgccttgctcctgccgctggccttgctgctccacgccgccaggccggaagtgcagctggttgaatctggcggaggactggttcaggctggcggatctctgagactgtcttgtgccgccagcggcagaacctttagcatgggctggtttagacaggcccctggcaaagagagagagttcgtcgccgccatcacatactctggcggcagcccttactacgccgactctgtgaagggcagattcaccatcagccgggacaacgccaagaacaccgtgtacctccagatgaacagcctgaagcctgaggacaccgccgtgtactactgcgccgccaatccaacatacggcagcgactggaacgccgagaattggggccagggaacccaagtgacagtgtctagcctcgagggacagcctaaggccaatcctaccgtgacactgttccctccaagcagcgaagaactccaggccaacaaggccacacttgtgtgcctgatctccgacttctaccctggggctgtgacagtggcttggaaggccgatggatctcctgtgaaagccggcgtggaaaccaccaagccatccaagcagagcaacaacaaatacgccgccagctcctacctgagcctgacacctgagcagtggaagtcccacagatcctacagctgccaagtgacccacgaaggcagcaccgtggaaaagacagtggcccctacagagtgcagcggcagagccgattgcggctttaccagcgagagctaccagcagggcgtgctgagcgccaccatcctgtacgagatcctgctgggcaaggccaccctgtacgccgtgctggtgtctgccctggtgctgatggctatggtcaagcggaaggacagccggggaagggccaagcgatctggatctggagcaacaaacttctcactactcaaacaagcaggtgacgtggaggagaatcccgggcctactagtatggactggatttggcgcatccttttccttgtcggcgctgctaccggcgcgcattccttcgaagaagtgcagctggttgaatctggcggaggactggttcagcctggcggatctctgagactgtcttgtgccgccagcggcttcagcttcagcgacttttggatgagctgggtccgacaggcccctggcaaaggacttgaatgggtcgccacaatcagccaggccggcagcgagaaggactacgtggactctgtgaagggcagattcaccatcagccgggacaacgccaagaagtccctgtacctccagatgaacagcctgagagccgaggacaccgccgtgtactattgtgcctctggcgtgtacagcttcgactacagaggccagggcaccctggtcacagtctcttctacgcgtgcctctacaaagggaccctccgtgtttcctctggctcccagcagcaagtctacaagcggaggaacagccgctctgggctgcctggtcaaggattactttcccgagcctgtgaccgtgtcctggaatagcggagcactgacaagcggcgtgcacacctttccagccgtgctgcaaagcagcggcctgtactctctgagcagcgtggtcacagtgcctagctctagcctgggcacccagacctacatctgcaatgtgaaccacaagcctagcaacaccaaggtggacaagagagtggaacccaagagctgtatccccgaggacacattcttcccaagccccgagagcagctgcgacgtgaagctggtggaaaagagcttcgagacagacaccaacctgaacttccagaacctgagcgtgatcggcttcagaatcctgctgctgaaagtggccggctttaacctgctgatgaccctgcggctgtggtccagc

SEQ ID NO: 7298 - DNA, 1356 bp, Artificial Sequence
  Synthetic Polynucloetide
atggccttaccagtgaccgccttgctcctgccgctggccttgctgctccacgccgccaggccggaagtgcagctggttgaatctggcggaggactggttcaggctggcggatctctgagactgtcttgtgccgccagcggcagaacctttagcatgggctggtttagacaggcccctggcaaagagagagagttcgtcgccgccatcacatactctggcggcagcccttactacgccgactctgtgaagggcagattcaccatcagccgggacaacgccaagaacaccgtgtacctccagatgaacagcctgaagcctgaggacaccgccgtgtactactgcgccgccaatccaacatacggcagcgactggaacgccgagaattggggccagggaacccaagtgacagtgtctagcctcgagagcggcggaggcggatctttcgaagaagtgcagctggttgaatctggcggaggactggttcagcctggcggatctctgagactgtcttgtgccgccagcggcttcagcttcagcgacttttggatgagctgggtccgacaggcccctggcaaaggacttgaatgggtcgccacaatcagccaggccggcagcgagaaggactacgtggactctgtgaagggcagattcaccatcagccgggacaacgccaagaagtccctgtacctccagatgaacagcctgagagccgaggacaccgccgtgtactattgtgcctctggcgtgtacagcttcgactacagaggccagggcaccctggtcacagtctcttctacgcgtgacggtaacgaggagatgggaggaatcactcaaaccccttacaaagtctcaatttcaggaacaactgttatccttacatgtccccagtatcctggcagcgagatcctttggcagcataacgacaagaatatagggggagatgaagacgataagaatatcggatctgacgaggatcacttgagcctgaaagagttctccgagcttgaacaaagcggatattatgtgtgctatccgcgcgggtcaaagccggaagacgctaacttttacctttatctccgagccagagtgtgcgaaaattgcatggaaatggacgttatgtccgttgctacaatagttatcgtagatatatgcatcacgggtggactgcttctgctggtttattattggtccaagaatagaaaggccaaagctaaacccgtgaccagaggcgctggcgcaggcggaaggcaaaggggacaaaacaaagaacggccaccaccagtgccaaatccagattatgagcctattcggaaaggacagagggacctgtactctggcctgaatcagagaagaatc

SEQ ID NO: 7299 - DNA, 1251 bp, Artificial Sequence
  Synthetic Polynucloetide
atggccttaccagtgaccgccttgctcctgccgctggccttgctgctccacgccgccaggccggaagtgcagctggttgaatctggcggaggactggttcaggctggcggatctctgagactgtcttgtgccgccagcggcagaacctttagcatgggctggtttagacaggcccctggcaaagagagagagttcgtcgccgccatcacatactctggcggcagcccttactacgccgactctgtgaagggcagattcaccatcagccgggacaacgccaagaacaccgtgtacctccagatgaacagcctgaagcctgaggacaccgccgtgtactactgcgccgccaatccaacatacggcagcgactggaacgccgagaattggggccagggaacccaagtgacagtgtctagcctcgagagcggcggaggcggatctttcgaagaagtgcagctggttgaatctggcggaggactggttcagcctggcggatctctgagactgtcttgtgccgccagcggcttcagcttcagcgacttttggatgagctgggtccgacaggcccctggcaaaggacttgaatgggtcgccacaatcagccaggccggcagcgagaaggactacgtggactctgtgaagggcagattcaccatcagccgggacaacgccaagaagtccctgtacctccagatgaacagcctgagagccgaggacaccgccgtgtactattgtgcctctggcgtgtacagcttcgactacagaggccagggcaccctggtcacagtctcttctacgcgtttcaagatccccatcgaggaactggaagatcgggtgttcgtgaactgcaacacctctatcacctgggtggaaggcaccgtgggaacactgctgagcgacatcaccagactggacctcggcaagcggattctggaccctcggggcatctacagatgcaacggcaccgacatctacaaggacaaagaaagcaccgtgcaggtccactacagaatgtgccagtcctgcgtggaactggaccctgctacagtggccggcatcatcgtgaccgatgtgatcgctactctgctgctggctctgggagtgttctgcttcgccggacacgaaacaggcagactgtctggcgctgccgatacacaggccctgctgagaaacgaccaagtgtatcagcccctgcgcgacagagatgatgcccagtattctcacctcggcggcaactgggctagaaacaag

SEQ ID NO: 7300 - DNA, 1281 bp, Artificial Sequence
  Synthetic Polynucloetide
atggccttaccagtgaccgccttgctcctgccgctggccttgctgctccacgccgccaggccggaagtgcagctggttgaatctggcggaggactggttcaggctggcggatctctgagactgtcttgtgccgccagcggcagaacctttagcatgggctggtttagacaggcccctggcaaagagagagagttcgtcgccgccatcacatactctggcggcagcccttactacgccgactctgtgaagggcagattcaccatcagccgggacaacgccaagaacaccgtgtacctccagatgaacagcctgaagcctgaggacaccgccgtgtactactgcgccgccaatccaacatacggcagcgactggaacgccgagaattggggccagggaacccaagtgacagtgtctagcctcgagagcggcggaggcggatctttcgaagaagtgcagctggttgaatctggcggaggactggttcagcctggcggatctctgagactgtcttgtgccgccagcggcttcagcttcagcgacttttggatgagctgggtccgacaggcccctggcaaaggacttgaatgggtcgccacaatcagccaggccggcagcgagaaggactacgtggactctgtgaagggcagattcaccatcagccgggacaacgccaagaagtccctgtacctccagatgaacagcctgagagccgaggacaccgccgtgtactattgtgcctctggcgtgtacagcttcgactacagaggccagggcaccctggtcacagtctcttctacgcgtcagagcatcaagggcaaccacctggtcaaggtgtacgactaccaagaggacggcagcgtgctgctgacatgtgatgccgaggccaagaacatcacctggtttaaggacggcaagatgatcggcttcctgaccgaggacaagaagaagtggaacctgggcagcaacgctaaggaccccagaggcatgtatcagtgcaagggcagccagaacaagagcaagcccctccaggtgtactaccggatgtgccagaactgcatcgagctgaacgccgctaccatcagcggctttctgttcgccgagatcgtgtccatcttcgtgctggccgtgggcgtgtactttatcgctggacaggatggcgtgcggcagagcagagcttccgataagcaaaccctgctgcctaacgaccagctgtaccagcctctgaaggacagagaggacgaccagtacagccacctccagggcaatcagctgagaagaaac

SEQ ID NO: 7301 - DNA, 1230 bp, Artificial Sequence
  Synthetic Polynucloetide
atggccttaccagtgaccgccttgctcctgccgctggccttgctgctccacgccgccaggccggaagtgcagctggttgaatctggcggaggactggttcaggctggcggatctctgagactgtcttgtgccgccagcggcagaacctttagcatgggctggtttagacaggcccctggcaaagagagagagttcgtcgccgccatcacatactctggcggcagcccttactacgccgactctgtgaagggcagattcaccatcagccgggacaacgccaagaacaccgtgtacctccagatgaacagcctgaagcctgaggacaccgccgtgtactactgcgccgccaatccaacatacggcagcgactggaacgccgagaattggggccagggaacccaagtgacagtgtctagcctcgagagcggcggaggcggatctttcgaagaagtgcagctggttgaatctggcggaggactggttcagcctggcggatctctgagactgtcttgtgccgccagcggcttcagcttcagcgacttttggatgagctgggtccgacaggcccctggcaaaggacttgaatgggtcgccacaatcagccaggccggcagcgagaaggactacgtggactctgtgaagggcagattcaccatcagccgggacaacgccaagaagtccctgtacctccagatgaacagcctgagagccgaggacaccgccgtgtactattgtgcctctggcgtgtacagcttcgactacagaggccagggcaccctggtcacagtctcttctacgcgtcagagttttgggttgttggaccctaaattgtgctatctgttggacggaatcctgttcatttacggagtgatcctgaccgcattgttcctgcgggttaagttttccagatccgcagacgcacccgcttaccaacaagggcagaaccaactctacaatgaacttaatttggggcggagggaagagtacgacgttctggacaaaaggaggggacgagatcccgagatgggcggaaagcctcagcgaaggaagaatccgcaagaggggctttataacgaactccagaaagataaaatggcagaagcctatagtgagattgggatgaagggagaaaggaggaggggtaaaggtcacgatgggttgtaccaaggattgagcacagccactaaagatacctatgatgcgctccacatgcaggccctgccgccaaga

SEQ ID NO: 7302 - DNA, 1359 bp, Artificial Sequence
  Synthetic Polynucloetide
atggccttaccagtgaccgccttgctcctgccgctggccttgctgctccacgccgccaggccggaagaagtgcagctggttgaatctggcggaggactggttcagcctggcggatctctgagactgtcttgtgccgccagcggcttcagcttcagcgacttttggatgagctgggtccgacaggcccctggcaaaggacttgaatgggtcgccacaatcagccaggccggcagcgagaaggactacgtggactctgtgaagggcagattcaccatcagccgggacaacgccaagaagtccctgtacctccagatgaacagcctgagagccgaggacaccgccgtgtactattgtgcctctggcgtgtacagcttcgactacagaggccagggcaccctggtcacagtctcttctctcgagagcggcggaggcggatctttcgaagaagtgcagctggttgaatctggcggaggactggttcaggctggcggatctctgagactgtcttgtgccgccagcggcagaacctttagcatgggctggtttagacaggcccctggcaaagagagagagttcgtcgccgccatcacatactctggcggcagcccttactacgccgactctgtgaagggcagattcaccatcagccgggacaacgccaagaacaccgtgtacctccagatgaacagcctgaagcctgaggacaccgccgtgtactactgcgccgccaatccaacatacggcagcgactggaacgccgagaattggggccagggaacccaagtgacagtgtctagcacgcgtgacggtaacgaggagatgggaggaatcactcaaaccccttacaaagtctcaatttcaggaacaactgttatccttacatgtccccagtatcctggcagcgagatcctttggcagcataacgacaagaatatagggggagatgaagacgataagaatatcggatctgacgaggatcacttgagcctgaaagagttctccgagcttgaacaaagcggatattatgtgtgctatccgcgcgggtcaaagccggaagacgctaacttttacctttatctccgagccagagtgtgcgaaaattgcatggaaatggacgttatgtccgttgctacaatagttatcgtagatatatgcatcacgggtggactgcttctgctggtttattattggtccaagaatagaaaggccaaagctaaacccgtgaccagaggcgctggcgcaggcggaaggcaaaggggacaaaacaaagaacggccaccaccagtgccaaatccagattatgagcctattcggaaaggacagagggacctgtactctggcctgaatcagagaagaatc

SEQ ID NO: 7303 - DNA, 1254 bp, Artificial Sequence
  Synthetic Polynucloetide
atggccttaccagtgaccgccttgctcctgccgctggccttgctgctccacgccgccaggccggaagaagtgcagctggttgaatctggcggaggactggttcagcctggcggatctctgagactgtcttgtgccgccagcggcttcagcttcagcgacttttggatgagctgggtccgacaggcccctggcaaaggacttgaatgggtcgccacaatcagccaggccggcagcgagaaggactacgtggactctgtgaagggcagattcaccatcagccgggacaacgccaagaagtccctgtacctccagatgaacagcctgagagccgaggacaccgccgtgtactattgtgcctctggcgtgtacagcttcgactacagaggccagggcaccctggtcacagtctcttctctcgagagcggcggaggcggatctttcgaagaagtgcagctggttgaatctggcggaggactggttcaggctggcggatctctgagactgtcttgtgccgccagcggcagaacctttagcatgggctggtttagacaggcccctggcaaagagagagagttcgtcgccgccatcacatactctggcggcagcccttactacgccgactctgtgaagggcagattcaccatcagccgggacaacgccaagaacaccgtgtacctccagatgaacagcctgaagcctgaggacaccgccgtgtactactgcgccgccaatccaacatacggcagcgactggaacgccgagaattggggccagggaacccaagtgacagtgtctagcacgcgtttcaagatccccatcgaggaactggaagatcgggtgttcgtgaactgcaacacctctatcacctgggtggaaggcaccgtgggaacactgctgagcgacatcaccagactggacctcggcaagcggattctggaccctcggggcatctacagatgcaacggcaccgacatctacaaggacaaagaaagcaccgtgcaggtccactacagaatgtgccagtcctgcgtggaactggaccctgctacagtggccggcatcatcgtgaccgatgtgatcgctactctgctgctggctctgggagtgttctgcttcgccggacacgaaacaggcagactgtctggcgctgccgatacacaggccctgctgagaaacgaccaagtgtatcagcccctgcgcgacagagatgatgcccagtattctcacctcggcggcaactgggctagaaacaag

SEQ ID NO: 7304 - DNA, 1284 bp, Artificial Sequence
  Synthetic Polynucloetide
atggccttaccagtgaccgccttgctcctgccgctggccttgctgctccacgccgccaggccggaagaagtgcagctggttgaatctggcggaggactggttcagcctggcggatctctgagactgtcttgtgccgccagcggcttcagcttcagcgacttttggatgagctgggtccgacaggcccctggcaaaggacttgaatgggtcgccacaatcagccaggccggcagcgagaaggactacgtggactctgtgaagggcagattcaccatcagccgggacaacgccaagaagtccctgtacctccagatgaacagcctgagagccgaggacaccgccgtgtactattgtgcctctggcgtgtacagcttcgactacagaggccagggcaccctggtcacagtctcttctctcgagagcggcggaggcggatctttcgaagaagtgcagctggttgaatctggcggaggactggttcaggctggcggatctctgagactgtcttgtgccgccagcggcagaacctttagcatgggctggtttagacaggcccctggcaaagagagagagttcgtcgccgccatcacatactctggcggcagcccttactacgccgactctgtgaagggcagattcaccatcagccgggacaacgccaagaacaccgtgtacctccagatgaacagcctgaagcctgaggacaccgccgtgtactactgcgccgccaatccaacatacggcagcgactggaacgccgagaattggggccagggaacccaagtgacagtgtctagcacgcgtcagagcatcaagggcaaccacctggtcaaggtgtacgactaccaagaggacggcagcgtgctgctgacatgtgatgccgaggccaagaacatcacctggtttaaggacggcaagatgatcggcttcctgaccgaggacaagaagaagtggaacctgggcagcaacgctaaggaccccagaggcatgtatcagtgcaagggcagccagaacaagagcaagcccctccaggtgtactaccggatgtgccagaactgcatcgagctgaacgccgctaccatcagcggctttctgttcgccgagatcgtgtccatcttcgtgctggccgtgggcgtgtactttatcgctggacaggatggcgtgcggcagagcagagcttccgataagcaaaccctgctgcctaacgaccagctgtaccagcctctgaaggacagagaggacgaccagtacagccacctccagggcaatcagctgagaagaaac

SEQ ID NO: 7305 - DNA, 1233 bp, Artificial Sequence
  Synthetic Polynucloetide
atggccttaccagtgaccgccttgctcctgccgctggccttgctgctccacgccgccaggccggaagaagtgcagctggttgaatctggcggaggactggttcagcctggcggatctctgagactgtcttgtgccgccagcggcttcagcttcagcgacttttggatgagctgggtccgacaggcccctggcaaaggacttgaatgggtcgccacaatcagccaggccggcagcgagaaggactacgtggactctgtgaagggcagattcaccatcagccgggacaacgccaagaagtccctgtacctccagatgaacagcctgagagccgaggacaccgccgtgtactattgtgcctctggcgtgtacagcttcgactacagaggccagggcaccctggtcacagtctcttctctcgagagcggcggaggcggatctttcgaagaagtgcagctggttgaatctggcggaggactggttcaggctggcggatctctgagactgtcttgtgccgccagcggcagaacctttagcatgggctggtttagacaggcccctggcaaagagagagagttcgtcgccgccatcacatactctggcggcagcccttactacgccgactctgtgaagggcagattcaccatcagccgggacaacgccaagaacaccgtgtacctccagatgaacagcctgaagcctgaggacaccgccgtgtactactgcgccgccaatccaacatacggcagcgactggaacgccgagaattggggccagggaacccaagtgacagtgtctagcacgcgtcagagttttgggttgttggaccctaaattgtgctatctgttggacggaatcctgttcatttacggagtgatcctgaccgcattgttcctgcgggttaagttttccagatccgcagacgcacccgcttaccaacaagggcagaaccaactctacaatgaacttaatttggggcggagggaagagtacgacgttctggacaaaaggaggggacgagatcccgagatgggcggaaagcctcagcgaaggaagaatccgcaagaggggctttataacgaactccagaaagataaaatggcagaagcctatagtgagattgggatgaagggagaaaggaggaggggtaaaggtcacgatgggttgtaccaaggattgagcacagccactaaagatacctatgatgcgctccacatgcaggccctgccgccaaga

SEQ ID NO: 7306 - DNA, 1932 bp, Artificial Sequence
  Synthetic Polynucloetide
atggccttaccagtgaccgccttgctcctgccgctggccttgctgctccacgccgccaggccggaagtgcagctggttgaatctggcggaggactggttcaggctggcggatctctgagactgtcttgtgccgccagcggcagaacctttagcatgggctggtttagacaggcccctggcaaagagagagagttcgtcgccgccatcacatactctggcggcagcccttactacgccgactctgtgaagggcagattcaccatcagccgggacaacgccaagaacaccgtgtacctccagatgaacagcctgaagcctgaggacaccgccgtgtactactgcgccgccaatccaacatacggcagcgactggaacgccgagaattggggccagggaacccaagtgacagtgtctagcctcgagagcggcggaggcggatctttcgaagaagtgcagctggttgaatctggcggaggactggttcagcctggcggatctctgagactgtcttgtgccgccagcggcttcagcttcagcgacttttggatgagctgggtccgacaggcccctggcaaaggacttgaatgggtcgccacaatcagccaggccggcagcgagaaggactacgtggactctgtgaagggcagattcaccatcagccgggacaacgccaagaagtccctgtacctccagatgaacagcctgagagccgaggacaccgccgtgtactattgtgcctctggcgtgtacagcttcgactacagaggccagggcaccctggtcacagtctcttctacgcgtgggagcggcatccagaaccctgatcctgccgtgtaccagctgcgggatagcaagagcagcgacaagagcgtgtgtctgttcaccgacttcgacagccagaccaacgtgtcccagagcaaggactccgacgtgtacatcaccgataagaccgtgctggacatgcggagcatggacttcaagagcaactccgccgtggcctggtccaacaagtccgatttcgcctgcgccaacgccttcaacaacagcattatccccgaggacacattcttcccaagccccgagagcagctgcgacgtgaagctggtggaaaagagcttcgagacagacaccaacctgaacttccagaacctgagcgtgatcggcttcagaatcctgctgctgaaagtggccggctttaacctgctgatgaccctgcggctgtggtccagccgcgccaagagaagcggatctggcgtgaagcagaccctgaatttcgacctgctgaagctggctggcgacgtggaatccaacccaggcccttctagaggccatatgaccgagtacaagcccacggtgcgcctcgccacccgcgacgacgtccccagggccgtacgcaccctcgccgccgcgttcgccgactaccccgccacgcgccacaccgtcgatccggaccgccacatcgagcgggtcaccgagctgcaagaactcttcctcacgcgcgtcgggctcgacatcggcaaggtgtgggtcgcggacgacggcgccgcggtggcggtctggaccacgccggagagcgtcgaagcgggggcggtgttcgccgagatcggcccgcgcatggccgagttgagcggttcccggctggccgcgcagcaacagatggaaggcctcctggcgccgcaccggcccaaggagcccgcgtggttcctggccaccgtcggcgtctcgcccgaccaccagggcaagggtctgggcagcgccgtcgtgctccccggagtggaggcggccgagcgcgccggggtgcccgccttcctggagacctccgcgccccgcaacctccccttctacgagcggctcggcttcaccgtcaccgccgacgtcgaggtgcccgaaggaccgcgcacctggtgcatgacccgcaagcccggtgcctga

SEQ ID NO: 7307 - DNA, 2028 bp, Artificial Sequence
  Synthetic Polynucloetide
atggccttaccagtgaccgccttgctcctgccgctggccttgctgctccacgccgccaggccggaagtgcagctggttgaatctggcggaggactggttcaggctggcggatctctgagactgtcttgtgccgccagcggcagaacctttagcatgggctggtttagacaggcccctggcaaagagagagagttcgtcgccgccatcacatactctggcggcagcccttactacgccgactctgtgaagggcagattcaccatcagccgggacaacgccaagaacaccgtgtacctccagatgaacagcctgaagcctgaggacaccgccgtgtactactgcgccgccaatccaacatacggcagcgactggaacgccgagaattggggccagggaacccaagtgacagtgtctagcctcgagagcggcggaggcggatctttcgaagaagtgcagctggttgaatctggcggaggactggttcagcctggcggatctctgagactgtcttgtgccgccagcggcttcagcttcagcgacttttggatgagctgggtccgacaggcccctggcaaaggacttgaatgggtcgccacaatcagccaggccggcagcgagaaggactacgtggactctgtgaagggcagattcaccatcagccgggacaacgccaagaagtccctgtacctccagatgaacagcctgagagccgaggacaccgccgtgtactattgtgcctctggcgtgtacagcttcgactacagaggccagggcaccctggtcacagtctcttctctcgaggacctgaagaacgtgttcccacctgaggtggccgtgttcgagcctagcgaggccgagatcagccacacccagaaagccaccctcgtgtgcctggctaccggcttctaccccgaccatgtggaactgtcttggtgggtcaacggcaaagaggtgcacagcggcgtgtctaccgacccccagccactgaaagaacagcccgccctgaacgacagccggtactgcctgagcagcagactgagagtgtccgccaccttctggcagaacccccggaaccacttcagatgccaggtgcagttctacggcctgagcgagaacgacgagtggacccaggacagagccaagcccgtgacccagatcgtgtctgccgaagcctggggcagagccgattgcggctttaccagcgagagctaccagcagggcgtgctgagcgccaccatcctgtacgagatcctgctgggcaaggccaccctgtacgccgtgctggtgtctgccctggtgctgatggctatggtcaagcggaaggacagccggggaagggccaagcgatctggatctggagcaacaaacttctcactactcaaacaagcaggtgacgtggaggagaatcccgggcctactagaggccatatgaccgagtacaagcccacggtgcgcctcgccacccgcgacgacgtccccagggccgtacgcaccctcgccgccgcgttcgccgactaccccgccacgcgccacaccgtcgatccggaccgccacatcgagcgggtcaccgagctgcaagaactcttcctcacgcgcgtcgggctcgacatcggcaaggtgtgggtcgcggacgacggcgccgcggtggcggtctggaccacgccggagagcgtcgaagcgggggcggtgttcgccgagatcggcccgcgcatggccgagttgagcggttcccggctggccgcgcagcaacagatggaaggcctcctggcgccgcaccggcccaaggagcccgcgtggttcctggccaccgtcggcgtctcgcccgaccaccagggcaagggtctgggcagcgccgtcgtgctccccggagtggaggcggccgagcgcgccggggtgcccgccttcctggagacctccgcgccccgcaacctccccttctacgagcggctcggcttcaccgtcaccgccgacgtcgaggtgcccgaaggaccgcgcacctggtgcatgacccgcaagcccggtgcctga

SEQ ID NO: 7308 - DNA, 2178 bp, Artificial Sequence
  Synthetic Polynucloetide
atggccttaccagtgaccgccttgctcctgccgctggccttgctgctccacgccgccaggccggaagtgcagctggttgaatctggcggaggactggttcaggctggcggatctctgagactgtcttgtgccgccagcggcagaacctttagcatgggctggtttagacaggcccctggcaaagagagagagttcgtcgccgccatcacatactctggcggcagcccttactacgccgactctgtgaagggcagattcaccatcagccgggacaacgccaagaacaccgtgtacctccagatgaacagcctgaagcctgaggacaccgccgtgtactactgcgccgccaatccaacatacggcagcgactggaacgccgagaattggggccagggaacccaagtgacagtgtctagcctcgagagcggcggaggcggatctttcgaagaagtgcagctggttgaatctggcggaggactggttcagcctggcggatctctgagactgtcttgtgccgccagcggcttcagcttcagcgacttttggatgagctgggtccgacaggcccctggcaaaggacttgaatgggtcgccacaatcagccaggccggcagcgagaaggactacgtggactctgtgaagggcagattcaccatcagccgggacaacgccaagaagtccctgtacctccagatgaacagcctgagagccgaggacaccgccgtgtactattgtgcctctggcgtgtacagcttcgactacagaggccagggcaccctggtcacagtctcttctacgcgtgagcagaaactgatctcggaagaggatctggggagcggcaccccattcccttctctggcccctcccatcatgctgctggtggacggcaagcagcagatggtggtcgtgtgcctggtgctggatgtggccccacctggactggacagccccatctggtttagcgccggcaatggctctgccctggacgcctttacctacggcccaagccctgccaccgatggcacctggacaaatctggcccacctgagcctgcccagcgaggaactggcttcttgggagcctctcgtgtgccacacaggacctggcgctgagggacacagcagatccacccagcctatgcacctgtctggcgaggccagcaccgccagaacctgtcctcaggaacctctgagaggcacccctggcggagcactgtggctgggagtgctgagactgctgctgttcaagctgctgctgtttgacctgctgctgacctgctcctgtctgtgcgatcctgccggccctctgccttctcctgccaccaccacaagactgagagccctgggcagccacagactgcaccctgccacagagacaggcggcagagaggccacaagcagccctagaccccagcccagagacagaagatggggcgataccccccctggcagaaagcctggatctccagtccgcgccaagagaagcggatctggcgtgaagcagaccctgaatttcgacctgctgaagctggctggcgacgtggaatccaacccaggcccttctagatctagaggccatatgaccgagtacaagcccacggtgcgcctcgccacccgcgacgacgtccccagggccgtacgcaccctcgccgccgcgttcgccgactaccccgccacgcgccacaccgtcgatccggaccgccacatcgagcgggtcaccgagctgcaagaactcttcctcacgcgcgtcgggctcgacatcggcaaggtgtgggtcgcggacgacggcgccgcggtggcggtctggaccacgccggagagcgtcgaagcgggggcggtgttcgccgagatcggcccgcgcatggccgagttgagcggttcccggctggccgcgcagcaacagatggaaggcctcctggcgccgcaccggcccaaggagcccgcgtggttcctggccaccgtcggcgtctcgcccgaccaccagggcaagggtctgggcagcgccgtcgtgctccccggagtggaggcggccgagcgcgccggggtgcccgccttcctggagacctccgcgccccgcaacctccccttctacgagcggctcggcttcaccgtcaccgccgacgtcgaggtgcccgaaggaccgcgcacctggtgcatgacccgcaagcccggtgcctga

SEQ ID NO: 7309 - DNA, 1650 bp, Artificial Sequence; identical to SEQ ID NO: 7163
  Synthetic Polynucloetide

SEQ ID NO: 7310 - DNA, 957 bp, Artificial Sequence; identical to SEQ ID NO: 7164
  Synthetic Polynucloetide

SEQ ID NO: 7311 - DNA, 1338 bp, Artificial Sequence
  Synthetic Polynucloetide
atggactggatttggcgcatccttttccttgtcggcgctgctaccggcgcgcattccttcgaagaagtgcagctggttgaatctggcggaggactggttcagcctggcggatctctgagactgtcttgtgccgccagcggcttcagcttcagcgacttttggatgagctgggtccgacaggcccctggcaaaggacttgaatgggtcgccacaatcagccaggccggcagcgagaaggactacgtggactctgtgaagggcagattcaccatcagccgggacaacgccaagaagtccctgtacctccagatgaacagcctgagagccgaggacaccgccgtgtactattgtgcctctggcgtgtacagcttcgactacagaggccagggcaccctggtcacagtctcttctacgcgtatccagaaccctgatcctgccgtgtaccagctgcgggatagcaagagcagcgacaagagcgtgtgtctgttcaccgacttcgacagccagaccaacgtgtcccagagcaaggactccgacgtgtacatcaccgataagaccgtgctggacatgcggagcatggacttcaagagcaactccgccgtggcctggtccaacaagtccgatttcgcctgcgccaacgccttcaacaacagcattatccccgaggacacattcttcccaagccccgagagcagctgcgacgtgaagctggtggaaaagagcttcgagacagacaccaacctgaacttccagaacctgagcgtgatcggcttcagaatcctgctgctgaaagtggccggctttaacctgctgatgaccctgcggctgtggtccagccgcgccaagagaagcggatctggcgtgaagcagaccctgaatttcgacctgctgaagctggctggcgacgtggaatccaacccaggcccttctagaggccatatggccaagcctttgtctcaagaagaatccaccctcattgaaagagcaacggctacaatcaacagcatccccatctctgaagactacagcgtcgccagcgcagctctctctagcgacggccgcatcttcactggtgtcaatgtatatcattttactgggggaccttgtgcagaactcgtggtgctgggcactgctgctgctgcggcagctggcaacctgacttgtatcgtcgcgatcggaaatgagaacaggggcatcttgagcccctgcggacggtgccgacaggtgcttctcgatctgcatcctgggatcaaagccatagtgaaggacagtgatggacagccgacggcagttgggattcgtgaattgctgccctctggttatgtgtgggagggctga

SEQ ID NO: 7312 - DNA, 837 bp, Artificial Sequence
  Synthetic Polynucloetide
atggactggatttggcgcatccttttccttgtcggcgctgctaccggcgcgcattccttcgaagaagtgcagctggttgaatctggcggaggactggttcagcctggcggatctctgagactgtcttgtgccgccagcggcttcagcttcagcgacttttggatgagctgggtccgacaggcccctggcaaaggacttgaatgggtcgccacaatcagccaggccggcagcgagaaggactacgtggactctgtgaagggcagattcaccatcagccgggacaacgccaagaagtccctgtacctccagatgaacagcctgagagccgaggacaccgccgtgtactattgtgcctctggcgtgtacagcttcgactacagaggccagggcaccctggtcacagtctcttctacgcgtatccagaaccctgatcctgccgtgtaccagctgcgggatagcaagagcagcgacaagagcgtgtgtctgttcaccgacttcgacagccagaccaacgtgtcccagagcaaggactccgacgtgtacatcaccgataagaccgtgctggacatgcggagcatggacttcaagagcaactccgccgtggcctggtccaacaagtccgatttcgcctgcgccaacgccttcaacaacagcattatccccgaggacacattcttcccaagccccgagagcagctgcgacgtgaagctggtggaaaagagcttcgagacagacaccaacctgaacttccagaacctgagcgtgatcggcttcagaatcctgctgctgaaagtggccggctttaacctgctgatgaccctgcggctgtggtccagc

SEQ ID NO: 7313 - DNA, 1704 bp, Artificial Sequence; identical to SEQ ID NO: 7167
  Synthetic Polynucloetide

SEQ ID NO: 7314 - DNA, 1014 bp, Artificial Sequence; identical to SEQ ID NO: 7168
  Synthetic Polynucloetide

SEQ ID NO: 7315 - DNA, 1374 bp, Artificial Sequence
  Synthetic Polynucloetide
atggactggatttggcgcatccttttccttgtcggcgctgctaccggcgcgcattccttcgaagaagtgcagctggttgaatctggcggaggactggttcagcctggcggatctctgagactgtcttgtgccgccagcggcttcagcttcagcgacttttggatgagctgggtccgacaggcccctggcaaaggacttgaatgggtcgccacaatcagccaggccggcagcgagaaggactacgtggactctgtgaagggcagattcaccatcagccgggacaacgccaagaagtccctgtacctccagatgaacagcctgagagccgaggacaccgccgtgtactattgtgcctctggcgtgtacagcttcgactacagaggccagggcaccctggtcacagtctcttctacgcgtgagcagaaactgatctcggaagaggatgggagcggcatccagaaccctgatcctgccgtgtaccagctgcgggatagcaagagcagcgacaagagcgtgtgtctgttcaccgacttcgacagccagaccaacgtgtcccagagcaaggactccgacgtgtacatcaccgataagtgcgtgctggacatgcggagcatggacttcaagagcaactccgccgtggcctggtccaacaagtccgatttcgcctgcgccaacgccttcaacaacagcattatccccgaggacacattcttcccaagccccgagagcagctgcgacgtgaagctggtggaaaagagcttcgagacagacaccaacctgaacttccagaacctgagcgtgatcggcttcagaatcctgctgctgaaagtggccggctttaacctgctgatgaccctgcggctgtggtccagccgcgccaagagaagcggatctggcgtgaagcagaccctgaatttcgacctgctgaagctggctggcgacgtggaatccaacccaggcccttctagaggccatatggccaagcctttgtctcaagaagaatccaccctcattgaaagagcaacggctacaatcaacagcatccccatctctgaagactacagcgtcgccagcgcagctctctctagcgacggccgcatcttcactggtgtcaatgtatatcattttactgggggaccttgtgcagaactcgtggtgctgggcactgctgctgctgcggcagctggcaacctgacttgtatcgtcgcgatcggaaatgagaacaggggcatcttgagcccctgcggacggtgccgacaggtgcttctcgatctgcatcctgggatcaaagccatagtgaaggacagtgatggacagccgacggcagttgggattcgtgaattgctgccctctggttatgtgtgggagggctga

SEQ ID NO: 7316 - DNA, 876 bp, Artificial Sequence
  Synthetic Polynucloetide
atggactggatttggcgcatccttttccttgtcggcgctgctaccggcgcgcattccttcgaagaagtgcagctggttgaatctggcggaggactggttcagcctggcggatctctgagactgtcttgtgccgccagcggcttcagcttcagcgacttttggatgagctgggtccgacaggcccctggcaaaggacttgaatgggtcgccacaatcagccaggccggcagcgagaaggactacgtggactctgtgaagggcagattcaccatcagccgggacaacgccaagaagtccctgtacctccagatgaacagcctgagagccgaggacaccgccgtgtactattgtgcctctggcgtgtacagcttcgactacagaggccagggcaccctggtcacagtctcttctacgcgtgagcagaaactgatctcggaagaggatgggagcggcatccagaaccctgatcctgccgtgtaccagctgcgggatagcaagagcagcgacaagagcgtgtgtctgttcaccgacttcgacagccagaccaacgtgtcccagagcaaggactccgacgtgtacatcaccgataagtgcgtgctggacatgcggagcatggacttcaagagcaactccgccgtggcctggtccaacaagtccgatttcgcctgcgccaacgccttcaacaacagcattatccccgaggacacattcttcccaagccccgagagcagctgcgacgtgaagctggtggaaaagagcttcgagacagacaccaacctgaacttccagaacctgagcgtgatcggcttcagaatcctgctgctgaaagtggccggctttaacctgctgatgaccctgcggctgtggtccagctga

SEQ ID NO: 7317 - DNA, 1932 bp, Artificial Sequence
  Synthetic Polynucloetide
atggccttaccagtgaccgccttgctcctgccgctggccttgctgctccacgccgccaggccggaagtgcagctggttgaatctggcggaggactggttcaggctggcggatctctgagactgtcttgtgccgccagcggcagaacctttagcatgggctggtttagacaggcccctggcaaagagagagagttcgtcgccgccatcacatactctggcggcagcccttactacgccgactctgtgaagggcagattcaccatcagccgggacaacgccaagaacaccgtgtacctccagatgaacagcctgaagcctgaggacaccgccgtgtactactgcgccgccaatccaacatacggcagcgactggaacgccgagaattggggccagggaacccaagtgacagtgtctagcctcgagagcggcggaggcggatctttcgaagaagtgcagctggttgaatctggcggaggactggttcagcctggcggatctctgagactgtcttgtgccgccagcggcttcagcttcagcgacttttggatgagctgggtccgacaggcccctggcaaaggacttgaatgggtcgccacaatcagccaggccggcagcgagaaggactacgtggactctgtgaagggcagattcaccatcagccgggacaacgccaagaagtccctgtacctccagatgaacagcctgagagccgaggacaccgccgtgtactattgtgcctctggcgtgtacagcttcgactacagaggccagggcaccctggtcacagtctcttctacgcgtgggagcggcatccagaaccctgatcctgccgtgtaccagctgcgggatagcaagagcagcgacaagagcgtgtgtctgttcaccgacttcgacagccagaccaacgtgtcccagagcaaggactccgacgtgtacatcaccgataagaccgtgctggacatgcggagcatggacttcaagagcaactccgccgtggcctggtccaacaagtccgatttcgcctgcgccaacgccttcaacaacagcattatccccgaggacacattcttcccaagcagcgacgtgccctgcgacgtgaagctggtggaaaagagcttcgagacagacaccaacctgaacttccagaacctgagcgtgatcggcttcagaatcctgctgctgaaagtggccggctttaacctgctgatgaccctgcggctgtggtccagccgcgccaagagaagcggatctggcgtgaagcagaccctgaatttcgacctgctgaagctggctggcgacgtggaatccaacccaggcccttctagaggccatatgaccgagtacaagcccacggtgcgcctcgccacccgcgacgacgtccccagggccgtacgcaccctcgccgccgcgttcgccgactaccccgccacgcgccacaccgtcgatccggaccgccacatcgagcgggtcaccgagctgcaagaactcttcctcacgcgcgtcgggctcgacatcggcaaggtgtgggtcgcggacgacggcgccgcggtggcggtctggaccacgccggagagcgtcgaagcgggggcggtgttcgccgagatcggcccgcgcatggccgagttgagcggttcccggctggccgcgcagcaacagatggaaggcctcctggcgccgcaccggcccaaggagcccgcgtggttcctggccaccgtcggcgtctcgcccgaccaccagggcaagggtctgggcagcgccgtcgtgctccccggagtggaggcggccgagcgcgccggggtgcccgccttcctggagacctccgcgccccgcaacctccccttctacgagcggctcggcttcaccgtcaccgccgacgtcgaggtgcccgaaggaccgcgcacctggtgcatgacccgcaagcccggtgcctga

SEQ ID NO: 7318 - DNA, 2028 bp, Artificial Sequence
  Synthetic Polynucloetide
atggccttaccagtgaccgccttgctcctgccgctggccttgctgctccacgccgccaggccggaagtgcagctggttgaatctggcggaggactggttcaggctggcggatctctgagactgtcttgtgccgccagcggcagaacctttagcatgggctggtttagacaggcccctggcaaagagagagagttcgtcgccgccatcacatactctggcggcagcccttactacgccgactctgtgaagggcagattcaccatcagccgggacaacgccaagaacaccgtgtacctccagatgaacagcctgaagcctgaggacaccgccgtgtactactgcgccgccaatccaacatacggcagcgactggaacgccgagaattggggccagggaacccaagtgacagtgtctagcctcgagagcggcggaggcggatctttcgaagaagtgcagctggttgaatctggcggaggactggttcagcctggcggatctctgagactgtcttgtgccgccagcggcttcagcttcagcgacttttggatgagctgggtccgacaggcccctggcaaaggacttgaatgggtcgccacaatcagccaggccggcagcgagaaggactacgtggactctgtgaagggcagattcaccatcagccgggacaacgccaagaagtccctgtacctccagatgaacagcctgagagccgaggacaccgccgtgtactattgtgcctctggcgtgtacagcttcgactacagaggccagggcaccctggtcacagtctcttctctcgaggacctgaagaacgtgttcccacctgaggtggccgtgttcgagcctagcaaggccgagatcgcccacacccagaaagccaccctcgtgtgcctggctaccggcttctaccccgaccatgtggaactgtcttggtgggtcaacggcaaagaggtgcacagcggcgtgtctaccgacccccagccactgaaagaacagcccgccctgaacgacagccggtactgcctgagcagcagactgagagtgtccgccaccttctggcagaacccccggaaccacttcagatgccaggtgcagttctacggcctgagcgagaacgacgagtggacccaggacagagccaagcccgtgacccagatcgtgtctgccgaagcctggggcagagccgattgcggcatcaccagcgccagctaccaccagggcgtgctgagcgccaccatcctgtacgagatcctgctgggcaaggccaccctgtacgccgtgctggtgtctgccctggtgctgatggctatggtcaagcggaaggacagccggggaagggccaagcgatctggatctggagcaacaaacttctcactactcaaacaagcaggtgacgtggaggagaatcccgggcctactagaggccatatgaccgagtacaagcccacggtgcgcctcgccacccgcgacgacgtccccagggccgtacgcaccctcgccgccgcgttcgccgactaccccgccacgcgccacaccgtcgatccggaccgccacatcgagcgggtcaccgagctgcaagaactcttcctcacgcgcgtcgggctcgacatcggcaaggtgtgggtcgcggacgacggcgccgcggtggcggtctggaccacgccggagagcgtcgaagcgggggcggtgttcgccgagatcggcccgcgcatggccgagttgagcggttcccggctggccgcgcagcaacagatggaaggcctcctggcgccgcaccggcccaaggagcccgcgtggttcctggccaccgtcggcgtctcgcccgaccaccagggcaagggtctgggcagcgccgtcgtgctccccggagtggaggcggccgagcgcgccggggtgcccgccttcctggagacctccgcgccccgcaacctccccttctacgagcggctcggcttcaccgtcaccgccgacgtcgaggtgcccgaaggaccgcgcacctggtgcatgacccgcaagcccggtgcctga

SEQ ID NO: 7319 - DNA, 2097 bp, Artificial Sequence
  Synthetic Polynucloetide
atggccttaccagtgaccgccttgctcctgccgctggccttgctgctccacgccgccaggccggaagtgcagctggttgaatctggcggaggactggttcaggctggcggatctctgagactgtcttgtgccgccagcggcagaacctttagcatgggctggtttagacaggcccctggcaaagagagagagttcgtcgccgccatcacatactctggcggcagcccttactacgccgactctgtgaagggcagattcaccatcagccgggacaacgccaagaacaccgtgtacctccagatgaacagcctgaagcctgaggacaccgccgtgtactactgcgccgccaatccaacatacggcagcgactggaacgccgagaattggggccagggaacccaagtgacagtgtctagcctcgagagcggcggaggcggatctttcgaagaagtgcagctggttgaatctggcggaggactggttcagcctggcggatctctgagactgtcttgtgccgccagcggcttcagcttcagcgacttttggatgagctgggtccgacaggcccctggcaaaggacttgaatgggtcgccacaatcagccaggccggcagcgagaaggactacgtggactctgtgaagggcagattcaccatcagccgggacaacgccaagaagtccctgtacctccagatgaacagcctgagagccgaggacaccgccgtgtactattgtgcctctggcgtgtacagcttcgactacagaggccagggcaccctggtcacagtctcttctacgcgtgggtctggaggcggaggcagcggcggaggcgggagcggcgacggtaacgaggagatgggaggaatcactcaaaccccttacaaagtctcaatttcaggaacaactgttatccttacatgtccccagtatcctggcagcgagatcctttggcagcataacgacaagaatatagggggagatgaagacgataagaatatcggatctgacgaggatcacttgagcctgaaagagttctccgagcttgaacaaagcggatattatgtgtgctatccgcgcgggtcaaagccggaagacgctaacttttacctttatctccgagccagagtgtgcgaaaattgcatggaaatggacgttatgtccgttgctacaatagttatcgtagatatatgcatcacgggtggactgcttctgctggtttattattggtccaagaatagaaaggccaaagctaaacccgtgaccagaggcgctggcgcaggcggaaggcaaaggggacaaaacaaagaacggccaccaccagtgccaaatccagattatgagcctattcggaaaggacagagggacctgtactctggcctgaatcagagaagaatccgcgccaagagaagcggatctggcgtgaagcagaccctgaatttcgacctgctgaagctggctggcgacgtggaatccaacccaggcccttctagaggccatatgaccgagtacaagcccacggtgcgcctcgccacccgcgacgacgtccccagggccgtacgcaccctcgccgccgcgttcgccgactaccccgccacgcgccacaccgtcgatccggaccgccacatcgagcgggtcaccgagctgcaagaactcttcctcacgcgcgtcgggctcgacatcggcaaggtgtgggtcgcggacgacggcgccgcggtggcggtctggaccacgccggagagcgtcgaagcgggggcggtgttcgccgagatcggcccgcgcatggccgagttgagcggttcccggctggccgcgcagcaacagatggaaggcctcctggcgccgcaccggcccaaggagcccgcgtggttcctggccaccgtcggcgtctcgcccgaccaccagggcaagggtctgggcagcgccgtcgtgctccccggagtggaggcggccgagcgcgccggggtgcccgccttcctggagacctccgcgccccgcaacctccccttctacgagcggctcggcttcaccgtcaccgccgacgtcgaggtgcccgaaggaccgcgcacctggtgcatgacccgcaagcccggtgcctga

SEQ ID NO: 7320 - DNA, 1992 bp, Artificial Sequence
  Synthetic Polynucloetide
atggccttaccagtgaccgccttgctcctgccgctggccttgctgctccacgccgccaggccggaagtgcagctggttgaatctggcggaggactggttcaggctggcggatctctgagactgtcttgtgccgccagcggcagaacctttagcatgggctggtttagacaggcccctggcaaagagagagagttcgtcgccgccatcacatactctggcggcagcccttactacgccgactctgtgaagggcagattcaccatcagccgggacaacgccaagaacaccgtgtacctccagatgaacagcctgaagcctgaggacaccgccgtgtactactgcgccgccaatccaacatacggcagcgactggaacgccgagaattggggccagggaacccaagtgacagtgtctagcctcgagagcggcggaggcggatctttcgaagaagtgcagctggttgaatctggcggaggactggttcagcctggcggatctctgagactgtcttgtgccgccagcggcttcagcttcagcgacttttggatgagctgggtccgacaggcccctggcaaaggacttgaatgggtcgccacaatcagccaggccggcagcgagaaggactacgtggactctgtgaagggcagattcaccatcagccgggacaacgccaagaagtccctgtacctccagatgaacagcctgagagccgaggacaccgccgtgtactattgtgcctctggcgtgtacagcttcgactacagaggccagggcaccctggtcacagtctcttctacgcgtgggtctggaggcggaggcagcggcggaggcgggagcggcttcaagatccccatcgaggaactggaagatcgggtgttcgtgaactgcaacacctctatcacctgggtggaaggcaccgtgggaacactgctgagcgacatcaccagactggacctcggcaagcggattctggaccctcggggcatctacagatgcaacggcaccgacatctacaaggacaaagaaagcaccgtgcaggtccactacagaatgtgccagtcctgcgtggaactggaccctgctacagtggccggcatcatcgtgaccgatgtgatcgctactctgctgctggctctgggagtgttctgcttcgccggacacgaaacaggcagactgtctggcgctgccgatacacaggccctgctgagaaacgaccaagtgtatcagcccctgcgcgacagagatgatgcccagtattctcacctcggcggcaactgggctagaaacaagcgcgccaagagaagcggatctggcgtgaagcagaccctgaatttcgacctgctgaagctggctggcgacgtggaatccaacccaggcccttctagaggccatatgaccgagtacaagcccacggtgcgcctcgccacccgcgacgacgtccccagggccgtacgcaccctcgccgccgcgttcgccgactaccccgccacgcgccacaccgtcgatccggaccgccacatcgagcgggtcaccgagctgcaagaactcttcctcacgcgcgtcgggctcgacatcggcaaggtgtgggtcgcggacgacggcgccgcggtggcggtctggaccacgccggagagcgtcgaagcgggggcggtgttcgccgagatcggcccgcgcatggccgagttgagcggttcccggctggccgcgcagcaacagatggaaggcctcctggcgccgcaccggcccaaggagcccgcgtggttcctggccaccgtcggcgtctcgcccgaccaccagggcaagggtctgggcagcgccgtcgtgctccccggagtggaggcggccgagcgcgccggggtgcccgccttcctggagacctccgcgccccgcaacctccccttctacgagcggctcggcttcaccgtcaccgccgacgtcgaggtgcccgaaggaccgcgcacctggtgcatgacccgcaagcccggtgcctga

SEQ ID NO: 7321 - DNA, 2022 bp, Artificial Sequence
  Synthetic Polynucloetide
atggccttaccagtgaccgccttgctcctgccgctggccttgctgctccacgccgccaggccggaagtgcagctggttgaatctggcggaggactggttcaggctggcggatctctgagactgtcttgtgccgccagcggcagaacctttagcatgggctggtttagacaggcccctggcaaagagagagagttcgtcgccgccatcacatactctggcggcagcccttactacgccgactctgtgaagggcagattcaccatcagccgggacaacgccaagaacaccgtgtacctccagatgaacagcctgaagcctgaggacaccgccgtgtactactgcgccgccaatccaacatacggcagcgactggaacgccgagaattggggccagggaacccaagtgacagtgtctagcctcgagagcggcggaggcggatctttcgaagaagtgcagctggttgaatctggcggaggactggttcagcctggcggatctctgagactgtcttgtgccgccagcggcttcagcttcagcgacttttggatgagctgggtccgacaggcccctggcaaaggacttgaatgggtcgccacaatcagccaggccggcagcgagaaggactacgtggactctgtgaagggcagattcaccatcagccgggacaacgccaagaagtccctgtacctccagatgaacagcctgagagccgaggacaccgccgtgtactattgtgcctctggcgtgtacagcttcgactacagaggccagggcaccctggtcacagtctcttctacgcgtgggtctggaggcggaggcagcggcggaggcgggagcggccagagcatcaagggcaaccacctggtcaaggtgtacgactaccaagaggacggcagcgtgctgctgacatgtgatgccgaggccaagaacatcacctggtttaaggacggcaagatgatcggcttcctgaccgaggacaagaagaagtggaacctgggcagcaacgctaaggaccccagaggcatgtatcagtgcaagggcagccagaacaagagcaagcccctccaggtgtactaccggatgtgccagaactgcatcgagctgaacgccgctaccatcagcggctttctgttcgccgagatcgtgtccatcttcgtgctggccgtgggcgtgtactttatcgctggacaggatggcgtgcggcagagcagagcttccgataagcaaaccctgctgcctaacgaccagctgtaccagcctctgaaggacagagaggacgaccagtacagccacctccagggcaatcagctgagaagaaaccgcgccaagagaagcggatctggcgtgaagcagaccctgaatttcgacctgctgaagctggctggcgacgtggaatccaacccaggcccttctagaggccatatgaccgagtacaagcccacggtgcgcctcgccacccgcgacgacgtccccagggccgtacgcaccctcgccgccgcgttcgccgactaccccgccacgcgccacaccgtcgatccggaccgccacatcgagcgggtcaccgagctgcaagaactcttcctcacgcgcgtcgggctcgacatcggcaaggtgtgggtcgcggacgacggcgccgcggtggcggtctggaccacgccggagagcgtcgaagcgggggcggtgttcgccgagatcggcccgcgcatggccgagttgagcggttcccggctggccgcgcagcaacagatggaaggcctcctggcgccgcaccggcccaaggagcccgcgtggttcctggccaccgtcggcgtctcgcccgaccaccagggcaagggtctgggcagcgccgtcgtgctccccggagtggaggcggccgagcgcgccggggtgcccgccttcctggagacctccgcgccccgcaacctccccttctacgagcggctcggcttcaccgtcaccgccgacgtcgaggtgcccgaaggaccgcgcacctggtgcatgacccgcaagcccggtgcctga

SEQ ID NO: 7322 - DNA, 1971 bp, Artificial Sequence
  Synthetic Polynucloetide
atggccttaccagtgaccgccttgctcctgccgctggccttgctgctccacgccgccaggccggaagtgcagctggttgaatctggcggaggactggttcaggctggcggatctctgagactgtcttgtgccgccagcggcagaacctttagcatgggctggtttagacaggcccctggcaaagagagagagttcgtcgccgccatcacatactctggcggcagcccttactacgccgactctgtgaagggcagattcaccatcagccgggacaacgccaagaacaccgtgtacctccagatgaacagcctgaagcctgaggacaccgccgtgtactactgcgccgccaatccaacatacggcagcgactggaacgccgagaattggggccagggaacccaagtgacagtgtctagcctcgagagcggcggaggcggatctttcgaagaagtgcagctggttgaatctggcggaggactggttcagcctggcggatctctgagactgtcttgtgccgccagcggcttcagcttcagcgacttttggatgagctgggtccgacaggcccctggcaaaggacttgaatgggtcgccacaatcagccaggccggcagcgagaaggactacgtggactctgtgaagggcagattcaccatcagccgggacaacgccaagaagtccctgtacctccagatgaacagcctgagagccgaggacaccgccgtgtactattgtgcctctggcgtgtacagcttcgactacagaggccagggcaccctggtcacagtctcttctacgcgtgggtctggaggcggaggcagcggcggaggcgggagcggccagagttttgggttgttggaccctaaattgtgctatctgttggacggaatcctgttcatttacggagtgatcctgaccgcattgttcctgcgggttaagttttccagatccgcagacgcacccgcttaccaacaagggcagaaccaactctacaatgaacttaatttggggcggagggaagagtacgacgttctggacaaaaggaggggacgagatcccgagatgggcggaaagcctcagcgaaggaagaatccgcaagaggggctttataacgaactccagaaagataaaatggcagaagcctatagtgagattgggatgaagggagaaaggaggaggggtaaaggtcacgatgggttgtaccaaggattgagcacagccactaaagatacctatgatgcgctccacatgcaggccctgccgccaagacgcgccaagagaagcggatctggcgtgaagcagaccctgaatttcgacctgctgaagctggctggcgacgtggaatccaacccaggcccttctagaggccatatgaccgagtacaagcccacggtgcgcctcgccacccgcgacgacgtccccagggccgtacgcaccctcgccgccgcgttcgccgactaccccgccacgcgccacaccgtcgatccggaccgccacatcgagcgggtcaccgagctgcaagaactcttcctcacgcgcgtcgggctcgacatcggcaaggtgtgggtcgcggacgacggcgccgcggtggcggtctggaccacgccggagagcgtcgaagcgggggcggtgttcgccgagatcggcccgcgcatggccgagttgagcggttcccggctggccgcgcagcaacagatggaaggcctcctggcgccgcaccggcccaaggagcccgcgtggttcctggccaccgtcggcgtctcgcccgaccaccagggcaagggtctgggcagcgccgtcgtgctccccggagtggaggcggccgagcgcgccggggtgcccgccttcctggagacctccgcgccccgcaacctccccttctacgagcggctcggcttcaccgtcaccgccgacgtcgaggtgcccgaaggaccgcgcacctggtgcatgacccgcaagcccggtgcctga

SEQ ID NO: 7323 - DNA, 2595 bp, Artificial Sequence
  Synthetic Polynucloetide
atggccttaccagtgaccgccttgctcctgccgctggccttgctgctccacgccgccaggccggaagtgcagctggttgaatctggcggaggactggttcaggctggcggatctctgagactgtcttgtgccgccagcggcagaacctttagcatgggctggtttagacaggcccctggcaaagagagagagttcgtcgccgccatcacatactctggcggcagcccttactacgccgactctgtgaagggcagattcaccatcagccgggacaacgccaagaacaccgtgtacctccagatgaacagcctgaagcctgaggacaccgccgtgtactactgcgccgccaatccaacatacggcagcgactggaacgccgagaattggggccagggaacccaagtgacagtgtctagcctcgagggacagcctaaggccaatcctaccgtgacactgttccctccaagcagcgaagaactccaggccaacaaggccacacttgtgtgcctgatctccgacttctaccctggggctgtgacagtggcttggaaggccgatggatctcctgtgaaagccggcgtggaaaccaccaagccatccaagcagagcaacaacaaatacgccgccagctcctacctgagcctgacacctgagcagtggaagtcccacagatcctacagctgccaagtgacccacgaaggcagcaccgtggaaaagacagtggcccctacagagtgcagcggcagagccgattgcggctttaccagcgagagctaccagcagggcgtgctgagcgccaccatcctgtacgagatcctgctgggcaaggccaccctgtacgccgtgctggtgtctgccctggtgctgatggctatggtcaagcggaaggacagccggggaagggccaagcgatctggatctggagcaacaaacttctcactactcaaacaagcaggtgacgtggaggagaatcccgggcctactagtatggactggatttggcgcatccttttccttgtcggcgctgctaccggcgcgcattccttcgaagaagtgcagctggttgaatctggcggaggactggttcagcctggcggatctctgagactgtcttgtgccgccagcggcttcagcttcagcgacttttggatgagctgggtccgacaggcccctggcaaaggacttgaatgggtcgccacaatcagccaggccggcagcgagaaggactacgtggactctgtgaagggcagattcaccatcagccgggacaacgccaagaagtccctgtacctccagatgaacagcctgagagccgaggacaccgccgtgtactattgtgcctctggcgtgtacagcttcgactacagaggccagggcaccctggtcacagtctcttctacgcgtgcctctacaaagggaccctccgtgtttcctctggctcccagcagcaagtctacaagcggaggaacagccgctctgggctgcctggtcaaggattactttcccgagcctgtgaccgtgtcctggaatagcggagcactgacaagcggcgtgcacacctttccagccgtgctgcaaagcagcggcctgtactctctgagcagcgtggtcacagtgcctagctctagcctgggcacccagacctacatctgcaatgtgaaccacaagcctagcaacaccaaggtggacaagagagtggaacccaagagctgtatccccgaggacacattcttcccaagccccgagagcagctgcgacgtgaagctggtggaaaagagcttcgagacagacaccaacctgaacttccagaacctgagcgtgatcggcttcagaatcctgctgctgaaagtggccggctttaacctgctgatgaccctgcggctgtggtccagccgcgccaagagaagcggatctggcgtgaagcagaccctgaatttcgacctgctgaagctggctggcgacgtggaatccaacccaggcccttctagaggccatatgaccgagtacaagcccacggtgcgcctcgccacccgcgacgacgtccccagggccgtacgcaccctcgccgccgcgttcgccgactaccccgccacgcgccacaccgtcgatccggaccgccacatcgagcgggtcaccgagctgcaagaactcttcctcacgcgcgtcgggctcgacatcggcaaggtgtgggtcgcggacgacggcgccgcggtggcggtctggaccacgccggagagcgtcgaagcgggggcggtgttcgccgagatcggcccgcgcatggccgagttgagcggttcccggctggccgcgcagcaacagatggaaggcctcctggcgccgcaccggcccaaggagcccgcgtggttcctggccaccgtcggcgtctcgcccgaccaccagggcaagggtctgggcagcgccgtcgtgctccccggagtggaggcggccgagcgcgccggggtgcccgccttcctggagacctccgcgccccgcaacctccccttctacgagcggctcggcttcaccgtcaccgccgacgtcgaggtgcccgaaggaccgcgcacctggtgcatgacccgcaagcccggtgcctga

SEQ ID NO: 7324 - DNA, 1893 bp, Artificial Sequence; identical to SEQ ID NO: 7297
  Synthetic Polynucloetide

SEQ ID NO: 7325 - DNA, 1980 bp, Artificial Sequence
  Synthetic Polynucloetide
atggccttaccagtgaccgccttgctcctgccgctggccttgctgctccacgccgccaggccggaagtgcagctggttgaatctggcggaggactggttcaggctggcggatctctgagactgtcttgtgccgccagcggcagaacctttagcatgggctggtttagacaggcccctggcaaagagagagagttcgtcgccgccatcacatactctggcggcagcccttactacgccgactctgtgaagggcagattcaccatcagccgggacaacgccaagaacaccgtgtacctccagatgaacagcctgaagcctgaggacaccgccgtgtactactgcgccgccaatccaacatacggcagcgactggaacgccgagaattggggccagggaacccaagtgacagtgtctagcctcgagggatctggcagagccgattgcggctttaccagcgagagctaccagcagggcgtgctgagcgccaccatcctgtacgagatcctgctgggcaaggccaccctgtacgccgtgctggtgtctgccctggtgctgatggctatggtcaagcggaaggacagccggggaagggccaagcgatctggatctggagcaacaaacttctcactactcaaacaagcaggtgacgtggaggagaatcccgggcctactagtatggactggatttggcgcatccttttccttgtcggcgctgctaccggcgcgcattccttcgaagaagtgcagctggttgaatctggcggaggactggttcagcctggcggatctctgagactgtcttgtgccgccagcggcttcagcttcagcgacttttggatgagctgggtccgacaggcccctggcaaaggacttgaatgggtcgccacaatcagccaggccggcagcgagaaggactacgtggactctgtgaagggcagattcaccatcagccgggacaacgccaagaagtccctgtacctccagatgaacagcctgagagccgaggacaccgccgtgtactattgtgcctctggcgtgtacagcttcgactacagaggccagggcaccctggtcacagtctcttctacgcgtggcagcatccccgaggacacattcttcccaagccccgagagcagctgcgacgtgaagctggtggaaaagagcttcgagacagacaccaacctgaacttccagaacctgagcgtgatcggcttcagaatcctgctgctgaaagtggccggctttaacctgctgatgaccctgcggctgtggtccagccgcgccaagagaagcggatctggcgtgaagcagaccctgaatttcgacctgctgaagctggctggcgacgtggaatccaacccaggcccttctagaggccatatgaccgagtacaagcccacggtgcgcctcgccacccgcgacgacgtccccagggccgtacgcaccctcgccgccgcgttcgccgactaccccgccacgcgccacaccgtcgatccggaccgccacatcgagcgggtcaccgagctgcaagaactcttcctcacgcgcgtcgggctcgacatcggcaaggtgtgggtcgcggacgacggcgccgcggtggcggtctggaccacgccggagagcgtcgaagcgggggcggtgttcgccgagatcggcccgcgcatggccgagttgagcggttcccggctggccgcgcagcaacagatggaaggcctcctggcgccgcaccggcccaaggagcccgcgtggttcctggccaccgtcggcgtctcgcccgaccaccagggcaagggtctgggcagcgccgtcgtgctccccggagtggaggcggccgagcgcgccggggtgcccgccttcctggagacctccgcgccccgcaacctccccttctacgagcggctcggcttcaccgtcaccgccgacgtcgaggtgcccgaaggaccgcgcacctggtgcatgacccgcaagcccggtgcctga

SEQ ID NO: 7326 - DNA, 1278 bp, Artificial Sequence
  Synthetic Polynucloetide
atggccttaccagtgaccgccttgctcctgccgctggccttgctgctccacgccgccaggccggaagtgcagctggttgaatctggcggaggactggttcaggctggcggatctctgagactgtcttgtgccgccagcggcagaacctttagcatgggctggtttagacaggcccctggcaaagagagagagttcgtcgccgccatcacatactctggcggcagcccttactacgccgactctgtgaagggcagattcaccatcagccgggacaacgccaagaacaccgtgtacctccagatgaacagcctgaagcctgaggacaccgccgtgtactactgcgccgccaatccaacatacggcagcgactggaacgccgagaattggggccagggaacccaagtgacagtgtctagcctcgagggatctggcagagccgattgcggctttaccagcgagagctaccagcagggcgtgctgagcgccaccatcctgtacgagatcctgctgggcaaggccaccctgtacgccgtgctggtgtctgccctggtgctgatggctatggtcaagcggaaggacagccggggaagggccaagcgatctggatctggagcaacaaacttctcactactcaaacaagcaggtgacgtggaggagaatcccgggcctactagtatggactggatttggcgcatccttttccttgtcggcgctgctaccggcgcgcattccttcgaagaagtgcagctggttgaatctggcggaggactggttcagcctggcggatctctgagactgtcttgtgccgccagcggcttcagcttcagcgacttttggatgagctgggtccgacaggcccctggcaaaggacttgaatgggtcgccacaatcagccaggccggcagcgagaaggactacgtggactctgtgaagggcagattcaccatcagccgggacaacgccaagaagtccctgtacctccagatgaacagcctgagagccgaggacaccgccgtgtactattgtgcctctggcgtgtacagcttcgactacagaggccagggcaccctggtcacagtctcttctacgcgtggcagcatccccgaggacacattcttcccaagccccgagagcagctgcgacgtgaagctggtggaaaagagcttcgagacagacaccaacctgaacttccagaacctgagcgtgatcggcttcagaatcctgctgctgaaagtggccggctttaacctgctgatgaccctgcggctgtggtccagc

SEQ ID NO: 7327 - DNA, 2007 bp, Artificial Sequence
  Synthetic Polynucloetide
atggccttaccagtgaccgccttgctcctgccgctggccttgctgctccacgccgccaggccggaagtgcagctggttgaatctggcggaggactggttcaggctggcggatctctgagactgtcttgtgccgccagcggcagaacctttagcatgggctggtttagacaggcccctggcaaagagagagagttcgtcgccgccatcacatactctggcggcagcccttactacgccgactctgtgaagggcagattcaccatcagccgggacaacgccaagaacaccgtgtacctccagatgaacagcctgaagcctgaggacaccgccgtgtactactgcgccgccaatccaacatacggcagcgactggaacgccgagaattggggccagggaacccaagtgacagtgtctagcctcgaggacaaaactcacacatgcccaccgtgcccagcaggcagagccgattgcggctttaccagcgagagctaccagcagggcgtgctgagcgccaccatcctgtacgagatcctgctgggcaaggccaccctgtacgccgtgctggtgtctgccctggtgctgatggctatggtcaagcggaaggacagccggggaagggccaagcgatctggatctggagcaacaaacttctcactactcaaacaagcaggtgacgtggaggagaatcccgggcctactagtatggactggatttggcgcatccttttccttgtcggcgctgctaccggcgcgcattccttcgaagaagtgcagctggttgaatctggcggaggactggttcagcctggcggatctctgagactgtcttgtgccgccagcggcttcagcttcagcgacttttggatgagctgggtccgacaggcccctggcaaaggacttgaatgggtcgccacaatcagccaggccggcagcgagaaggactacgtggactctgtgaagggcagattcaccatcagccgggacaacgccaagaagtccctgtacctccagatgaacagcctgagagccgaggacaccgccgtgtactattgtgcctctggcgtgtacagcttcgactacagaggccagggcaccctggtcacagtctcttctacgcgtggcagcatccccgaggacacattcttcccaagccccgagagcagctgcgacgtgaagctggtggaaaagagcttcgagacagacaccaacctgaacttccagaacctgagcgtgatcggcttcagaatcctgctgctgaaagtggccggctttaacctgctgatgaccctgcggctgtggtccagccgcgccaagagaagcggatctggcgtgaagcagaccctgaatttcgacctgctgaagctggctggcgacgtggaatccaacccaggcccttctagaggccatatgaccgagtacaagcccacggtgcgcctcgccacccgcgacgacgtccccagggccgtacgcaccctcgccgccgcgttcgccgactaccccgccacgcgccacaccgtcgatccggaccgccacatcgagcgggtcaccgagctgcaagaactcttcctcacgcgcgtcgggctcgacatcggcaaggtgtgggtcgcggacgacggcgccgcggtggcggtctggaccacgccggagagcgtcgaagcgggggcggtgttcgccgagatcggcccgcgcatggccgagttgagcggttcccggctggccgcgcagcaacagatggaaggcctcctggcgccgcaccggcccaaggagcccgcgtggttcctggccaccgtcggcgtctcgcccgaccaccagggcaagggtctgggcagcgccgtcgtgctccccggagtggaggcggccgagcgcgccggggtgcccgccttcctggagacctccgcgccccgcaacctccccttctacgagcggctcggcttcaccgtcaccgccgacgtcgaggtgcccgaaggaccgcgcacctggtgcatgacccgcaagcccggtgcctga

SEQ ID NO: 7328 - DNA, 2007 bp, Artificial Sequence
  Synthetic Polynucloetide
atggccttaccagtgaccgccttgctcctgccgctggccttgctgctccacgccgccaggccggaagtgcagctggttgaatctggcggaggactggttcaggctggcggatctctgagactgtcttgtgccgccagcggcagaacctttagcatgggctggtttagacaggcccctggcaaagagagagagttcgtcgccgccatcacatactctggcggcagcccttactacgccgactctgtgaagggcagattcaccatcagccgggacaacgccaagaacaccgtgtacctccagatgaacagcctgaagcctgaggacaccgccgtgtactactgcgccgccaatccaacatacggcagcgactggaacgccgagaattggggccagggaacccaagtgacagtgtctagcctcgagggatctggcagagccgattgcggctttaccagcgagagctaccagcagggcgtgctgagcgccaccatcctgtacgagatcctgctgggcaaggccaccctgtacgccgtgctggtgtctgccctggtgctgatggctatggtcaagcggaaggacagccggggaagggccaagcgatctggatctggagcaacaaacttctcactactcaaacaagcaggtgacgtggaggagaatcccgggcctactagtatggactggatttggcgcatccttttccttgtcggcgctgctaccggcgcgcattccttcgaagaagtgcagctggttgaatctggcggaggactggttcagcctggcggatctctgagactgtcttgtgccgccagcggcttcagcttcagcgacttttggatgagctgggtccgacaggcccctggcaaaggacttgaatgggtcgccacaatcagccaggccggcagcgagaaggactacgtggactctgtgaagggcagattcaccatcagccgggacaacgccaagaagtccctgtacctccagatgaacagcctgagagccgaggacaccgccgtgtactattgtgcctctggcgtgtacagcttcgactacagaggccagggcaccctggtcacagtctcttctacgcgtgataaaactcatacctgtccgccatgcccggcaatccccgaggacacattcttcccaagccccgagagcagctgcgacgtgaagctggtggaaaagagcttcgagacagacaccaacctgaacttccagaacctgagcgtgatcggcttcagaatcctgctgctgaaagtggccggctttaacctgctgatgaccctgcggctgtggtccagccgcgccaagagaagcggatctggcgtgaagcagaccctgaatttcgacctgctgaagctggctggcgacgtggaatccaacccaggcccttctagaggccatatgaccgagtacaagcccacggtgcgcctcgccacccgcgacgacgtccccagggccgtacgcaccctcgccgccgcgttcgccgactaccccgccacgcgccacaccgtcgatccggaccgccacatcgagcgggtcaccgagctgcaagaactcttcctcacgcgcgtcgggctcgacatcggcaaggtgtgggtcgcggacgacggcgccgcggtggcggtctggaccacgccggagagcgtcgaagcgggggcggtgttcgccgagatcggcccgcgcatggccgagttgagcggttcccggctggccgcgcagcaacagatggaaggcctcctggcgccgcaccggcccaaggagcccgcgtggttcctggccaccgtcggcgtctcgcccgaccaccagggcaagggtctgggcagcgccgtcgtgctccccggagtggaggcggccgagcgcgccggggtgcccgccttcctggagacctccgcgccccgcaacctccccttctacgagcggctcggcttcaccgtcaccgccgacgtcgaggtgcccgaaggaccgcgcacctggtgcatgacccgcaagcccggtgcctga

SEQ ID NO: 7329 - DNA, 2034 bp, Artificial Sequence
  Synthetic Polynucloetide
atggccttaccagtgaccgccttgctcctgccgctggccttgctgctccacgccgccaggccggaagtgcagctggttgaatctggcggaggactggttcaggctggcggatctctgagactgtcttgtgccgccagcggcagaacctttagcatgggctggtttagacaggcccctggcaaagagagagagttcgtcgccgccatcacatactctggcggcagcccttactacgccgactctgtgaagggcagattcaccatcagccgggacaacgccaagaacaccgtgtacctccagatgaacagcctgaagcctgaggacaccgccgtgtactactgcgccgccaatccaacatacggcagcgactggaacgccgagaattggggccagggaacccaagtgacagtgtctagcctcgaggacaaaactcacacatgcccaccgtgcccagcaggcagagccgattgcggctttaccagcgagagctaccagcagggcgtgctgagcgccaccatcctgtacgagatcctgctgggcaaggccaccctgtacgccgtgctggtgtctgccctggtgctgatggctatggtcaagcggaaggacagccggggaagggccaagcgatctggatctggagcaacaaacttctcactactcaaacaagcaggtgacgtggaggagaatcccgggcctactagtatggactggatttggcgcatccttttccttgtcggcgctgctaccggcgcgcattccttcgaagaagtgcagctggttgaatctggcggaggactggttcagcctggcggatctctgagactgtcttgtgccgccagcggcttcagcttcagcgacttttggatgagctgggtccgacaggcccctggcaaaggacttgaatgggtcgccacaatcagccaggccggcagcgagaaggactacgtggactctgtgaagggcagattcaccatcagccgggacaacgccaagaagtccctgtacctccagatgaacagcctgagagccgaggacaccgccgtgtactattgtgcctctggcgtgtacagcttcgactacagaggccagggcaccctggtcacagtctcttctacgcgtgataaaactcatacctgtccgccatgcccggcaatccccgaggacacattcttcccaagccccgagagcagctgcgacgtgaagctggtggaaaagagcttcgagacagacaccaacctgaacttccagaacctgagcgtgatcggcttcagaatcctgctgctgaaagtggccggctttaacctgctgatgaccctgcggctgtggtccagccgcgccaagagaagcggatctggcgtgaagcagaccctgaatttcgacctgctgaagctggctggcgacgtggaatccaacccaggcccttctagaggccatatgaccgagtacaagcccacggtgcgcctcgccacccgcgacgacgtccccagggccgtacgcaccctcgccgccgcgttcgccgactaccccgccacgcgccacaccgtcgatccggaccgccacatcgagcgggtcaccgagctgcaagaactcttcctcacgcgcgtcgggctcgacatcggcaaggtgtgggtcgcggacgacggcgccgcggtggcggtctggaccacgccggagagcgtcgaagcgggggcggtgttcgccgagatcggcccgcgcatggccgagttgagcggttcccggctggccgcgcagcaacagatggaaggcctcctggcgccgcaccggcccaaggagcccgcgtggttcctggccaccgtcggcgtctcgcccgaccaccagggcaagggtctgggcagcgccgtcgtgctccccggagtggaggcggccgagcgcgccggggtgcccgccttcctggagacctccgcgccccgcaacctccccttctacgagcggctcggcttcaccgtcaccgccgacgtcgaggtgcccgaaggaccgcgcacctggtgcatgacccgcaagcccggtgcctga

SEQ ID NO: 7330 - DNA, 1332 bp, Artificial Sequence
  Synthetic Polynucloetide
atggccttaccagtgaccgccttgctcctgccgctggccttgctgctccacgccgccaggccggaagtgcagctggttgaatctggcggaggactggttcaggctggcggatctctgagactgtcttgtgccgccagcggcagaacctttagcatgggctggtttagacaggcccctggcaaagagagagagttcgtcgccgccatcacatactctggcggcagcccttactacgccgactctgtgaagggcagattcaccatcagccgggacaacgccaagaacaccgtgtacctccagatgaacagcctgaagcctgaggacaccgccgtgtactactgcgccgccaatccaacatacggcagcgactggaacgccgagaattggggccagggaacccaagtgacagtgtctagcctcgaggacaaaactcacacatgcccaccgtgcccagcaggcagagccgattgcggctttaccagcgagagctaccagcagggcgtgctgagcgccaccatcctgtacgagatcctgctgggcaaggccaccctgtacgccgtgctggtgtctgccctggtgctgatggctatggtcaagcggaaggacagccggggaagggccaagcgatctggatctggagcaacaaacttctcactactcaaacaagcaggtgacgtggaggagaatcccgggcctactagtatggactggatttggcgcatccttttccttgtcggcgctgctaccggcgcgcattccttcgaagaagtgcagctggttgaatctggcggaggactggttcagcctggcggatctctgagactgtcttgtgccgccagcggcttcagcttcagcgacttttggatgagctgggtccgacaggcccctggcaaaggacttgaatgggtcgccacaatcagccaggccggcagcgagaaggactacgtggactctgtgaagggcagattcaccatcagccgggacaacgccaagaagtccctgtacctccagatgaacagcctgagagccgaggacaccgccgtgtactattgtgcctctggcgtgtacagcttcgactacagaggccagggcaccctggtcacagtctcttctacgcgtgataaaactcatacctgtccgccatgcccggcaatccccgaggacacattcttcccaagccccgagagcagctgcgacgtgaagctggtggaaaagagcttcgagacagacaccaacctgaacttccagaacctgagcgtgatcggcttcagaatcctgctgctgaaagtggccggctttaacctgctgatgaccctgcggctgtggtccagc

SEQ ID NO: 7331 - DNA, 1305 bp, Artificial Sequence
  Synthetic Polynucloetide
atggccttaccagtgaccgccttgctcctgccgctggccttgctgctccacgccgccaggccggaagtgcagctggttgaatctggcggaggactggttcaggctggcggatctctgagactgtcttgtgccgccagcggcagaacctttagcatgggctggtttagacaggcccctggcaaagagagagagttcgtcgccgccatcacatactctggcggcagcccttactacgccgactctgtgaagggcagattcaccatcagccgggacaacgccaagaacaccgtgtacctccagatgaacagcctgaagcctgaggacaccgccgtgtactactgcgccgccaatccaacatacggcagcgactggaacgccgagaattggggccagggaacccaagtgacagtgtctagcctcgagggatctggcagagccgattgcggctttaccagcgagagctaccagcagggcgtgctgagcgccaccatcctgtacgagatcctgctgggcaaggccaccctgtacgccgtgctggtgtctgccctggtgctgatggctatggtcaagcggaaggacagccggggaagggccaagcgatctggatctggagcaacaaacttctcactactcaaacaagcaggtgacgtggaggagaatcccgggcctactagtatggactggatttggcgcatccttttccttgtcggcgctgctaccggcgcgcattccttcgaagaagtgcagctggttgaatctggcggaggactggttcagcctggcggatctctgagactgtcttgtgccgccagcggcttcagcttcagcgacttttggatgagctgggtccgacaggcccctggcaaaggacttgaatgggtcgccacaatcagccaggccggcagcgagaaggactacgtggactctgtgaagggcagattcaccatcagccgggacaacgccaagaagtccctgtacctccagatgaacagcctgagagccgaggacaccgccgtgtactattgtgcctctggcgtgtacagcttcgactacagaggccagggcaccctggtcacagtctcttctacgcgtgataaaactcatacctgtccgccatgcccggcaatccccgaggacacattcttcccaagccccgagagcagctgcgacgtgaagctggtggaaaagagcttcgagacagacaccaacctgaacttccagaacctgagcgtgatcggcttcagaatcctgctgctgaaagtggccggctttaacctgctgatgaccctgcggctgtggtccagc

SEQ ID NO: 7332 - DNA, 2661 bp, Artificial Sequence
  Synthetic Polynucloetide
atggccttaccagtgaccgccttgctcctgccgctggccttgctgctccacgccgccaggccggaagtgcagctggttgaatctggcggaggactggttcaggctggcggatctctgagactgtcttgtgccgccagcggcagaacctttagcatgggctggtttagacaggcccctggcaaagagagagagttcgtcgccgccatcacatactctggcggcagcccttactacgccgactctgtgaagggcagattcaccatcagccgggacaacgccaagaacaccgtgtacctccagatgaacagcctgaagcctgaggacaccgccgtgtactactgcgccgccaatccaacatacggcagcgactggaacgccgagaattggggccagggaacccaagtgacagtgtctagcctcgagggacagcctaaggccaatcctaccgtgacactgttccctccaagcagcgaagaactccaggccaacaaggccacacttgtgtgcctgatctccgacttctaccctggggctgtgacagtggcttggaaggccgatggatctcctgtgaaagccggcgtggaaaccaccaagccatccaagcagagcaacaacaaatacgccgccagctcctacctgagcctgacacctgagcagtggaagtcccacagatcctacagctgccaagtgacccacgaaggcagcaccgtggaaaagacagtggcccctacagagtgcagccccatcaagaccgatgtgattacaatggaccccaaggacaactgctccaaggacgccaacgataccctgctgctccagctgaccaacaccagcgcctactacatgtacttgttgctgctgctgaagtccgtggtgtacttcgccatcatcacatgctgcctgctgcggagaaccgccttctgctgcaacggcgagaagtctagggccaagcgatctggatctggagcaacaaacttctcactactcaaacaagcaggtgacgtggaggagaatcccgggcctactagtatggactggatttggcgcatccttttccttgtcggcgctgctaccggcgcgcattccttcgaagaagtgcagctggttgaatctggcggaggactggttcagcctggcggatctctgagactgtcttgtgccgccagcggcttcagcttcagcgacttttggatgagctgggtccgacaggcccctggcaaaggacttgaatgggtcgccacaatcagccaggccggcagcgagaaggactacgtggactctgtgaagggcagattcaccatcagccgggacaacgccaagaagtccctgtacctccagatgaacagcctgagagccgaggacaccgccgtgtactattgtgcctctggcgtgtacagcttcgactacagaggccagggcaccctggtcacagtctcttctacgcgtgcctctacaaagggaccctccgtgtttcctctggctcccagcagcaagtctacaagcggaggaacagccgctctgggctgcctggtcaaggattactttcccgagcctgtgaccgtgtcctggaatagcggagcactgacaagcggcgtgcacacctttccagccgtgctgcaaagcagcggcctgtactctctgagcagcgtggtcacagtgcctagctctagcctgggcacccagacctacatctgcaatgtgaaccacaagcctagcaacaccaaggtggacaagagagtggaacccaagagctgtgaagtgaaaaccgactccaccgaccacgtgaagcccaaagagacagagaacaccaagcagcccagcaagagctgccacaagcccaaggccatcgtgcacaccgagaaagtgaacatgatgagcctgaccgtgctgggcctgcggatgctgttcgccaaaaccgtggccgtgaacttcctgctgaccgccaagctgttcttcctccgcgccaagagaagcggatctggcgtgaagcagaccctgaatttcgacctgctgaagctggctggcgacgtggaatccaacccaggcccttctagaggccatatgaccgagtacaagcccacggtgcgcctcgccacccgcgacgacgtccccagggccgtacgcaccctcgccgccgcgttcgccgactaccccgccacgcgccacaccgtcgatccggaccgccacatcgagcgggtcaccgagctgcaagaactcttcctcacgcgcgtcgggctcgacatcggcaaggtgtgggtcgcggacgacggcgccgcggtggcggtctggaccacgccggagagcgtcgaagcgggggcggtgttcgccgagatcggcccgcgcatggccgagttgagcggttcccggctggccgcgcagcaacagatggaaggcctcctggcgccgcaccggcccaaggagcccgcgtggttcctggccaccgtcggcgtctcgcccgaccaccagggcaagggtctgggcagcgccgtcgtgctccccggagtggaggcggccgagcgcgccggggtgcccgccttcctggagacctccgcgccccgcaacctccccttctacgagcggctcggcttcaccgtcaccgccgacgtcgaggtgcccgaaggaccgcgcacctggtgcatgacccgcaagcccggtgcctga

SEQ ID NO: 7333 - DNA, 1959 bp, Artificial Sequence; identical to SEQ ID NO: 7295
  Synthetic Polynucloetide

SEQ ID NO: 7334 - DNA, 2046 bp, Artificial Sequence
  Synthetic Polynucloetide
atggccttaccagtgaccgccttgctcctgccgctggccttgctgctccacgccgccaggccggaagtgcagctggttgaatctggcggaggactggttcaggctggcggatctctgagactgtcttgtgccgccagcggcagaacctttagcatgggctggtttagacaggcccctggcaaagagagagagttcgtcgccgccatcacatactctggcggcagcccttactacgccgactctgtgaagggcagattcaccatcagccgggacaacgccaagaacaccgtgtacctccagatgaacagcctgaagcctgaggacaccgccgtgtactactgcgccgccaatccaacatacggcagcgactggaacgccgagaattggggccagggaacccaagtgacagtgtctagcctcgagggatctcccatcaagaccgatgtgattacaatggaccccaaggacaactgctccaaggacgccaacgataccctgctgctccagctgaccaacaccagcgcctactacatgtacttgttgctgctgctgaagtccgtggtgtacttcgccatcatcacatgctgcctgctgcggagaaccgccttctgctgcaacggcgagaagtctagggccaagcgatctggatctggagcaacaaacttctcactactcaaacaagcaggtgacgtggaggagaatcccgggcctactagtatggactggatttggcgcatccttttccttgtcggcgctgctaccggcgcgcattccttcgaagaagtgcagctggttgaatctggcggaggactggttcagcctggcggatctctgagactgtcttgtgccgccagcggcttcagcttcagcgacttttggatgagctgggtccgacaggcccctggcaaaggacttgaatgggtcgccacaatcagccaggccggcagcgagaaggactacgtggactctgtgaagggcagattcaccatcagccgggacaacgccaagaagtccctgtacctccagatgaacagcctgagagccgaggacaccgccgtgtactattgtgcctctggcgtgtacagcttcgactacagaggccagggcaccctggtcacagtctcttctacgcgtggcagcgaagtgaaaaccgactccaccgaccacgtgaagcccaaagagacagagaacaccaagcagcccagcaagagctgccacaagcccaaggccatcgtgcacaccgagaaagtgaacatgatgagcctgaccgtgctgggcctgcggatgctgttcgccaaaaccgtggccgtgaacttcctgctgaccgccaagctgttcttcctccgcgccaagagaagcggatctggcgtgaagcagaccctgaatttcgacctgctgaagctggctggcgacgtggaatccaacccaggcccttctagaggccatatgaccgagtacaagcccacggtgcgcctcgccacccgcgacgacgtccccagggccgtacgcaccctcgccgccgcgttcgccgactaccccgccacgcgccacaccgtcgatccggaccgccacatcgagcgggtcaccgagctgcaagaactcttcctcacgcgcgtcgggctcgacatcggcaaggtgtgggtcgcggacgacggcgccgcggtggcggtctggaccacgccggagagcgtcgaagcgggggcggtgttcgccgagatcggcccgcgcatggccgagttgagcggttcccggctggccgcgcagcaacagatggaaggcctcctggcgccgcaccggcccaaggagcccgcgtggttcctggccaccgtcggcgtctcgcccgaccaccagggcaagggtctgggcagcgccgtcgtgctccccggagtggaggcggccgagcgcgccggggtgcccgccttcctggagacctccgcgccccgcaacctccccttctacgagcggctcggcttcaccgtcaccgccgacgtcgaggtgcccgaaggaccgcgcacctggtgcatgacccgcaagcccggtgcctga

SEQ ID NO: 7335 - DNA, 1344 bp, Artificial Sequence
  Synthetic Polynucloetide
atggccttaccagtgaccgccttgctcctgccgctggccttgctgctccacgccgccaggccggaagtgcagctggttgaatctggcggaggactggttcaggctggcggatctctgagactgtcttgtgccgccagcggcagaacctttagcatgggctggtttagacaggcccctggcaaagagagagagttcgtcgccgccatcacatactctggcggcagcccttactacgccgactctgtgaagggcagattcaccatcagccgggacaacgccaagaacaccgtgtacctccagatgaacagcctgaagcctgaggacaccgccgtgtactactgcgccgccaatccaacatacggcagcgactggaacgccgagaattggggccagggaacccaagtgacagtgtctagcctcgagggatctcccatcaagaccgatgtgattacaatggaccccaaggacaactgctccaaggacgccaacgataccctgctgctccagctgaccaacaccagcgcctactacatgtacttgttgctgctgctgaagtccgtggtgtacttcgccatcatcacatgctgcctgctgcggagaaccgccttctgctgcaacggcgagaagtctagggccaagcgatctggatctggagcaacaaacttctcactactcaaacaagcaggtgacgtggaggagaatcccgggcctactagtatggactggatttggcgcatccttttccttgtcggcgctgctaccggcgcgcattccttcgaagaagtgcagctggttgaatctggcggaggactggttcagcctggcggatctctgagactgtcttgtgccgccagcggcttcagcttcagcgacttttggatgagctgggtccgacaggcccctggcaaaggacttgaatgggtcgccacaatcagccaggccggcagcgagaaggactacgtggactctgtgaagggcagattcaccatcagccgggacaacgccaagaagtccctgtacctccagatgaacagcctgagagccgaggacaccgccgtgtactattgtgcctctggcgtgtacagcttcgactacagaggccagggcaccctggtcacagtctcttctacgcgtggcagcgaagtgaaaaccgactccaccgaccacgtgaagcccaaagagacagagaacaccaagcagcccagcaagagctgccacaagcccaaggccatcgtgcacaccgagaaagtgaacatgatgagcctgaccgtgctgggcctgcggatgctgttcgccaaaaccgtggccgtgaacttcctgctgaccgccaagctgttcttcctc

SEQ ID NO: 7336 - DNA, 2073 bp, Artificial Sequence
  Synthetic Polynucloetide
atggccttaccagtgaccgccttgctcctgccgctggccttgctgctccacgccgccaggccggaagtgcagctggttgaatctggcggaggactggttcaggctggcggatctctgagactgtcttgtgccgccagcggcagaacctttagcatgggctggtttagacaggcccctggcaaagagagagagttcgtcgccgccatcacatactctggcggcagcccttactacgccgactctgtgaagggcagattcaccatcagccgggacaacgccaagaacaccgtgtacctccagatgaacagcctgaagcctgaggacaccgccgtgtactactgcgccgccaatccaacatacggcagcgactggaacgccgagaattggggccagggaacccaagtgacagtgtctagcctcgaggacaaaactcacacatgcccaccgtgcccagcacccatcaagaccgatgtgattacaatggaccccaaggacaactgctccaaggacgccaacgataccctgctgctccagctgaccaacaccagcgcctactacatgtacttgttgctgctgctgaagtccgtggtgtacttcgccatcatcacatgctgcctgctgcggagaaccgccttctgctgcaacggcgagaagtctagggccaagcgatctggatctggagcaacaaacttctcactactcaaacaagcaggtgacgtggaggagaatcccgggcctactagtatggactggatttggcgcatccttttccttgtcggcgctgctaccggcgcgcattccttcgaagaagtgcagctggttgaatctggcggaggactggttcagcctggcggatctctgagactgtcttgtgccgccagcggcttcagcttcagcgacttttggatgagctgggtccgacaggcccctggcaaaggacttgaatgggtcgccacaatcagccaggccggcagcgagaaggactacgtggactctgtgaagggcagattcaccatcagccgggacaacgccaagaagtccctgtacctccagatgaacagcctgagagccgaggacaccgccgtgtactattgtgcctctggcgtgtacagcttcgactacagaggccagggcaccctggtcacagtctcttctacgcgtggcagcgaagtgaaaaccgactccaccgaccacgtgaagcccaaagagacagagaacaccaagcagcccagcaagagctgccacaagcccaaggccatcgtgcacaccgagaaagtgaacatgatgagcctgaccgtgctgggcctgcggatgctgttcgccaaaaccgtggccgtgaacttcctgctgaccgccaagctgttcttcctccgcgccaagagaagcggatctggcgtgaagcagaccctgaatttcgacctgctgaagctggctggcgacgtggaatccaacccaggcccttctagaggccatatgaccgagtacaagcccacggtgcgcctcgccacccgcgacgacgtccccagggccgtacgcaccctcgccgccgcgttcgccgactaccccgccacgcgccacaccgtcgatccggaccgccacatcgagcgggtcaccgagctgcaagaactcttcctcacgcgcgtcgggctcgacatcggcaaggtgtgggtcgcggacgacggcgccgcggtggcggtctggaccacgccggagagcgtcgaagcgggggcggtgttcgccgagatcggcccgcgcatggccgagttgagcggttcccggctggccgcgcagcaacagatggaaggcctcctggcgccgcaccggcccaaggagcccgcgtggttcctggccaccgtcggcgtctcgcccgaccaccagggcaagggtctgggcagcgccgtcgtgctccccggagtggaggcggccgagcgcgccggggtgcccgccttcctggagacctccgcgccccgcaacctccccttctacgagcggctcggcttcaccgtcaccgccgacgtcgaggtgcccgaaggaccgcgcacctggtgcatgacccgcaagcccggtgcctga

SEQ ID NO: 7337 - DNA, 2073 bp, Artificial Sequence
  Synthetic Polynucloetide
atggccttaccagtgaccgccttgctcctgccgctggccttgctgctccacgccgccaggccggaagtgcagctggttgaatctggcggaggactggttcaggctggcggatctctgagactgtcttgtgccgccagcggcagaacctttagcatgggctggtttagacaggcccctggcaaagagagagagttcgtcgccgccatcacatactctggcggcagcccttactacgccgactctgtgaagggcagattcaccatcagccgggacaacgccaagaacaccgtgtacctccagatgaacagcctgaagcctgaggacaccgccgtgtactactgcgccgccaatccaacatacggcagcgactggaacgccgagaattggggccagggaacccaagtgacagtgtctagcctcgagggatctcccatcaagaccgatgtgattacaatggaccccaaggacaactgctccaaggacgccaacgataccctgctgctccagctgaccaacaccagcgcctactacatgtacttgttgctgctgctgaagtccgtggtgtacttcgccatcatcacatgctgcctgctgcggagaaccgccttctgctgcaacggcgagaagtctagggccaagcgatctggatctggagcaacaaacttctcactactcaaacaagcaggtgacgtggaggagaatcccgggcctactagtatggactggatttggcgcatccttttccttgtcggcgctgctaccggcgcgcattccttcgaagaagtgcagctggttgaatctggcggaggactggttcagcctggcggatctctgagactgtcttgtgccgccagcggcttcagcttcagcgacttttggatgagctgggtccgacaggcccctggcaaaggacttgaatgggtcgccacaatcagccaggccggcagcgagaaggactacgtggactctgtgaagggcagattcaccatcagccgggacaacgccaagaagtccctgtacctccagatgaacagcctgagagccgaggacaccgccgtgtactattgtgcctctggcgtgtacagcttcgactacagaggccagggcaccctggtcacagtctcttctacgcgtgataaaactcatacctgtccgccatgcccggcagaagtgaaaaccgactccaccgaccacgtgaagcccaaagagacagagaacaccaagcagcccagcaagagctgccacaagcccaaggccatcgtgcacaccgagaaagtgaacatgatgagcctgaccgtgctgggcctgcggatgctgttcgccaaaaccgtggccgtgaacttcctgctgaccgccaagctgttcttcctccgcgccaagagaagcggatctggcgtgaagcagaccctgaatttcgacctgctgaagctggctggcgacgtggaatccaacccaggcccttctagaggccatatgaccgagtacaagcccacggtgcgcctcgccacccgcgacgacgtccccagggccgtacgcaccctcgccgccgcgttcgccgactaccccgccacgcgccacaccgtcgatccggaccgccacatcgagcgggtcaccgagctgcaagaactcttcctcacgcgcgtcgggctcgacatcggcaaggtgtgggtcgcggacgacggcgccgcggtggcggtctggaccacgccggagagcgtcgaagcgggggcggtgttcgccgagatcggcccgcgcatggccgagttgagcggttcccggctggccgcgcagcaacagatggaaggcctcctggcgccgcaccggcccaaggagcccgcgtggttcctggccaccgtcggcgtctcgcccgaccaccagggcaagggtctgggcagcgccgtcgtgctccccggagtggaggcggccgagcgcgccggggtgcccgccttcctggagacctccgcgccccgcaacctccccttctacgagcggctcggcttcaccgtcaccgccgacgtcgaggtgcccgaaggaccgcgcacctggtgcatgacccgcaagcccggtgcctga

SEQ ID NO: 7338 - DNA, 2100 bp, Artificial Sequence
  Synthetic Polynucloetide
atggccttaccagtgaccgccttgctcctgccgctggccttgctgctccacgccgccaggccggaagtgcagctggttgaatctggcggaggactggttcaggctggcggatctctgagactgtcttgtgccgccagcggcagaacctttagcatgggctggtttagacaggcccctggcaaagagagagagttcgtcgccgccatcacatactctggcggcagcccttactacgccgactctgtgaagggcagattcaccatcagccgggacaacgccaagaacaccgtgtacctccagatgaacagcctgaagcctgaggacaccgccgtgtactactgcgccgccaatccaacatacggcagcgactggaacgccgagaattggggccagggaacccaagtgacagtgtctagcctcgaggacaaaactcacacatgcccaccgtgcccagcacccatcaagaccgatgtgattacaatggaccccaaggacaactgctccaaggacgccaacgataccctgctgctccagctgaccaacaccagcgcctactacatgtacttgttgctgctgctgaagtccgtggtgtacttcgccatcatcacatgctgcctgctgcggagaaccgccttctgctgcaacggcgagaagtctagggccaagcgatctggatctggagcaacaaacttctcactactcaaacaagcaggtgacgtggaggagaatcccgggcctactagtatggactggatttggcgcatccttttccttgtcggcgctgctaccggcgcgcattccttcgaagaagtgcagctggttgaatctggcggaggactggttcagcctggcggatctctgagactgtcttgtgccgccagcggcttcagcttcagcgacttttggatgagctgggtccgacaggcccctggcaaaggacttgaatgggtcgccacaatcagccaggccggcagcgagaaggactacgtggactctgtgaagggcagattcaccatcagccgggacaacgccaagaagtccctgtacctccagatgaacagcctgagagccgaggacaccgccgtgtactattgtgcctctggcgtgtacagcttcgactacagaggccagggcaccctggtcacagtctcttctacgcgtgataaaactcatacctgtccgccatgcccggcagaagtgaaaaccgactccaccgaccacgtgaagcccaaagagacagagaacaccaagcagcccagcaagagctgccacaagcccaaggccatcgtgcacaccgagaaagtgaacatgatgagcctgaccgtgctgggcctgcggatgctgttcgccaaaaccgtggccgtgaacttcctgctgaccgccaagctgttcttcctccgcgccaagagaagcggatctggcgtgaagcagaccctgaatttcgacctgctgaagctggctggcgacgtggaatccaacccaggcccttctagaggccatatgaccgagtacaagcccacggtgcgcctcgccacccgcgacgacgtccccagggccgtacgcaccctcgccgccgcgttcgccgactaccccgccacgcgccacaccgtcgatccggaccgccacatcgagcgggtcaccgagctgcaagaactcttcctcacgcgcgtcgggctcgacatcggcaaggtgtgggtcgcggacgacggcgccgcggtggcggtctggaccacgccggagagcgtcgaagcgggggcggtgttcgccgagatcggcccgcgcatggccgagttgagcggttcccggctggccgcgcagcaacagatggaaggcctcctggcgccgcaccggcccaaggagcccgcgtggttcctggccaccgtcggcgtctcgcccgaccaccagggcaagggtctgggcagcgccgtcgtgctccccggagtggaggcggccgagcgcgccggggtgcccgccttcctggagacctccgcgccccgcaacctccccttctacgagcggctcggcttcaccgtcaccgccgacgtcgaggtgcccgaaggaccgcgcacctggtgcatgacccgcaagcccggtgcctga

SEQ ID NO: 7339 - DNA, 1398 bp, Artificial Sequence
  Synthetic Polynucloetide
atggccttaccagtgaccgccttgctcctgccgctggccttgctgctccacgccgccaggccggaagtgcagctggttgaatctggcggaggactggttcaggctggcggatctctgagactgtcttgtgccgccagcggcagaacctttagcatgggctggtttagacaggcccctggcaaagagagagagttcgtcgccgccatcacatactctggcggcagcccttactacgccgactctgtgaagggcagattcaccatcagccgggacaacgccaagaacaccgtgtacctccagatgaacagcctgaagcctgaggacaccgccgtgtactactgcgccgccaatccaacatacggcagcgactggaacgccgagaattggggccagggaacccaagtgacagtgtctagcctcgaggacaaaactcacacatgcccaccgtgcccagcacccatcaagaccgatgtgattacaatggaccccaaggacaactgctccaaggacgccaacgataccctgctgctccagctgaccaacaccagcgcctactacatgtacttgttgctgctgctgaagtccgtggtgtacttcgccatcatcacatgctgcctgctgcggagaaccgccttctgctgcaacggcgagaagtctagggccaagcgatctggatctggagcaacaaacttctcactactcaaacaagcaggtgacgtggaggagaatcccgggcctactagtatggactggatttggcgcatccttttccttgtcggcgctgctaccggcgcgcattccttcgaagaagtgcagctggttgaatctggcggaggactggttcagcctggcggatctctgagactgtcttgtgccgccagcggcttcagcttcagcgacttttggatgagctgggtccgacaggcccctggcaaaggacttgaatgggtcgccacaatcagccaggccggcagcgagaaggactacgtggactctgtgaagggcagattcaccatcagccgggacaacgccaagaagtccctgtacctccagatgaacagcctgagagccgaggacaccgccgtgtactattgtgcctctggcgtgtacagcttcgactacagaggccagggcaccctggtcacagtctcttctacgcgtgataaaactcatacctgtccgccatgcccggcagaagtgaaaaccgactccaccgaccacgtgaagcccaaagagacagagaacaccaagcagcccagcaagagctgccacaagcccaaggccatcgtgcacaccgagaaagtgaacatgatgagcctgaccgtgctgggcctgcggatgctgttcgccaaaaccgtggccgtgaacttcctgctgaccgccaagctgttcttcctc

SEQ ID NO: 7340 - DNA, 2181 bp, Artificial Sequence
  Synthetic Polynucloetide
atggccttaccagtgaccgccttgctcctgccgctggccttgctgctccacgccgccaggccggacatccagatgacacagagccctagcagcctgtctgccagcgtgggagacagagtgaccatcacatgcaaggccagcgaccacatcaacaactggctggcctggtatcagcagaagcctggacaggcccctaagctgctgatctacggcgctaccacactggaaacaggcgtgcccagcagattttctggcagcggctctggcaccgactacaccctgacaatatccagcctccagcctgaggacttcgccacctactactgtcagcagagctggaacaccccttggacattcggccagggcaccaagctggaaatcaagagaggcggaggcggaagtggaggcggaggatctggcggcggaggctctcaagttcagcttcaacagcctggcgctgagctggtcaaacctggcgcttctgtgaagatgagctgcaaagccagcggctacgccttcagcagctactggatcaactggatgaagcagaaacccggccagggactcgaatggatcggccaaatctatcccggcgacggcgacaccaactacaacggcaagttcaagggcagagccacactgaccgccgatacctctagcagcacagcctacatgcagctgagcagcctgaccagcgaagatagcgccgtgtacttctgtgcccggtccatcacaacagtcgtgggctgcgctatggactattggggccagggaacaagcgtgaccgtgtctagtacgcgtgagcagaaactgatctcggaagaggatctggcgaagcccaccacgacgccagcgccgcgaccaccaacaccggcgcccaccatcgcgtcgcagcccctgtccctgcgcccagaggcgtgccggccagcggcggggggcgcagtgcacacgagggggctggacttcgcctgtgacatctacatctgggcgcccttggccgggacttgtggggtccttctcctgtcactggttatcaccctttactgcaaacggggcagaaagaaactcctgtatatattcaaacaaccatttatgagaccagtacaaactactcaagaggaagatggctgtagctgccgatttccagaagaagaagaaggaggatgtgaactgagagtgaagttcagcaggagcgcagacgcccccgcgtaccagcagggccagaaccagctctataacgagctgaatctaggacgaagagaggagtacgatgttttggacaagagacgtggccgggaccctgagatggggggaaagccgagaaggaagaaccctcaggaaggcctgtacaatgaactgcagaaagataagatggcggaggcctacagtgagattgggatgaaaggcgagcgccggaggggcaaggggcacgatggcctttaccagggtctcagtacagccaccaaggacacctacgacgcccttcacatgcaggccctgccccctcgctctagtggctccggcgagggcagaggaagtctactaacctgcggagatgtggaagaaaatcctggcccacatatgaccgagtacaagcccacggtgcgcctcgccacccgcgacgacgtccccagggccgtacgcaccctcgccgccgcgttcgccgactaccccgccacgcgccacaccgtcgatccggaccgccacatcgagcgggtcaccgagctgcaagaactcttcctcacgcgcgtcgggctcgacatcggcaaggtgtgggtcgcggacgacggcgccgcggtggcggtctggaccacgccggagagcgtcgaagcgggggcggtgttcgccgagatcggcccgcgcatggccgagttgagcggttcccggctggccgcgcagcaacagatggaaggcctcctggcgccgcaccggcccaaggagcccgcgtggttcctggccaccgtcggcgtctcgcccgaccaccagggcaagggtctgggcagcgccgtcgtgctccccggagtggaggcggccgagcgcgccggggtgcccgccttcctggagacctccgcgccccgcaacctccccttctacgagcggctcggcttcaccgtcaccgccgacgtcgaggtgcccgaaggaccgcgcacctggtgcatgacccgcaagcccggtgcctga

SEQ ID NO: 7341 - DNA, 2163 bp, Artificial Sequence
  Synthetic Polynucloetide
atggccttaccagtgaccgccttgctcctgccgctggccttgctgctccacgccgccaggccggacatccagatgacacagagccctagcagcctgtctgccagcgtgggagacagagtgaccatcacatgcaaggccagcgaccacatcaacaactggctggcctggtatcagcagaagcctggacaggcccctaagctgctgatctacggcgctaccacactggaaacaggcgtgcccagcagattttctggcagcggctctggcaccgactacaccctgacaatatccagcctccagcctgaggacttcgccacctactactgtcagcagagctggaacaccccttggacattcggccagggcaccaagctggaaatcaagagaggcggaggcggaagtggaggcggaggatctggcggcggaggctctcaagttcagcttcaacagcctggcgctgagctggtcaaacctggcgcttctgtgaagatgagctgcaaagccagcggctacgccttcagcagctactggatcaactggatgaagcagaaacccggccagggactcgaatggatcggccaaatctatcccggcgacggcgacaccaactacaacggcaagttcaagggcagagccacactgaccgccgatacctctagcagcacagcctacatgcagctgagcagcctgaccagcgaagatagcgccgtgtacttctgtgcccggtccatcacaacagtcgtgggctgcgctatggactattggggccagggaacaagcgtgaccgtgtctagtacgcgtgagcagaaactgatctcggaagaggatctgaaaattgaagttatgtatcctcctccttacctagacaatgagaagagcaatggaaccattatccatgtgaaagggaaacacctttgtccaagtcccctatttcccggaccttctaagcccttttgggtgctggtggtggttgggggagtcctggcttgctatagcttgctagtaacagtggcctttattattttctgggtgaggagtaagaggagcaggctcctgcacagtgactacatgaacatgactccacgccgccccggacccacccgcaagcattaccagccctatgccccaccacgcgacttcgcagcctatcgctccagagtgaagttcagcaggagcgcagacgcccccgcgtaccagcagggccagaaccagctctataacgagctcaatctaggacgaagagaggagtacgatgttttggacaagagacgtggccgggaccctgagatggggggaaagccgagaaggaagaaccctcaggaaggcctgtacaatgaactgcagaaagataagatggcggaggcctacagtgagattgggatgaaaggcgagcgccggaggggcaaggggcacgatggcctttaccagggtctcagtacagccaccaaggacacctacgacgcccttcacatgcaggccctgccccctcgctctagtggctccggcgagggcagaggaagtctactaacctgcggagatgtggaagaaaatcctggcccacatatgaccgagtacaagcccacggtgcgcctcgccacccgcgacgacgtccccagggccgtacgcaccctcgccgccgcgttcgccgactaccccgccacgcgccacaccgtcgatccggaccgccacatcgagcgggtcaccgagctgcaagaactcttcctcacgcgcgtcgggctcgacatcggcaaggtgtgggtcgcggacgacggcgccgcggtggcggtctggaccacgccggagagcgtcgaagcgggggcggtgttcgccgagatcggcccgcgcatggccgagttgagcggttcccggctggccgcgcagcaacagatggaaggcctcctggcgccgcaccggcccaaggagcccgcgtggttcctggccaccgtcggcgtctcgcccgaccaccagggcaagggtctgggcagcgccgtcgtgctccccggagtggaggcggccgagcgcgccggggtgcccgccttcctggagacctccgcgccccgcaacctccccttctacgagcggctcggcttcaccgtcaccgccgacgtcgaggtgcccgaaggaccgcgcacctggtgcatgacccgcaagcccggtgcctga

SEQ ID NO: 7342 - DNA, 1491 bp, Artificial Sequence
  Synthetic Polynucloetide
atggccttaccagtgaccgccttgctcctgccgctggccttgctgctccacgccgccaggccggacatccagatgacacagagccctagcagcctgtctgccagcgtgggagacagagtgaccatcacatgcaaggccagcgaccacatcaacaactggctggcctggtatcagcagaagcctggacaggcccctaagctgctgatctacggcgctaccacactggaaacaggcgtgcccagcagattttctggcagcggctctggcaccgactacaccctgacaatatccagcctccagcctgaggacttcgccacctactactgtcagcagagctggaacaccccttggacattcggccagggcaccaagctggaaatcaagagaggcggaggcggaagtggaggcggaggatctggcggcggaggctctcaagttcagcttcaacagcctggcgctgagctggtcaaacctggcgcttctgtgaagatgagctgcaaagccagcggctacgccttcagcagctactggatcaactggatgaagcagaaacccggccagggactcgaatggatcggccaaatctatcccggcgacggcgacaccaactacaacggcaagttcaagggcagagccacactgaccgccgatacctctagcagcacagcctacatgcagctgagcagcctgaccagcgaagatagcgccgtgtacttctgtgcccggtccatcacaacagtcgtgggctgcgctatggactattggggccagggaacaagcgtgaccgtgtctagtacgcgtgagcagaaactgatctcggaagaggatctgaaaattgaagttatgtatcctcctccttacctagacaatgagaagagcaatggaaccattatccatgtgaaagggaaacacctttgtccaagtcccctatttcccggaccttctaagcccttttgggtgctggtggtggttgggggagtcctggcttgctatagcttgctagtaacagtggcctttattattttctgggtgaggagtaagaggagcaggctcctgcacagtgactacatgaacatgactccacgccgccccggacccacccgcaagcattaccagccctatgccccaccacgcgacttcgcagcctatcgctccagagtgaagttcagcaggagcgcagacgcccccgcgtaccagcagggccagaaccagctctataacgagctcaatctaggacgaagagaggagtacgatgttttggacaagagacgtggccgggaccctgagatggggggaaagccgagaaggaagaaccctcaggaaggcctgtacaatgaactgcagaaagataagatggcggaggcctacagtgagattgggatgaaaggcgagcgccggaggggcaaggggcacgatggcctttaccagggtctcagtacagccaccaaggacacctacgacgcccttcacatgcaggccctgccccctcgc

SEQ ID NO: 7343 - DNA, 1512 bp, Artificial Sequence
  Synthetic Polynucloetide
atggccttaccagtgaccgccttgctcctgccgctggccttgctgctccacgccgccaggccggacatccagatgacacagagccctagcagcctgtctgccagcgtgggagacagagtgaccatcacatgcaaggccagcgaccacatcaacaactggctggcctggtatcagcagaagcctggacaggcccctaagctgctgatctacggcgctaccacactggaaacaggcgtgcccagcagattttctggcagcggctctggcaccgactacaccctgacaatatccagcctccagcctgaggacttcgccacctactactgtcagcagagctggaacaccccttggacattcggccagggcaccaagctggaaatcaagagaggcggaggcggaagtggaggcggaggatctggcggcggaggctctcaagttcagcttcaacagcctggcgctgagctggtcaaacctggcgcttctgtgaagatgagctgcaaagccagcggctacgccttcagcagctactggatcaactggatgaagcagaaacccggccagggactcgaatggatcggccaaatctatcccggcgacggcgacaccaactacaacggcaagttcaagggcagagccacactgaccgccgatacctctagcagcacagcctacatgcagctgagcagcctgaccagcgaagatagcgccgtgtacttctgtgcccggtccatcacaacagtcgtgggctgcgctatggactattggggccagggaacaagcgtgaccgtgtctagtacgcgtgagcagaaactgatctcggaagaggatctggcgaagcccaccacgacgccagcgccgcgaccaccaacaccggcgcccaccatcgcgtcgcagcccctgtccctgcgcccagaggcgtgccggccagcggcggggggcgcagtgcacacgagggggctggacttcgcctgtgacatctacatctgggcgcccttggccgggacttgtggggtccttctcctgtcactggttatcaccctttactgcaaacggggcagaaagaaactcctgtatatattcaaacaaccatttatgagaccagtacaaactactcaagaggaagatggctgtagctgccgatttccagaagaagaagaaggaggatgtgaactgagagtgaagttcagcaggagcgcagacgcccccgcgtaccagcagggccagaaccagctctataacgagctgaatctaggacgaagagaggagtacgatgttttggacaagagacgtggccgggaccctgagatggggggaaagccgagaaggaagaaccctcaggaaggcctgtacaatgaactgcagaaagataagatggcggaggcctacagtgagattgggatgaaaggcgagcgccggaggggcaaggggcacgatggcctttaccagggtctcagtacagccaccaaggacacctacgacgcccttcacatgcaggccctgccccctcgctga

SEQ ID NO: 7344 - DNA, 1512 bp, Artificial Sequence
  Synthetic Polynucloetide
atggccttaccagtgaccgccttgctcctgccgctggccttgctgctccacgccgccaggccgcaagttcagcttcaacagcctggcgctgagctggtcaaacctggcgcttctgtgaagatgagctgcaaagccagcggctacgccttcagcagctactggatcaactggatgaagcagaaacccggccagggactcgaatggatcggccaaatctatcccggcgacggcgacaccaactacaacggcaagttcaagggcagagccacactgaccgccgatacctctagcagcacagcctacatgcagctgagcagcctgaccagcgaagatagcgccgtgtacttctgtgcccggtccatcacaacagtcgtgggctgcgctatggactattggggccagggaacaagcgtgaccgtgtctagtggcggaggcggaagtggaggcggaggatctggcggcggaggctctgacatccagatgacacagagccctagcagcctgtctgccagcgtgggagacagagtgaccatcacatgcaaggccagcgaccacatcaacaactggctggcctggtatcagcagaagcctggacaggcccctaagctgctgatctacggcgctaccacactggaaacaggcgtgcccagcagattttctggcagcggctctggcaccgactacaccctgacaatatccagcctccagcctgaggacttcgccacctactactgtcagcagagctggaacaccccttggacattcggccagggcaccaagctggaaatcaagagaacgcgtgagcagaaactgatctcggaagaggatctggcgaagcccaccacgacgccagcgccgcgaccaccaacaccggcgcccaccatcgcgtcgcagcccctgtccctgcgcccagaggcgtgccggccagcggcggggggcgcagtgcacacgagggggctggacttcgcctgtgacatctacatctgggcgcccttggccgggacttgtggggtccttctcctgtcactggttatcaccctttactgcaaacggggcagaaagaaactcctgtatatattcaaacaaccatttatgagaccagtacaaactactcaagaggaagatggctgtagctgccgatttccagaagaagaagaaggaggatgtgaactgagagtgaagttcagcaggagcgcagacgcccccgcgtaccagcagggccagaaccagctctataacgagctgaatctaggacgaagagaggagtacgatgttttggacaagagacgtggccgggaccctgagatggggggaaagccgagaaggaagaaccctcaggaaggcctgtacaatgaactgcagaaagataagatggcggaggcctacagtgagattgggatgaaaggcgagcgccggaggggcaaggggcacgatggcctttaccagggtctcagtacagccaccaaggacacctacgacgcccttcacatgcaggccctgccccctcgctga

SEQ ID NO: 7345 - DNA, 2751 bp, Artificial Sequence
  Synthetic Polynucloetide
atggccttaccagtgaccgccttgctcctgccgctggccttgctgctccacgccgccaggccggacatccagatgacacagagccctagcagcctgtctgccagcgtgggagacagagtgaccatcacatgcaaggccagcgaccacatcaacaactggctggcctggtatcagcagaagcctggacaggcccctaagctgctgatctacggcgctaccacactggaaacaggcgtgcccagcagattttctggcagcggctctggcaccgactacaccctgacaatatccagcctccagcctgaggacttcgccacctactactgtcagcagagctggaacaccccttggacattcggccagggcaccaagctggaaatcaagagaggcggaggcggaagtggaggcggaggatctggcggcggaggctctcaagttcagcttcaacagcctggcgctgagctggtcaaacctggcgcttctgtgaagatgagctgcaaagccagcggctacgccttcagcagctactggatcaactggatgaagcagaaacccggccagggactcgaatggatcggccaaatctatcccggcgacggcgacaccaactacaacggcaagttcaagggcagagccacactgaccgccgatacctctagcagcacagcctacatgcagctgagcagcctgaccagcgaagatagcgccgtgtacttctgtgcccggtccatcacaacagtcgtgggctgcgctatggactattggggccagggaacaagcgtgaccgtgtctagtacgcgtgagcagaaactgatctcggaagaggatctggcgaagcccaccacgacgccagcgccgcgaccaccaacaccggcgcccaccatcgcgtcgcagcccctgtccctgcgcccagaggcgtgccggccagcggcggggggcgcagtgcacacgagggggctggacttcgcctgtgacatctacatctgggcgcccttggccgggacttgtggggtccttctcctgtcactggttatcaccctttactgcgggcgcgccagagtgaagttcagcaggagcgcagacgcccccgcgtaccagcagggccagaaccagctctataacgagctgaatctaggacgaagagaggagtacgatgttttggacaagagacgtggccgggaccctgagatggggggaaagccgagaaggaagaaccctcaggaaggcctgtacaatgaactgcagaaagataagatggcggaggcctacagtgagattgggatgaaaggcgagcgccggaggggcaaggggcacgatggcctttaccagggtctcagtacagccaccaaggacacctacgacgcccttcacatgcaggccctgccccctcgctctagaggatctggagcaacaaacttctcactactcaaacaagcaggtgacgtggaggagaatcccgggcctgggatccacatggccacttacgaggttctctgtgaggtggcgcggaaactgggcacggatgacagggaagtggtattgttcctcctaaacgtgttcatacctcaacccacactggcccaattaattggagctcttagagctttaaaggaggagggcaggttaacgtttcccctgttagcggaatgtctgtttcgtgcaggtcgcagagacctcttgcgcgacctgcttcacttagacccgcgttttttagagcgccacctagcgggcacaatgagttatttcagcccttatcagctcactgttctccacgtagacggggagctgtgtgcgagggatattaggtctttgatatttttaagcaaggacactatagggtctcgcagcacaccacagacattcttacactgggtgtactgtatggaaaacttagacctactgggtcccactgacgtggatgccctaatgtcaatgcttagatctttgtcaagagtagacctacagcgccaagtgcaaaccctaatgggccttcacctttccggcccatcacactcccaacactatcgccatacaccactcgagaccgatttctacgactacaaggacgacgatgacaagactagtggctccggcgagggcagaggaagtctactaacctgcggagatgtggaagaaaatcctggcccacatatgaccgagtacaagcccacggtgcgcctcgccacccgcgacgacgtccccagggccgtacgcaccctcgccgccgcgttcgccgactaccccgccacgcgccacaccgtcgatccggaccgccacatcgagcgggtcaccgagctgcaagaactcttcctcacgcgcgtcgggctcgacatcggcaaggtgtgggtcgcggacgacggcgccgcggtggcggtctggaccacgccggagagcgtcgaagcgggggcggtgttcgccgagatcggcccgcgcatggccgagttgagcggttcccggctggccgcgcagcaacagatggaaggcctcctggcgccgcaccggcccaaggagcccgcgtggttcctggccaccgtcggcgtctcgcccgaccaccagggcaagggtctgggcagcgccgtcgtgctccccggagtggaggcggccgagcgcgccggggtgcccgccttcctggagacctccgcgccccgcaacctccccttctacgagcggctcggcttcaccgtcaccgccgacgtcgaggtgcccgaaggaccgcgcacctggtgcatgacccgcaagcccggtgcctga

SEQ ID NO: 7346 - DNA, 2571 bp, Artificial Sequence
  Synthetic Polynucloetide
atggccttaccagtgaccgccttgctcctgccgctggccttgctgctccacgccgccaggccggacatccagatgacacagagccctagcagcctgtctgccagcgtgggagacagagtgaccatcacatgcaaggccagcgaccacatcaacaactggctggcctggtatcagcagaagcctggacaggcccctaagctgctgatctacggcgctaccacactggaaacaggcgtgcccagcagattttctggcagcggctctggcaccgactacaccctgacaatatccagcctccagcctgaggacttcgccacctactactgtcagcagagctggaacaccccttggacattcggccagggcaccaagctggaaatcaagagactcgagatccagaaccctgatcctgccgtgtaccagctgcgggatagcaagagcagcgacaagagcgtgtgtctgttcaccgacttcgacagccagaccaacgtgtcccagagcaaggactccgacgtgtacatcaccgataagtgcgtgctggacatgcggagcatggacttcaagagcaactccgccgtggcctggtccaacaagtccgatttcgcctgcgccaacgccttcaacaacagcattatccccgaggacacattcttcccaagcagcgacgtgccctgcgacgtgaagctggtggaaaagagcttcgagacagacaccaacctgaacttccagaacctgagcgtgatcggcttcagaatcctgctgctgaaagtggccggctttaacctgctgatgaccctgcggctgtggtccagccgcgccaagagaagcggatctggcgtgaagcagaccctgaatttcgacctgctgaagctggctggcgacgtggaatccaacccaggccctactagtatggactggatttggcgcatccttttccttgtcggcgctgctaccggcgcgcattccttcgaacaagttcagcttcaacagcctggcgctgagctggtcaaacctggcgcttctgtgaagatgagctgcaaagccagcggctacgccttcagcagctactggatcaactggatgaagcagaaacccggccagggactcgaatggatcggccaaatctatcccggcgacggcgacaccaactacaacggcaagttcaagggcagagccacactgaccgccgatacctctagcagcacagcctacatgcagctgagcagcctgaccagcgaagatagcgccgtgtacttctgtgcccggtccatcacaacagtcgtgggctgcgctatggactattggggccagggaacaagcgtgaccgtgtctagtacgcgtgaggacctgaagaacgtgttcccacctgaggtggccgtgttcgagcctagcaaggccgagatcgcccacacccagaaagccaccctcgtgtgcctggctaccggcttctaccccgaccatgtggaactgtcttggtgggtcaacggcaaagaggtgcacagcggcgtgtgtaccgacccccagccactgaaagaacagcccgccctgaacgacagccggtactgcctgagcagcagactgagagtgtccgccaccttctggcagaacccccggaaccacttcagatgccaggtgcagttctacggcctgagcgagaacgacgagtggacccaggacagagccaagcccgtgacccagatcgtgtctgccgaagcctggggcagagccgattgcggcatcaccagcgccagctaccaccagggcgtgctgagcgccaccatcctgtacgagatcctgctgggcaaggccaccctgtacgccgtgctggtgtctgccctggtgctgatggctatggtcaagcggaaggacagccggggaagggccaagcgatctggatctggagcaacaaacttctcactactcaaacaagcaggtgacgtggaggagaatcccgggccttctagaggccatatgaccgagtacaagcccacggtgcgcctcgccacccgcgacgacgtccccagggccgtacgcaccctcgccgccgcgttcgccgactaccccgccacgcgccacaccgtcgatccggaccgccacatcgagcgggtcaccgagctgcaagaactcttcctcacgcgcgtcgggctcgacatcggcaaggtgtgggtcgcggacgacggcgccgcggtggcggtctggaccacgccggagagcgtcgaagcgggggcggtgttcgccgagatcggcccgcgcatggccgagttgagcggttcccggctggccgcgcagcaacagatggaaggcctcctggcgccgcaccggcccaaggagcccgcgtggttcctggccaccgtcggcgtctcgcccgaccaccagggcaagggtctgggcagcgccgtcgtgctccccggagtggaggcggccgagcgcgccggggtgcccgccttcctggagacctccgcgccccgcaacctccccttctacgagcggctcggcttcaccgtcaccgccgacgtcgaggtgcccgaaggaccgcgcacctggtgcatgacccgcaagcccggtgcctga
